United States Patent Application Publication US 2020/0377945 A1 - sequence listing, part 8

SEQ ID NO: 1288 - DNA, 28824 bp, Unknown
  gut microbiota DNA sequence
atttgataattcacccctgaaactgcggagacgcctgaattacgcggttttcagcggtgcagcttgatgcgttccacgtagtaggagatggctgaaatggacatcagcgcatagccgaggagttctgtgctttcttcagaaaggcgcttcgcgatgtacttcgggccttcttctgtgatgaagagagaccagaggtggccggagccgtaaagacgggaatagacgagaagcataccaagaccggcgatcatggcgacaaaagactgggagcggacgaaatgcgcgacgccttcgagcgcttccgaaagcccccgcttccatacgcgccagaaaaggatcacgaggaagaccgcgagaacaatctgccaggcactctttgaaatgaagtcaaaataggcgtcctgctcgcggatgaagagtgacgtcataaagcctgccatcagcaggatgccgccccgctcctcggggatcagtttcgccagggtgaagaaactccccatcgagatcagcagcacgatgtcctgcacccactcgatcgcggtttcagactcaaccccgtagcgggactgccagaaacaggccgcaaggcagagcagatagatgagaccgccggccagcacagcgagaacgccatagccgaaggttttgaggttttgcttatcgcgaggcgtgagtgtcatgattgatgaacctgtttcttctttatttttttagcggatagaggttctgtccgttttttccgaggcggtacattagcaaaatttacgggtttgtgaaattcctgtgaaggtatcccagctgaaataagggaaaacggggtacacgaaaaagtgatgacgctttccgcctaagggtgtcatccggcggtatcctctaaagaaaaattccgttacagattaagaaatagtctgtttcctccttcagactacgttttttgggatattccatggaaggatttattactcaggcgagcaactttgtctggtcgcccgcgctggtcgcgctttgtcttcttggcgggctttggttttcggtccggggccggtttcttcagctgaggcttgtcggcgaaatgatccggcttctctttcagaagaaagtgggcgaagtcggtatttcgagcttccaggcactcaccatgacgctcgccggccgggtcggcaccggcaacatcgctggcgttgcgacggccatttgttttggcggtccgggcgcgcttttctggatgtgggttgtggccttcctcggggcgtcctctgcctttgttgagtcgacgcttggtcaggtttacaaggtcaatatcgatggcgaataccgcggcggtccggcttactatatcgagaaggggctgcacagcaaaccctttgccgtgctgttcgctgtggtgacggtgcttgccgcagggttcctctgcccgggcgttcagggcaactcaatcacgagcgcctttacgcacgccttcggactgaacaccgcggtctcaacggtttttgttatctcgcttctctgcttcattatctttggcggcattacccgtatcgcgcagttcacggttgtggtggttccgttcatggctcagatctatatcgttgcggctctcattatcgtcggcgtgaatatcgacaagttccccgcgatgctgcatctggttttctcgtctgcgttcggcgtgaattcgatgtttggcgccatgctgggcaccgcagtgacctggggcgtgaagcgcggtctgtactccaatgaagccggtcagggtaccggtcctcatgcgtcgtctgccgccgccgtctctcatccggcgaagcagggccttgtgcaggcgttttcggtttatatcgatacgctctttgtctgctcggccactgggttcatgattcttctcacgggctgctacaacgtgatcggtccgaacgggcagacaattgtgaataatctgccgggcgtggaagtggggccggcctacacgcaggccgctgtcgaaacgctgatgcctggctggggttccccgtttgtggcactcgcgcttttcttcttcgcctttacgacgatcgttgcgtattactatcaggcggagacaaatattgtttaccttttccgcggttcgaagcggggcgccgcaatcttcgtgctgcgcgtcatcttcctcgtgggcacggcctatagctcaatgaagagcgcggatctcgcctgggctatgggtgatatcggcatcgggatgatggcttgggtgaacttcatcgcgattctgctgcttcagggaatcgccttcaagtgcctccgggattacgaggaacagaaacacctggggcttgatccgacatttgatccggcaaagctcggtatcacgaatgccgaatactggacagaatcgcagcgtgaaaccaatacgattctcgaaaaatcctccggtgtcgataaccgcgtgctttctaccctgcaggagaagcgtgagctcgaagccgcaaagaagggtaagagaacaggcctctttattgataatgacggggatgactaagagtttccccattcttccagcatagaaaaaagcgttcgtcttccgatgacgaacgcttttttcgttttctcccggacaaagtcagagccggagtaaagcggccgcgttagtacgatacctggcaggtgagtccccgggcccggacacgttcagcgatcgcgtcaagctcttcatgcgttgctttctgcaggtcatgcgccggggtatcgcggtcaatcgtatagatcgtgacaagtctcggtccgatcttttcgactgcgtccagccagggaccgacatacttttcatcgacgttatcgacccgcttgccgtcgaaagatccgtgaaggaacatcgtctgaatgatggcgcggtttccgaaccgttccatcgcttcaaggatcttatcgagatgcagagcggcattgggccgatccacccgctcaatgtattcctcatccacggtatcaagcttcagctcagcgttgtcgaccttgagaagcgcgtcaaaaatgggctgacgcgtgataaggaaggcgtttgtcaggacagagaccttcgccttcggacagtactcatcacggagcttcagaacgtcatccacgatttcaggaaattcagggtgacctgtcggctcgccgttcccggagaaggtgagcgtatcggggagcttcccctcggctttcatttcctcgagcttttccctgagcatcgtacggatgagcccccggctcggcatcttctgatgcggacgcgtgtcggcattgaagccgatttcgcagtaaatgcagtcgaaggagcagatcttgccgtctcccgggcagacattgataccgagtgaaatgccgagacggcggctgtgaacggggccgaaaatgggtgatgggaaaattatcgtagacatgtttttttgtaggttagggtctttgttccattgtagccgcgggagtgaaagcagtcggggaagcctcgcagggcatcgggaacatcattcgtagtgcggaatatccggaacgcagggggccaagcgagtaaaatatagcgatttcggctcccccttattttcgagggatggagccttctccggaatctgagagagcttataagcatggcgcgtattccctttggaacaacctggtggggcaaaaagtggctcgattcactgacgctcctcgactacgaaaaccggctgccccgcggccggagttacttttcgacgggtcatgttctctcaagtgaattcgatccgaaggaacttcttttcacagcgaaggttcagggctcgcagctgagaccttataccgtgaaaatccgtttcccccgggtggaccgggaggcggctgcccgcttcacggatcttgtcgcgaaggatccggaatttatttcttctctcgtcgacgacaggctggagccccgcgtcgcggatgtcgctgaagccgccggactcaggctctttccggaatcctggcgcgaattcggtctcacctgcacctgtccggatttcgcggtgccctgtaagcacattgcggcagccttccttgccatcgtccgtgaaattgatgccgatcccctgaaagtgttgagtttccagggctttgatctgaaaaaagcgctgaaggagcggggagtcgacctggagcgggccgagggctttgagcttccggacgcccggtcactgcttcgctggaaggcgaagcctgaagaggctgtagcgccgaagcagggcggtgcgaaggatgcggaaaccgctttttcggcggttccgctctatcttgtgaaaccgctttccgcctctcttctgaagctgctgccggaagaaacggcgctgttccctgggggccgcgactggctgaagaaagtctggaaccggatttcaaagcgcgcatcaaacgcctggtccctccgcggtagccatacgaatgtctgggatcgcattgacaagggacctcttggatcctgggggccggttgtgccgagggtgcagatgttcgacgattcgctcgactttgtgcggccctattctgaaggcatgacaccccggccgctctctgaaaagcgggcatccggatggctttttgacgccatgctggagctgggaaacgaagaggcgagaaatcattcggtcgggctctccgtctggtatcagctgatcaccatcgcattggccctcatgaagaacggtgctgtggtgccggtgcttgtgcgtcatccggaagcagaaaagcccgcctgcacgcttgtctgggaaccggctctcgcggcggattccgtacggagtgtcgtgctcgagggagccgcggcgctcgagtcgctcggcgtccggctgatcacgcttcccgagaatgaggaatcaacccctgaagggcggttcctcgctattctcacggttctcattacggcttttgctgatcacatgcaggcagtagacgcggcggcccgcgggaagcttgtcaccggactcttcggtgaccgctaccggtgtcttgaagagggggcctgtgactctgaaatccatacgctgagccgttacctccggccgctctccttctatcagcttccgactgactgggtgccggtcgtggttgtgagaagtcggaaccgggagacgctacagctgaatctcggaattctgcccgcgaagcatgaggctggagaaaaaccgattctgctgaagacgatcctgaccgacccggagtatgagcgggatcgctatgcggtgatcgcaggtttccagatgctgacgagcgcctgccccgagctcgctgaagttctgaagagtcaggggaaaccgttctcgatggtgcccgaggatctgaagccgttcctctttgaggcccgtccggctcttgagctgctgggtgcgcaggtgctgctgccgaagcggctgagaaagattttccgtccgcagctgacagctgaaatatcgggcaccgcgaagagttccgccggccgcttcctcacgaaggagatgctcgcggacttcagctggaaggtctccatcggaagccgggagctgacggaagccgaagcgctgcagctctttgaaaagaagggcgagattgttcagctggatgacgagtacgtgtggcttgatccggcggagatcgaggcgattgaaaagcgcctgaagcagaagcgtaagcccgggtacctcgagcgtctgagaggggctctgactggtgaaatcgaaggcgccggtgtccaggtgtcgggcgacatcatggagaagctgcgtgaaatcagccgcgagaaagagattccggtgccggatgatatccgggctgaactccgcccgtatcagaagcgcggctactcctggctcatgaagaatttccgcctggggcttggatccctgattgcggatgatatgggtctcggaaagacacttcaggtgatcacggcgctcgatgaactgaagcatgaaggcgaactgaagactggcaaagtcattgcagtcgtacccgcaacactgctcacgaactgggtgcgggagatccggaagtttgccccgaatctgacagccgagatttatcacggatcggaccggaaactgggcgacccggataagcggccggatgtgcttctcacgacctacgggacgctgagacgggattccgagcagctgtcaaaactcccctggcgtgtcatggtgatggatgaagcccaggccgtgaagaacaccggaaccggtgcctatgctgccgcctcctccttcccggctgaccgcgtgatcgccatgacgggtacaccggtcgagaaccgtctgatggagtactggtcaattttctcgattgtgcagccggggcttctcggcacggcgtctgacttccgcgagaatttctcggttccgattgagaacgagcatgatccccgggcggccgaggctttcagaaagcttgtcgcccccttcatgcttcgccgtatgaagactgataaggcgattatcagcgatctgcccgactgcatcgtgcaggatgtcatgacgacgctgctccccgagcaggcttatctctatcaggaagccctcacgagaaatctggacgcgatcagccgcgccgaggcgaacagccgcgataagcaggtgaagcgccgggcgctggttcttaagctcatcacggagctgaagcagatctgcaattctccctctcagtacaacaaacagtggtctgagacgccagacagcgccaaggcggaaacactttttgaactgctcgatgagtgccgtgaaaacggaagaaaggttctcgtcttcacgcagtaccgggaaatgggtgaactgctgcagggatggatcgcgaaaaagaccggtcggaaacctgagttcctgcacggcggggtgagtgtcgcgcggcgcgcggtgatggtggatgacttccagaacaatcccgacagccatatcctgcttgtgtcgctcaaagcgggcggcaccggtcttaatctcactgccgcctccgtcgtaatccattacgatctgtggtggaaccctgcggtggagagccaggcaagtgaccgcgcctggcgtatcggtcagcagcgcgatgtgctggtttaccgattcgtcactgagggaacgtttgaagaacgaatcaacgaaatgctgacggaaaagcgccggataacggatctcgccgtgtcgagcggcgagaactgggtgggcgatatgagcacgagcgaactgcgcgcgctcttcagtctgtcctagcggattcaggcactgtctccggagcaaaggagaatctgatgaaaacgttgaagactgcggccgcctgcgccgctctgatgatgacgctcgcgggggcttcggcacaggcttttgctgccggaacctcttcccaggcgctgggcgaatgcctctaccggaacgcgacgccggaccagaaaacccagctgattcagtgggcttatgtgacgatcggaaagactgatgccgcgaagagtgtccaggcgattcctcaggcgaagacccaggcggtgacgcagaaaatgaagagcacgctgacgacgctgcttcttcattcctgcccgaaggaagcggctcaggtgcttctcacggatccgaagaatggttccattgacgccatggaaaccgtgacctcgcttatgctgcgggaaaaggtccggaaccaggtcggtaacgtgctggatctgcagtccgcgggcggcgcggcgagcaaggccggcgagcttctgaaggacgtcggctctttcttcggtaagtaaaatccggtatccggaccataaaaaaacagcctccggaatcacatccgggggctgttcagacgggaggacaagctcctcctcgtacagaattacttgcgggccttcgctttgcgggcaggagccttcttcttcggtgcgttgacagcagccttgaaagcggcgcccgggatgaacttcggcacattggtagcggcgatcttgatcggagcgccggtgctcggattgcgtcccgtacgggcggggcgggcctggagcttaaacgtaccgaagccgaccagcgttagcttttcatcggccttgacggtttcaacaacggcatcgagaacggtctgcagaacgcgagcggctttggccttcggaagttcttcggcagctgcgatcttttcaacgagctcttgacgattcataagcggttctcctttaaccggcagctttgggccaatgcccggccggctgatttttagaaaaaatacaaaatgaaccagggccgcaggacgctcgagagatcaacatcgactttaagctgtcagccgaaagcggatcgcctgaaatcagcggtttccgcccggaaagcggtccacaccgaaaaacgcaggtgttgaattgatgttagctgaaaaaaccgcaattgaacacagaaaaaccccagaaacgcctgctaaataagggttttagctggaaaaacagcaaaaaaatgccctgcgtcaaaagtaatccggtgtttgactgagaacaatgcccgcagaccgcctagaaaagggccgcgacaagcgctgagtcttccggatagcgggcggaaagcttctgtgcttcgctgcgttcggaaggggatgcaacagcttcgagtgctccgatcatgtcgcgtccaagttcaccgtctgtctgctcttgagcccgaagggtcagtgcgagggctgaggcgaagttctgctccacaccgtccccgcgctgcagggcggaggcaagaaagagaagggcattcggattgccctgggatgcggaagccttagcccagctgatcgcctttgcggggttcgccgtgacgccccggccgatagcgtagagaagagcgagacggtactgggcatcgggaagaccgtcagaagcggctgccgtgatccaccgcacagcctctttttcccggttttctccccgggattctttttcattcgcgtaaaaaagcccgagctcgagctgagctggtgcgtaaccctgggatgccgcgcggcgaagccagagcgccgcctgtacgggatccggccggcagccgattccggcttcatagcatttgccgactttgagctgtgaaagcacatgcccctgggcgcctgcaaggcggtaccaggtgagagccccgtgagggtcctcaggtgtcccgaagccgtgttccatcgcgaccccgaggtgatactgagcgtcggcgtttcctgccagagccgctgtatggaagagttccaccgcgcgttcagggttgggatgaacgccctgaccccgggcgtagagaagcccaagcagcgcttcacttgccgcgtgatcccgggccgcggccttgcggagccatttgacggcctcgcggttctcggtggaaagagtatttcttgagacaaggagtttcgcgagttcgtactgcgcctgagtgtcgccgattgcggcggcacgggcatagtcctcgatcgcctcggcagaacgccgggtcgaagcgccgggcgtcccttcgagcagttcgaggactccctgatcacgcatcagtttctcgcggcccggggccgggaaaagactctgcccgatttcccttgctgtttttgtcatcctgcggcgtccgccttctcagtcagtatacggaatgacgccgatcagctgccagaacatcttggcgatgtagaagagcgcggtccaggcggcgagaccgagaacaccgaaggtaatcgcttttgaggtcggaacgctgacgaggcgcttggagagtttctgagcctcgcggatccgaatcgcgtgacggaagccgcacgtagcggcccagccgacaagcagcacaatgtcaacgatgaaaagcgtcaggccccagcccggacggatcgctgcgatcggctgaatgatggccgcgatggcgagcaggatcatgctgaaccgttcccagagaaaagcggcgtccgcgccttccttgtcaccgatgtgcctcagatcggttccctgcagcatggtgccgaaaacgggagtgaaaatgatggaaagccacaatgcggcccaagggttccaaatctcattttcgtgattccgttccggggcggaattggtggccatcggcttgctccttataagaaaaccccatcattttacctgtcccaaagcggtctttctcatctaaggaacgagaattttgtgtcataccacctttaagaattaggtaaaaaggagtagaatgcttttcgaagggagcgctccgcaacgtggctctccccagatgcattttcatcttgcggatgatgatgtatttgccggttctccgttatcgggggatagcagtacggagaatcggctgtgatcttgattcccggagccgtttaacgagctccgggatttttttcagaaagtgagaaagcgcctccgatggcccggaaagcgtcttcaatcgcttccatgctggcgagatcccgatccagatctacgagtctctgagcctgcgtctgggtgacaccaagaagacgggcgagatccgaaagccgccagcggttcttcagcatgtaattccagagaataatcttcgcctgtacacggacaggcaggtagacaaggcaggtggcgctccggtctgaggtgactggtatcggttcgtgttttttccggtaggtctgaagagcggaggcaaggttttctctgacgaagtcaagcgcctcagggcgtgacggctgtaccgtgaagaaggctgggatatcggggcaggtcgcttcgacactgccgttcgggagatctctcagattgactcgatagtgcatggctggcagcaggtttcagattctgagttaaacaggatttgcttattttactttgccagccaaggtgaaaaatcaaaaaagatccggcacaggtgccggatccaaaagcgaagtttctgatctcaggcaacgctgatcagctgagcaatcggcgaaacacctgaaagtgaatctgcggcgagaagcaggtctgccgctttctcagcaccctcgtcacccagcgttttctgcacagcagacacaaatttctgccggatgacggcgggatccgcggcgtcgtttgaattccagactttttccgagagaacggttccatccgaaagcgttacttcgacttcggcgacgcgtctcgggaaaagtgacgtagcttcaggatcctcagtcacttcaacctttctggcaagcgcgagctttctttcatcggctctcgcttcaggcgtgaactgagacagggtgaccgctccatccgtgattgccgcggcaaagcaccagggaagcgagaatttcgcctcatcctccgtgccatatcggaatgcgccggtcacatccacagcgacacgataggttttcacgcgtaccgagcggatggtatccggatcaagcggatgctttttcatcaggctgaaaagcgcgtcaagcggtgaattcgtgtgaccgcaggaggcatacaccttaaagaaagccgtatcagaaaccagtgtttcctcagacggattttccaggttctccggatgaggatccgagcatgtggcggctacaaaccccttcttcccgagaagtgcagagtgtgatccggtgaagccggactgtgcgagaagcgccgcatcgatcccgttctggcaggcttctgcgatattgagggctttggcgtgggagccaaatgattcgatgagaccgcctgccattgtggcagcgagtccgatcgcgttattggcagcttcctcgttaaggccgagaatgctcgccgcggtggccgcagccgcaactgtgccgacagttcctgtggtgtgccaggttttatagtgcgagggattcacggtccgtccgagacgcgcaaaggtgtcgtagccaatgatgacggctttcagaaaatcagcccctgtcgcgccggttttttctgccagtgcgagggccaccggaatcgtgactgaacccgggtgcccgatcgctgtgcggtgtccgtcatcgagctcacagacgtgacctgccaccccattcagaaaagcggcggatcgggcgggaaggcggtcatcaagtccgatagcggtggattccgccgcgccgccgaccgagctgagatacctgccggcgatcacggtctgtgggtaatgggcgccggcgatcgcgcagcccgcccagtcaaggatacggagtctagcgtccgccttgaacttttcagggatcttttccagactgcagcccgaaataaaccgggcgagaccggcctgaagcggttcttccataatttcgtctcctaaagaaaagaggagccggattgtttcccggcccctctgttcagatttcggatcagtagaagatcacgaacgttgcgatgagatagaccaccgtggtgatagcgagcggtatagcgttccgcttaacaacacggaagggcgatacgttcgcgagtccagccacagcgacgattgcgccggtcacaggggaaatcgtgcggcccatgccggtcatcgtctgcagcgggagaagcatcgttgccgtgtggattccgtagcgggcggcgatttccggaatcagcggagcgaacgagaagaaaggcgcgtttccggatcccatcaggaaggaaacgatgccaatcacgagcgccatggcgagcaccatcgggatagcgccgaggccgacagactgtgccccatcgatcagcgtcttgatggcgccgatcgagataaggcctttgccgaagacctggcccgcgatgatgagggagatcacgactgtgagcgcgttgcccatgcccttgaagaactcacggagtccgtccatggtgtccatgacgttccgcgtacggataacgtcgaagatcatggcaaccatcacggagagcacgatcgcggtcgggacgccgaccttcacgttgatgccgtactggccgagcaccaccgggttgaagagcagcaggatgaagagcgggagcatcggaaggagagcgtagatcttcgggatccgggcttcttcagaagctttcttttcatccatttcgagcgcggccatttcttcagccgtcagcggctcaacgccttcctttttatcccagtaacgctgggcaaagtacatggagatcagcatcgagagcagcatgaacgggtaaatgggcatctgccagtggaagaagtaatccgcccattcgatattcgcggttttcgcggtgagaaggcagttcgcggagcccggtccaaggtcgaagaatcggcttgctgcgattgtgcagacagccgtcatcttcgggacgcccgcgcggatcatgaccgggtagagggtcaccatcatcatgagggcaagccctgcggcggacgggatcgcgagacccacgatctgagtcacgatgagccccatgccggcgaggacatagggagacttcacgtacttcaggggaccgcccacaacgtcataaagagcgcggcccgcatgaacgcggtccatgtatttcgcgaagcccgccatgcacatgatggagagaccgagtttcgcgagagtcgtggacatgacattttcgacgacaaggaagatgtcgaagaaaatggaaccggaactctttttgaggccgagtccgaggccgatatcgccgaaagcagcaatggcaagcagcaccacgcccgcgacaagaagcactgccggggcgtaagcgcgcttgacaatcagatagccggccgcgacggtgacaatggcagctatagtgagaccaagcataggggtaccgtatgtatggatcagggagtgaccggcggatttaccgcgggtctgctcctctttcagtttttgggaaccgggaagggaaattcccttccatcggtttgacagaagaaagccctgagacttacttcacggtgaccttgggagactcggcgatgcactcgtcagtcagttcctggccaatgccgggcagatccggaatctgatacttgccgttgacgggcatgtagtcatacttgcaggtccggcggttgccttcgagcagcgcatagcggtgcagttcgtggatcgcgaagttcgggattgcggcctcgagctgcagggacgcggccgtcatgatcggaccgccgcagacgtgaatctgtgcggtcgtgtcatagatgtggcccatatcgcagatcttcttgccttcagtgaagccgccgcaggtaccgaggtccggctggatcagatcaatgatgtgattctcgaagaacgggcggaatccccagcgcgtgaagacgcgttcacccgcagcgataggaatattcacgttgtcgtgcacttccttcagctgcatcgggttgaggctcattaccggttcctcgtaggcggagatccggaattcctcgatcatgcggccgaactcgatggcggacgtggtatccgtcagggcgtgagcctcaacgatgatgtcaatctgatcaccgaccgcttcgcggattgccttcaggcggtcatagcccacgcggagatcgcggcccgcaaagcagccgtaaagattgcggcgcttcgcatacccctcgaggtcgatttcgttcacgtcaaccttgatgcagtcatacccctgctcgagcgccttttcggctgccgcggcgtactgagcgggagtgacgagaatgtctttcttttcggcgttgccccagccaaactgcagctgcgaggcatacgtccgaagctcatcgcggcacttgccgccgaggagctgatagcagggaacgccgagagccttgcccttgatgtcccaaagcgctacgtcgattgccgacataccggcagaaacgaccgtgccgccgccctgaccccagaaggttttcttctggagcttgtcccaaatgaattcattcctcatcgggtcgagcccgataagcagcttcgcgaaatcctgagccatgccgaaaccggcagatgcgcctacgccataggcaagaccgacttcgccgaagccggaaatgccttcgtccgtattgatacgaacgacgacgggtcgccacttggcaacagcggattgaagcggattcttaacgtcaattatgtccacactgacgattttcatttatgaatctccgatgtattttcggtggttttcttgattgaagtaggtgtagatcaataattgaacttcacctcaaaaacgccggctttttagtgactcagccgatcaattgtgatgtatcgcggataatagtaatccactttagaactaattgataatacctattaagagataaagaacctcaccttccaagaaaagaaaggtgaggcgtcggaaactatttcacgaaactcacgagcaccatgatgacaggaagtgtgaaagtgagtgcggctaccgttaccccaactgtggcagaggcgaaatcagccggtccgtcatgaagctttgccagaaccccgagcatcgggcttaccggcataacggaggagagaatcaggatctgccgcatcattggatccataacaagaagctgggagatcaggaacatcacgagcggcttatagacattgcagccgaaaagaatgatccaggtttcacgcgggagatgtttgaagcgggcaaaaccgatctgctgcaccgtgataccgataaaaatgagagcgagaggtgagcagatctggccgatcagccgtgtggcgagcgaaatgggctgcgggatcttgaggtcaatcgctacgcagagaacgccgatcagaaaaccgattagaggttttgtaaagatcattttcaggctttgcctggaaaagaactttggggctggttttccggtatgccgaaccccgtcaagctgcacgttatagagcccaatggtccagacaaatatcacatttgcgaagaagtagacgagcaggtacgggatgccccggtctccgaacatggcgtaggtcaccggaatgccgacgaaaagcaaagaggagccggaaaattcagcgataaaggtgccgtgccattcatctctcaccagtcccgctttgcagatcagccaggacgtgacgatgtagaccgcgaatgccatgaaaggaagccccgagatgcggagcagttccagcagctgcgcgtgagtgaattttgaggtgatcgaatagaagagaaagaaagggatcgcgagaccgacaatcttggatacgagtctctttcccgcttcgtcataccagcccttggccgatgaataccagccgagacccgctacgcagacgagaacaaaaaccgcggagagagcatgcaaaaacgcgtcaagcataaagagatacctccggagcagggctcggcctgaggccggactggctccggacaatatgctcatccggtaaccttccgcatgtaacaggctgtaaccagtaacctccgaagattctaatcctttgggaggatgagtgatattttgtagtacagaataaaaaatacagagcggaaaaacaaggcaaatttcctctcggtcctggtctgaaatgtggaaagttttctttttcttcctgtaggattaccctatgaaagcgcagtgccgggcaatccggcacacaccgcgtgagacaccagatgggagggcgacgcatgatggcggctgataccgtgctgcagcagtatttcactgaacttcagagcgaagtgaaggccatagcggtcaacgccgatctggaaacggcctatacggaattggagggcgcctttactgaacaggtctcgcggctgatgtcagagatggggcttctcgcggcggaacctgagctctgccctttccagggcacggtgaacggcgctgtggcccgggtatcggcctacgcggtgtcggatgaccttgaccggatggatgtctttgtgacgctctatgagtcgtcaagtgaagtgtttgaggtcaaggcggatgaagcgcagcgggcggcatcccagtgtctgctgtttctgagagcctgtgtggatgggacgctgacgaacgaaatcccttcaggcggccgggcagccgcttttgctgcactcgtcgagtcatgctggaagggactcgatcagatccgaatctggattgtgacaaacggtcttgtgaagaacgcccgctataagcctcaggaaattgccgggaagcttgtcacgctcgaagtcgtagacctgcttcgtctgtcacgcatggcgcttgagggcgaaaagggcgacccaatcaacgttgatttttcccgtgaatgcggagaggcgcttccctgcgttttttattctgacgaaaaggcaccgtatgacacggcgctctgcctgctcccaggcgaagtgctccgttctctttatgaaaaatacgatgcccggctgctcgaagcgaatgtccgatcctatctttcgattcagtcgaaggtgaataagggaatgttcacgacgctcaaggagcatcccgaggattttctcgcctttaataacgggatcgtgattgtggctgagcagctgcagctttcgcggacttcaatcggcacaaccggaatcaaggtgcttgcgggcatcaaaatcgtgaatggcgggcagacttcggcgacccttttcttcggcaagcgccgtgaccggactctcgatctgtcacatatccggattccggcaaagattattgtgctgaagcctgagattggagaccacgcagacgcgtttctgacggatatcgcccgtttcgcgaatacgcagaataatgtccgggcctcggatctttcgtcctcttcgcctttccacctgggacttgagcacctggccaggacgacctggtgccccgatggagagcatcagtggttctatgagcgcactacagggtcgtaccgcacgatgcttgcgaaggagagaacgccggccgaaagaaagcatagaaaacagctgattccaccttcgaaccgtattactaagcttgacctcgcaaagatcatgaatgcctggttcgggcgcccggagctcgtctgtctttccccgcagaaaaattacgcgctttttatgaaggcgctggatgatcagggaggggctgaccagctgaagctcacccccgggacatggaaggatattgtcgcggtagccgtgattttccgtgaatgtcagaagatcgcgaaaaaggaattctcgggcagcagtctcgttatcaccgcctacacggtcgctatcgcctcccgaaggcttgcaggaaagcttcggctcaggaggctttgggagcagcaatcgctgtcccctgagtttctggctcagctggaagcctgggcgaaagagattaacgcgacactcagactttcctctttgggcaaacccatttctgaatgggggcgggacccggagtgctggaagtttgtccaggaatcgattgcgccaggctacgcccctggtatccccgaactggaggagcagaggagcgctcagacgtctgagcagagtgtgtccggtccgcttgccgcagaaacgcagacggatgttgcatcctccgcggccaagggagagagctgatggagtgggtccgcagtctgatccggaaagcggctgcgcttttcagccgcggcgctccgtctcccgctgaaaacactgctatacccgccgaggtccctgagagggagaaagagacgctgataccggaaacgcggcaggcagagactgtgtctccctcccggcattccggcaatgagctgaagagttttgaaacgcttcagcccggtgaacgccgggcaccgattgcctacagcccggatccccttccgactcaggacaggaaaagcaggatagccgccgtaccaggcgttacctgggtaccggacgactcaggcaatgtgattcttggccgtgatgaccgctttcgggagcaggagcgggaagtccaggaagcctttacccggtataagggcaggtatgggacttatgtgccgggaaacgatgagcctgatgtctgggaggatgatgaggaggatgaagccgaagaggtcagagtccagacgaagtcctcagtgtcaggtgataacagcgagcagatgtcattcgatttcgatcggcctatgcggtccgcacagtcttcgaaaaacatcaatgaagctgtttcccctggcccgcagcagcagtaagtgcgcctctcggagagccttttctccgggctttggcgtcctgatatgatgtttcaaacgtagttctccggcaggcttcccgcttctgggcagccgttttctctgggtggatggattatgcaggaagtatcgattgagaaaagagggcggcaggcggcccaggcaaaagcgcttttcggttttgcccgggaattgggcagagttcgccgggaaaacatcatctggcttgatcgccatccctggttcctgaagttttcatccattgatccaaagcttccgggggtcaaaaaatggacaccggaatcccgggagccgaatctgctgctgtcagttgagcagctccagcttccgcattgcccggagcccccggcgctgcttcgggaggcagtgggtgaaggatgggaaaaaccggagtgggaaccgggaagcgaactgattgaacgcgccgcttcggatgaaaaattcggggaggcctggctcgactggggcggggcgagaaaggactggcttcttcactgggaggccgtttcaaagtctcttgatctcttccagatgctctatcagaagagccgcgaggtggaggacagcaatctcaggctgattgccaaggcgggatctatttccttcgccagcgacgacgcacacctcgccgcacgtcatccggtgcttacgcgcccgatccgtttccggctgattgtggatgagaaccgcgtgacgatccgggtagaggtggatctttctgaaccggcacggtttgagtcagaactgctttccggattccaggacgatggtttcaggcttgaactctgccaggcaacgcgtgaggacgtcgagagcaccaatgtgcatccgtttgacacgcagcccgtgcgggcttctttccaaaaactcgcggcaacgatttctcctgaaagccgctggtctgacagcggaaaaccgccggagtttgatgaccgagttcattttggtttctatgaggatccggttttctggatagaagaacgcgtttccggcatggcggaagcctccgatcggatcatccgtgagattgatgcgggtgaaaagattccgcagcatctgatcgatctggtgagcggtgtggaggagcgggacgatacggctcccgccaagccgtctgaaactctggaagaccgtctggcagccgcgggcggggaagatgcttcaattcttctcacgaagcctgctaaccgcgaacagctggaggtcgcccgggaaatccgtaatcgtgacgccgttcttgtcatgggacctccgggaacaggtaaaacccatacgatcgcgaacctgatcggagatttcctttcctgcggaaagacagtgcttatttcttctcagaaggaaaaagcgctccgggttatcaaatcgatgctgccggctgaaatgcaggatctctgtatttccttctcgagcgaagaggatgacgtcctcgcgaccgttcaggcactgacagaaaagctttctctggtcagaccggaggagctcgaacggaagattgaggctgagaccgcggcccgggacagaacgttcaaggctctgcaggagtcccgttcaaggctctacagccgtctcaacgctgagtctgaaaagcaggaaatcggaggacggagctggacgccaacagaaatcggcacgtggctccatgagaatgaagcgctggaagctgtgcttcccggcagagatacgccaaccgggcctttcccgctgaccgaggaggaactccggacgctctacagcctttcgggtgttgtgacgcgtgaagtggagaccgaatcgctttccggcatgctggagacagatacactgccccagcctgaggaacaggcgcatcttgccgcagaggcttctgaactccgggattttgtccgccattcgacggttcgggttgaagcgcgcggcggtcagggcggacagagaattttccgctatgtggccggtgacctcgcgattgaggcgcctgaaaaaccgggcggccctgtcgccatgctgtctgattggctggaaaaggatcggactgtcggcattcctgaaccctgggtagcctcagcgcgcgcggccggtgcggccggcggtgctatcaaagcccgttgggaaaaactgctggctgctgttcaggcagcctctgaactcgcggagaaagaaatcgggcagatggatgagtttgcggttgagatccgtccggacgcagaccgtccggctctccgtgaggccttgaactatttccgggagaaccggatttccggtgagcctgggtttcttaccaagctgacccagaaaacgcgtcttgcggcccttggcggatcactcgtgaatggacacgtgccgagcacggatcatgattacgcctcggtgcttctcaggctcgatctggaagaagcccgtgcggcggccatgaagctctggaacgatctcgtgcagaaggaaggcggcccggcatttgagtctcttggaacggatcaccccgaggagcaggtgaggctgcgttatgtaccgcggcttgaaaaggccctttcctggtggaccggctgggctgagccgctgctccgtaaggcggaagtgctgggaatcaatcccgctctgatcacgggtggaaccggcgttggtcccgtggaaagctgcggcgccctggcgcgcagtgttgaggagcttctccgtccagcggcagcccttgatcgggtcatggatcggctcaccgaactccgggattatgtccgctctgtccgggaaagcctgaaacccgccattcagaagggatcaaaacttgcggtcaggctgtcagccgctctcgatgagagtcctgaggcctatcagaaggcctgggaagaccgtgagacactcagggaactcagacctcagattgacgcacgcagtgagctgcttcaaaggctcgcttcaggtgctccggcctgggcccgggcaattgctgagcgccgctcaacttcgtgtccgaaacacgcaattgaggcctgggactggaagcttctggattccagctttgagtcttatctctccaccagcatggcggatgagcagaaaaaggccgaggaactttcctctacgctgaggcgtcagactgtgacactcgctgtggatcgcgcctggcttgctttgtctgaacgcatgcgggagaaccgtgctcttatgcagaaactgcagggctgggcacagattgcggcgagaattggccgcgggaatggacggaatgttgaaacgctgcgagcccaggcccgggaccttatgtcctcctgcgcgcaggcggttccttgctggattatgccggccgaacgggctcttgccatgttcgacggtacctggaagtttgacgttatcgtgctggatgaagcgagccagtctgacattgtgtcgatgccgcttctcttcctcgccaaccgtgcggtgatcgcgggggatgacagacaggtgtcgccggcggcggtcggtgtcggtgacatggctgtcaacgcgctgtcccgtcagtacattgagggaaagattgcgaactggccgatctaccaggcacagtcttctctctatgatctcgcccggaccgcttacgacccgctgatgctccgtgagcatttcagaagcgtcccgccgatcatcggctactcgaatcagctctcctataacggccttattcttccgctccgtgatgcggcttctactaaccttgtgccggcgattgtccgctgccgggtgaatggtgtccgtgaacagaacgatgcgaacaaggcggaggctgaggccattgttggaaggattaaggcctgtatcggagaaaaggcctacgacggcaagacctttggtgtaatcgtcatgcgatccggcaagacaggagctcagatacagctgatcaatgatctgctttataaggcactggggccggaagtaatccagagccggagaattctctgcggcctttcccctgatttccagggggatgaacgcgatgtcattttcctgtcactcgtcgattctcctgacggagacaaacctttgcggcgtgaaggcgcgggaagcgacgacggtatgaagaaacgctggaacgttgccgtgtcgcgcgcccgggatcagatctgggcggtgtactcctttgatccggcgactcagctgcaggaaggtgatatccgcaagacgttctttgactatctgtcggatcttgagaaaaacggatgccgcgaggaggatagcgggttgatttctgagcttgcctctgaagtggctgatggccttgaagagaaggggttcaccgttcacaaggggtaccggataggagcttttgacctcgacctggtagtcgaagagaacgggaagaaagtcatcgttgaatgcgatggtgacgcaggaactccgatccccaatgcggttatcgcaaggatggaatgccagacgattctggagcgtgccggctggcagtttgtccgtgtccggggtggagcctggagccgtgacccggagtcgggactctggtggctgatgtcgcagctggccgagaaaggcgtgagaccctctgctgaagaaaagtcacacgagaccgaaaaaccggcggatctcgtgactgaggttcagtccaaggcggagactttcacaaagacactccgcgttgacagcgatgcggcggaagcaaagcgcctgaagcgcgaacggatcattgctgaactccggaagctcggcgcggaggtcgacagtgaggtgaaaaagagttcccggtttgccgggtaattcggggatgcggccatgaagactattggaagcgttgctattatcgggatgggtgccctcggtatcctgtacggacatctgatcggccggagaattggctatgaaaaccttttctttgtcgctgatgccgctcgggtgcggcgcttcaattcggtcggtgttacctgcaatggtgagaaatgcccgttccggatgatggaagccaaggacgcgccggctcctgatctgctgatttttgcgactaaggcaaccggtctggaaagcgcgattggtcttgcgaagcagtttgccggacccgataccatcatcatttcgctgctgaatggcattacgagcgaagagataatttcggaaaagctcggcggcagacatgttctgtatacagtcgctcaaggtatggatgccacaaagatcggccctgatctgaagtattcgcaccctgggacgctttgtgtgggactgcccgcgggggatcaggagcgtcttcctgatctggaaatgctctgcgagctgctgacccgctgtgacgtgccctttgagcgggatccggatattcttcaccggatctgggccaaatggatgctgaatgtcggtgtcaatcagctctgcatggttgaggaaggcggctatgctgttgttcagaagcctggccccgctcgcgatcggatgatcggagcgatgcgggaagctatgcagatcgccctgaagagcggcgtcgcagtaacagagaaagatctcagtttttatgtaggactgattgacactctggctcctgaaggtatgccttcaatgcggcaggatggtctcgctcatcggctctcggaagtggagtcatttgccggaactgtggtgaagaaagggcacgatctaggtgtccctgttccagtaaatgaatcgctttatcgtgaaatccgggagcgtgaggccggatattagattgaaaacagtcgccggaaagacggctgataaggatggtctgaatgaagtttagtcagaaagcgttcagggctgcggcagcggcactctcagcgctgctcctcgccggatgcacagggatgctctggctcagttatgtccagaacgggaaaatcagtttcgaagatggcagaactttcagaatcggtgatgccctgaatcagtatcagtactgcaagaagaatacggaaagctggacagtggaatccggggatggcggtcatcgggtgctgttttcctgtcatacaacaggagaggatgatctggagactgagaggacaccggatccaagtcttgtgctgaatgtggaattcctgatccccagctggtccctgaagtacgatgtgtcacgggtctggtatgcagttgatcttgcggatggcacggatcccgcggctcaggcggtcatgaaaacagcgaatccccacgaatctctccgggagattgcgcttggccgggatgtgagcattccgccagacgaattcatgaagtggcagcagatggcgggtgcctatctgctgggcggtggaacaccgaaagcagatggccccaaagccgaggacggaacgccgcttcctccaggagaaggctgggtcaatctgtaaggcttttaaccagtccgggatgcccaaggtcaatagtcaggctgaatcacgcaaaatccccttgtcttaagttgaaactcctcttcaggatcggcattatttaagcaataacgcctgtcctcaagaggcaggcggaaaacaaaggggatatgcatgaagatttttatggacacggctaacgtggatgagatccgcgaatttgccgatatggggatcgtttacggtgtaacaaccaatccctctctgattgcgaaatccggccgttcccaggcggatgtgattcctgagatctgcagcctgattccagggccggtatcggcggaagtgatcagtcttgactgcgcgggcatgctcgaagaagcgcataagctcgtcaagatcgctgagaatgtcgtgatcaagattccttgcactgccgaaggacttaaagcggtgaaggtgctgtcgtcagaaggcatccgtgtgaatgtcactctgatcttcagccttcctcaggctcttcttgcggcccgtgcgggtgcagcttacgtttcaccctttgttggacggcttgatgatatcggtgaagacggcgtgcagctggttgccgatattgtggacgtcttccgtaattttgatatcaagacggaagtcattgcggcaagcatccgctcgctcgggcacgtgaacgcggtgatgctcgccgggtgcgatattgcgacgattccgacaaaggtgcttcgggcgatgctggttcatccactgaccgataaggggattgagaaattcctggccgattaccgcgacagccagaaacgctgatcaggataaggcaaaaagaagcgcagacgttcgtaagaacggtctgcgctttttcttatggaaagagacttgtggtttaagcctgaatcacacgagccgcaggggccttgacgtcattttcccccatagcctcggtgatgttctgcgtgaggtcgaaatagacgtcccaatagtcagaactcttgcaccaggcgcgggcctggaagttcatgcccttgtcgtttcctccggtaagacgggcaaacggcgccggatcctggagaaccttattggttttcgcaatggcttctagcatgagggactgaattttctcaggggtctcgtctttggcaacgctgaagtcgagatcgacacggcgaagtttttcgctcgaaagattggtgaccgtagtgttcatgacctgcgaattcgggattgtgattcgcttgttgtcaggggaaatcagcgtggtatagaaaagcgtgatatcccgaactgtcccttcaacgccggatgcctgaacataatcccccacactgaacggacggaagatcatcagcatgacaccgcccgcaatgttggaaagcgccccctgcagagcaagaccgatagcaagacctgcggatgcaagtactgtgatgacggacgccatcggaacaccaaggatctgaatcacaatgatcagcagaacgacccaaagaccaatcttcaggaatgaattgatgtagccctttgctgtctgatcaacattgttgaagtatttgaccctgcctacagcaccgatgatgagattgatgacgatcttgccgacaataaggcagatgatcgcgagtgcgatcttctcaccatacgtgacgagaagctcagaaaaacgtgtttcaaaaagatgatccatttcgacacctgtctgaggagtggtgatagcaatagtcttatcacaaaaaggccacgcggttatatcacgttaagctgtgtacccctaaagaactaataagcgtagagtgcgttctagttattccgaatcaggaaaggaacgttcagatgccaaaagccttgcatatacatgccactgacaatattgcggtttgcacgtccgcggttcagccgggggatgaggtcgagattcttgagccggatggttcaagaggggcagtgaaagccgctgaggcgatcgctttctgcaacaaaatcgcgcttcgtgatattgcctctggagaagaggtactgaagtacggtgaggttatcggcaaagccaccgaggatatccgtaaaggatgtcttgtgaatgatcggaatattgccagtcagccgcgggcgtatgcagacgagtatctgcttaagaaggaggcgtgaaatgcagttcatgggatatcgtcgggaggacgggcgtgttggtgtcagaaactatgtattgattcttccaggctgtgcctgcgcttccgaaacctgcagactggtggcaagcgaagtccgcggcacaaagaacgtgattatgaatgtcgggtgttctgatgtgcaggcgaacacggacatgaatcttcgtgtgctgacggggttcgcgctgaatccgaatgtattcggagtcatcgtaatcggccttgggtgcgaaacggtcggtcatcgagaactggccgcgaaaatccgtgcggagacttccaaacctgtcgtctcgttcggaatacaggagataggcggaacggtagcaacaactgcggccgcggttaaagcagcccgggaaatggttgcacaggcaagtgagcagcagcgtgaaccctgcgatgcgtcagatctgtttgtcgcaattgagtgcggcggatcggatgcaacaagcggcatcgcctcgaatccggcggtggggaacatgtctgatcgtatcgtggatctgggcggcaccacgatgatgtctgaaacgatcgagttcgtgggagcggaacatattctcgcgaaacgaggtgcaacaccggaaatccatgaccagatcatccgcatctgcgaggattacgaaaaacatcttgccggggttggacaggactgccgtacggggcagccgaccacggggaacaaagcaggcggtctatccacgattgaggaaaagtctcttggctgcatccataaaggaggcacaaggcctgttgtagaggtccttcaggaagcggcaagaccaaccaagaagggagctctgattatggatactcccgggtacgatatttcttctgtcacgagcatggtggcgggaggcgctacagtggtggtcttcacaacagggcggggtacaccgaccggtcacgctctggctccggtaatcaaggtaaccggtaacagggagaccgcgaagcgcatggctgacaatatggacatcgatgtgtccggtattctggaaggagatctgaccatcgctgatgccgggaaaggtattctcgacgaagtgatccgggtcgcaagcggaaaagtcaccaaagcggaagcctttggattctcagatattgctgttgatcatatctgccgctttatttaagcattttgggcttttcagacagggcggagaaacggaagattctccgccctgtttgtatggaagctgtccgaaatccataaaacagaaaaaattaataaaaaaatgatcgttttaatcaattgttttcatgaaatccattgaggaaaatgaaagatcgaatgaaaaaatatttgcatttttaaaatcgagagggtaggatactcatcctgtcgctgcgatgcagtgacgatctttaaaaactgaataacgaaccgataagcgtga

SEQ ID NO: 1289 - DNA, 16596 bp, Unknown
  gut microbiota DNA sequence
gagtggcgaaagttattttgacagataatgccctcacaccgctattgacggcactaaacaaagccagagcctccagacgctgttcttttgatggttttgccatggcaaattctcctcaaaagtgtcgcatttctgggggggcaccgtggataactttatcgtgtcgcttaatccataggcatcgcagcatccgaatagtagtaacactaggacagtgcaatcgctgcgaggacacggatgtgatacttcggtagagacaatgctggagcacgccgagcgctggaccggtttatactgcgctgaactgcacgccgattggcaggcatggctcaaccccgagatatgacagccgaattaatagtgcatacttgaagaatgcttgaaaaacaccgaaatctatctttaacgaacaatttgaagaatgataattgtgatattcaccgatctgaaataggaaacgatttattggatactcaaaaggaaactttgtattttaccaagatccgtttccaagaagatcactgataaatatattcacttgtacaataaggagagaattttggtgaattagagcacttttgctttgcaaattaattaaaatttaatcaaaaggaatccgtagtaatttaatgaggcagttcaattaggggatctccctcttgtcctttgtcaataggataaattaattattcccaattttttaagagaatttaaatgactgtttggatgaacgttaccttcacctatcattgggtaggacctgcttgtggaattgctcgtcaggaaagagaaattgctgtagcgctggaaaataaattatctgataatcttaaatactgcatatgggaatttaattcttttaaagaaatttcacatgaacaatatcatcgttcatttcgtgaattacctatcaatgatagaaataatgcttcgcataaagtattaactaaatgggaaaaaacaaagaaaaagtggaaaaaatcagtcttaaagcgtttaataaaatttgaagaaattttccatattagtactgttaagaaatcagacaattcatatgaggatgtttcgaataaacctgtaactgctggatataatagagcctttcatatttttaaacagaatgatacttttctttcgctaggtaatgactgggactatcccttttttgagatgctaagctatgctcgcgatattcttaaaataagaatcgtaacgtgtgcctatgatctcattccaataaaatttcctcaatattgcggaggaaatacggttgaaagatttactaattatttttattctttgctgaagggatcaagcgcaattctttgtatatcaaaatgtactaggtcagatttactaaaattatctaataacctaaagtgtgcttctcctaagactcaaataattcgtcttggagctgatattgagaggaatctttcttcggagcctctgatatcagaagatatattgaaattagataattcaccgtttatattgtttgtatcaacaattgaaagaagaaaaaatcatgttactctgtataaggcctatcatttacttgctgaaaaaggtcttttagacaaacttcctccccttgtttttgcaggtatgcctggatggggtgtgagcgatattatcaaagacataaaatttgatcctttaacgcaaggaaaaattatcttggcgggcagagtcaatgaggatgaattggattttctttatagtaattgtctttttactgttttcccttcttcctatgaggggtatggtttaggagtagctgaatcactgctgcatgggaaatttgttttagcttcttcttcagggagccttcctgaggttggaaaagattttgctgaataccttgaaccttgggatgttctaaagtgggcagaccgtttaacctattggtccaaccaccctaatgaacttgtggccaaagagctggccattaagcaagagtataagccctgtacctggagtgactgcgctgacgatgtaatttctgttttatcctcactaaaggattagtatgttattagaaagagtgttccatttcttggaacactcttcttttacaaaaaatatcaaaataataaattttttattgttagaaaagattgatgccaagtggttgcttcaatagtttctattttattggactgcttttgagtcatttgtcttattgcaaatgctaacttttcaggttcattccctgaaaagtatgaaactttgtttcccgctatttcacggaatatggggatatcccttgctagaactggtttaccgaacgataaaccttcaattaaaggaaggccgaatccctctcctctagaagcgaaaataacagcccaacagtttttatatattttttgcaaaaatctgtctgaaacaccgctaagccaaaataattttttatttttttctttgtctgcctctatatttttacatagattatcgactttccagcctttgtttcctacaaaaacagcattaaaatcaaatcctttttcccataataaatcaaaagcggccaataattgatcgtagccttttcttggttctatcgtgctaacctgcaagaaatatggtctttttgaaatttggttaaaaataacttcttcttcatgattgatattttcgtctgcctttttaaaatctgatccaagataataataatcccatatgaattctttccctgtttttatgttgtttcttttagcccattctctaacttcgcctaaaactgttttagatactgcgagtataccgtcataatggcaaacttccactaaccaaggctgatatctttttacagttaattctttaaaatattcaggaaactgaattggcaatatatcgtgcacagtgaaaattactttcccgtgcaactcttctattttttcaaatatttttgaatatcccacaatttcgatataatcggcaagtacattcaggaccacatctcctggattgatggacacagtttcgtcataagctttgcttggtttaatattgtgtttctcaagtaagtagtttcgtgcaatctttaactgtaggctatctctctcaaaatagacaggaagtacttcgatttccttatctgaaattccttcttcaagtagcttcttagcaactcgtggaataccagtgtttccatcagaataaggtaaatttcccatattgatatacaaccgcttttttgttcggttgctatcgcaatggatttcccccgcattcctttggacaatctctccacttctttttaaggtgacaagagtcatgccaaaaagattgatcgcaatcttaaggttacctttgaaaactataccaacaacgggcaataatcctatatatacagctctgcagcagccacttttttttattttaacaggaccgattgaaaatattttttttaaaattgatttttcaagttttcttttactaaaaaaatttacacaatccctcttcagtattttccagaaaatcaatctgtcactgttgtagtaggaaattttaatcactattttctcctaaacttcctgcattttacagagtttggcataaatcccattttctgttaaaagagactgatgatttcctttttcctttatttctccatctgatattacatatatcctattgcaatcctcgatagttgaaaggcgatgtgcaactgtaattgagattttccccttggtcagatttttcaatgcattcttgatttcgttttcgcttttgctatctaaagcgctagtcgcttcgtcaagaataataatcggggcattctttaggatggcccgggctatcgatattctttgcctttgtccccctgaaagcagctttcctccttctccgacggatgtgtcgatgcccttaggaaggctcttaaccagtcctctcaaatcagctgcatctattgcggcatcgatttcttcttcagttactgagctcttcacaccatatgtgatgttgttttttatagtatcttcaaagaggaatacatcctgtgatacgagagacatctgcgatcggagactttcaagtgtgtaatctctgatatcaattccatcgattgttatcttgcccccagttacttccagaaatctaggaagcaggttcacaatagatgtctttccggaacctgattgccccaccaaggcgattgactcaccttttttgacggtaaaagaaattcccttcagtgcgtctgcgtcttgcccagggtatctgagatgtacgtcttcaaaggcaattccttggtgaatttctttgagctcctttttgccagtatctagttcaggtttggcatcaatgacatcaaagatgctttttgcggccacagaaatacttgcaaaagtagagttaagtcctgcgagatgttgaacaggagctttgatcagtagaagggcggacaggaaggttacgaactgaccgaatgtcagcgcacctccttgagcttcaatcagcgctactgccacgacgaatgcaaccgcgaccattgtcagaatctgcgtcagaggcgtaggaagcccctgcagaatattggttttcagagccaagcggcggattctcatgttaacttttgagaaccgttcatcttcaaaatcatatgagtcgttgattttgactattcgttccgcttcatatgattcctggattctggagatcatatttcccagtgtttcctgactctgtttgacaacgactttgacttttctggatagcaaacgaagcactataaacaacgctggtccaatgacaaacgtgaccaaagtcagaatccagtcgtgccagaacaggacacacagcagaccaatgatctggacggtatcgcggatcatgactgtaactgaatccgccgcaccggaaagggcgatggtagattcattcacaaactttgagctgatgagaccagtagatactttctggtattgcgattccggccaatgcagtacgctgtagaagagttcttttcgaagtgtcaccaatactgactgactgatctgagacatgatataggcgctcaggactgtcgaaatggcaaacactagagtgaccgcaatcaatgcggcaggcaaagcaaagaccagccagcttccgccttggtaaaaactcacgtcggtcagcttacctaaaagagtggctgtggcggatgaggttaacgcggtggcaatcagaaaaatactggcaacagctatctttcccttataaggaagaaagtacttataaagcctcaccaggttttcgtctctatgctttagtatgttgatcattctgtttccaaaacatgaagagattgcagatggcagagattcgcgaagagaccgcctttcttcagcagctcatcccgcgtcccaatctctttcacctccccttcagccatcgcaacaatagttgtggctccggatactgttgaaagtctgtgagcgacaataaacactgttctgcccttcatcagttttgccaaagcgtttttgatatgggtttcgctgatgctgtcaagagcgctggttgcctcatccaaaatcaggataggagtgtctttcagaatggcgcgtgcaatagaaatgcgctgtttctgcccccctgataggaagtttcccgcttcaccaaccggagtctccaagccttttggcagtgcatcgatgaactctctcagggcagcgtcatctattgccttattaatttgagcttctgtcgcatcaggaacaccgtaggcaatgttgttccgaatcgtatcgtcaaagagaatgacatcctgagaaacaatggcaatttgttttctcagactctttaatgtgatatcacgggtgtcatagccatcaatgagaatacgtcctgacgttggattccagaaccgcgggatcatgtttaccagggatgtttttcctgaccccgagaagcctacaagagcaaccgaatcgccgggattgactgttaggttgaagtcgtgaacggcgtctctttcagagttggggtaacgaagcgaaacatgatcaaagactacctgtccgctgcagtaatccagttctgttttgccattatcttcctcttccttttcatccaaggtggcaaaaatactgtccgccgccattttgatcatgatgaagcccgtattcattcccgccaggttcttgaccggaggaatcaggagcaggagagccgcaagaaacgtaacaaactgcccccggtccagagctccgttctgcatctgaaataccgcaaaagtcaaaacaaccgcgatcccgatcatgcataggacctgagacgccggagtcccaagagttgtgactttcgtcatcctcaccatcattttgtatatttcattattgatgtgagcaaaacggtcgtattcagccttatacgtattggaaatcttgatcaggcggtgtgcttcgtatacttctttaacgcgcgacagaatacctgcgaaggattcctgacaggaagccatcacagacttcatttttctcgatacatatcggagaagcagaaagatcagaggcccgataatcagagctacgagcgacagcttccagtcctgccagaagagcgtcgcaacaaggccgaccacctgacttgaatcacgaaccagaatgatgcaggactttgttgcgtttgagagcatgacatttgcttcaaacacaaatttggacgtgatggcaccggtggagttgttctgataggcagcagaaggccaccgcagcaaccgatgaaacatctgctgacgcagtgtggcggatacggactggctgactttcccgagcagatagttgctcataaacatgctgccgccgtgaagaaaagacacgccaatcaatccaagcggtgccgcgacgataatccaggctgcctggttatagaaccctacatctgtcagctttcccagcagccaggcgatcaaagaagacgcggcaccagccgaaaccatgaaaaaaatggaaagcgcgatgatgcctttatagggaggtaaatagcctaagagtcttttcaggcttgaaccagaaaaaagattcctcagtatcatgaaaggccttaaaaactagataagcggcaagttcagaggcatacggagagggcatcaaacagataaggctgaatttctgactctggatgatgaaaaacagcgctttgacaccgattttgcctagattacaattaagtactatttttggtaacttaattctcttgccgtgaccgtttcatgttgcatatagaaagcggtcataaacgggtgggcatttgctgattctttcagcgaagtaccctgaatcctgacaatattaacctgtttcacctgcttatattgcatcgatttgtcattggataagagcaacaggctttgagaggaataccgtcaaggcaatacatggacaatgaaaacaaaatcccctctgacttcccataggatgtcaaaggggattgaaagagcttaaaaggctttttagtgcttggcaatcagagcgagcaaagcggatttcagctcttcaatagaaagaccactgtggcggctcatgtcaccagccgtggccttggggatcatgattcttgcgagcggcgtcttaagggccttgaagaccggcgaaatagtagacagctcattcttcagccaggggaaggctttcaggatatcctcaagacgggtggattccgtcagggtctcaatgatggagggcgtatcggctgcgtcagacgctttgccagtcagattgccatccttcgttacaggggcgtcgtcgctcgtaccgggttccgagatgccatagacccgttccggggcatgggtttcgttgctccaggtgagcagtgtgcgggatcccgtcagttcgcggatacgggtgcagtcctgcatcgtctcgagaacgccgcggaacttgccatccgcatcacgcacggcgacatatcgaatgtaaatgaaagcgtccttcttattgatccagaagtcagcgacatcctcttctccggccttgaatttcgcgaggatttcttccacatacttcacgctcgtcttcgggtggcagttacggacctggcggccgatcacgttcttgcttcgcgggaagatacgatgctccgtatcggagtagaacgcgacgagatcattttcatccacgaaggagatatcaagaggcaggttctgcagtacgaggttcacctgatcaagcgtgagttttccgttccgcatttcaagcttctcatcagagccggctccagacgcgagaccgtacttagcgagaagcttctgaagatcgccgacaaagcccgtggcttcagccgtggcggcctgggttgaagcaaccggggcagccgcaggggcagcgccggtattttcaagccaggcgtagccgatctcggcgtcacccgagcgcatatcatcgaattctttattgctgatcagcatgagagatgtcgggagaaggatctgctcttccttattcatgagatcggtcagatcgtcaatcagagcctgctgacgggagaggaattcgtcatcggccccagcttcgagaagcgcgcggttatcgcggatttcatcccggatcgtatcgtcgaagagccacatatgagtggacgggcggtcaaagcccttcttttcaagcaccgagtaaagctgattctgtttcctggaaaaatgcttcttgatctcggcgaggcgatcataaatttcgagccactgattgcggatcacgggatactgcgcgagatcctcaatctctttgacaatgccgcgttccttatcgttttcctggaagtagcgggcaatcggatgatcctcgggaagctcaggacggctgcgatccatgatgggaccgtagatcttgaaaatatcggaaatccgattcagacggcaggcttcatcgccttcttcagggctgatgttctgttcaatctgggcgatctcccagggtttcagagactggatttcgctcttcagctgacgctgcgcttcttcaagtgaaatctggttctcgtcataagccttgcggatagcaaccgccttttctagcttagcgttatcaagtccgggaatttctttcaagctggtcatggcaaccctgtgttttatgttgggggtggtagaaaacgggaatcattttaaagggagactcagaaaagcgagaggcttatttctgtcggaaaactctatgcaccgggagtcttcttagaccgggaaactgactgaatttgcgtcagatatcttcactgtaggtagcgacattgatgcccttataagaaaaagattcggacgctatactgctgatattgaaaatggttattaatcccgaagggaggaagagacgatgctgagacggactttggccttgggagcggcttcgttttctcttctgattgcctgcagcaggggaggagcccaatccatggaaaaagatacaagaatgcttcccgcggaaaagccccgggcgggagagaaggagatttatctcgccggcggctgcttctggggaactgaacacttcatgtcgaaggttgctggtgtcagggtgtctgagtcgggatacgccaatgacaccgttgccaatccaacttatgaagacgtgtgtaccggccgaaccggagccgcggaaacagtgcatgtcatttacgaccctgaaaaagctgatctgccattccttctcggtctcttctttgaaaccattgatccgacaagccttaaccgccagaggaatgacatcggaacccagtaccggaccggcattttttataccgatccaggcgataaacccatcattgaggatgaggtaaagaagctctcagccaaatattcaaagcctctggcgcttgaagtgaagccgctgacctccttctaccgggctgaggaataccatcaggattttctcgtgaagcatccggacggctactgccatattccgcggcgcctgatggaagaggctgagaaagccaagtatcagccgacccataagggatttcgaaaggccggatcgcagagtctcaaggatcgcctgacaccagaacagtatgacgtcacgcagaactgcggcaccgagccgcctttccataacgcctattggaatgagcaccgggcagggatctatgtggatattgtgagcggagagccgcttttctcctcttcagacaaatttgattccggcaccgggtggccgagcttcacgaagccgatttcagagtccgctctgaaaaatacgacggatacgtcgtacggtatggtgcggactgaggtgaaatcagccgcgagcggatctcacctcgggcacgtgtttccggatgggccgtctgataagggcggacttcgctactgtatgaacagcgcgtctctccggtttatcccgaaagaggaaatggagaaggaaggctatggggcgtacctgaagtatgtgaagtaaaaacagttcaggcgttcagaacgaaaccggagatagggcagcctctctccggtttttcttacggcagttgatatcagctgcgccaggtatcccggaggacattcaccatctccctgatgacagaaagccctccggcaggaataatagtcacgctcacttatacacagtaaaagggttccggcatggcatctgcagaaatattgaaaatcggggcttcgaaggaagtccttgaatcccggctgaaaaccgttcttccaaagattcatgaaacgtttgatggtcaggttcaggtcattgaagaatcggatacagatgtgctcgacgcggttatgtcgggagagctcgacgcctgcttcactgtcaggggagaggaagatgatgcgtttaatcgctggccccttttctttgaggacatcatgctgatttatccggattctcatattccggtggagtctcagatggatctcgacgatgtgccgttcctcgtgattcctgaaaaatcagtctgcaaagaccggatgctttcatggctgtcagacgccggtcaggctccgatcggtattgaggaggcgggggactttttaacgattatccgtctcgtttccgaaggcgcgggcttcagcgcggtgccgggatcgctttttgccggatctccttataagacagagattcaggcggatccgatggaagaaccttaccgtacgatgcgtatcgatcttgtggcacgaaagggagtccgcgaggatgagattcgcagacttctcgggctctttggaaaataaagcgtcttctgtctcaccggaaaaaataaaagcgggtagaatagaccttccttggggctgccttggtttcgacgtggattacgaaggagcacggggcatgtcgaggtccgagatcctcgttaaacagttcggaaaagtaataaacgccaataacaagcgttacgctctcgctgcttaataccagcgggacgctgcaccggttcgcctgagggccgggtcagcctaaaaactgacagcagcgccatatactcgggctggatcctgttggagccgtgacggcaggattaagatcaagcggctggtcttcatatggcctgctggtgggcatggatgaagatgagatttaaagttcatcagatacgcatgtagaaccgtctttggacaatttgcggacgcgggttcgactcccgccagctccaccaagatccagaatcccagccgataccggctgggatttttttgtgggtgcaatgcgaggaacttaactgtcaggatggactctggcaattgaagaccgcccgatccagcatcttggtttgtgtcagagggggaaaggggggggagaaaattacgctcccgtctgatgagacacgatctgataaagcgctgagatcgcgagaagaacaaagataacggcggatcccttgttcagaacacgctgccacatgggtttcttcagccgaagagacaaagccccggcaaaaaacgcgatcagggtgaagacaagcagtgtcgccgcgatgaatgtgattcccatgatgagcatctgtacccaaaccggcgcggcgccggccccctcgaacagaaactgaggaaagaacgctagaaaaaagatctgtaccttggggttcgtgatgttcatcagtgtgccgcgccgccaggcagcctgcggagcgagggatgaaacccgggctgagggttcagccacgatcggagcgtgccaggctccccaggcgatataaagaagatagagtgctccgagcacgcagatagctccgaagagccacgtgctcgccgcgactacagccgcaagccccagcgtggcgcagagtgtctggaatacgagtcccgtgcagagccccagaatcacgaagaaaccggatctgaagccgtttgtcgcggactgcaggagaacaaaaatgttatccggtccggggacaaaagcgagaaagatgctggctgaaagaaagccaagccatccagaaaattccattgacagctcctgatgcggggaaagagaaaatagacgaagagtgacggggaatggaaccgggtcgtctgcctgatgagagattgtaatttttatgccatagccctgccgatgacgatatgcagggaacccaatattcaggatgccgcgttccaaaactaaaaagagggatccatagacgcttccaaaccgcctaagataaggcattacgtctgagtaatgtctttggagactgagtcactatggaatttgttctcaaaagaatttacgatcccgcgtcacctgaagatggttaccgtgtcctggttgaccggctgtggccccggggggtgaagaaggcggatgccgatatcagctgctgggctaaagagatcacgccatccccggatctccggaagtggtttcacgaggatagagaagggcgttttaagactttttccgagcgctacgcgaaggagctcgaggattccccagcggttggggaatttattcgctctattccggaaggcactgatcgggtaacgctcctctatgcggcaaaggccggagcgccgagtcacgttggaacactgaaggcagcgcttgaaaaagcggccgctgccatttccctgaaaaagtaatccctgagattggagacgcgatgcctcaggccgtagtgcttctgttattcagcgcgcttctggttttctgcgtcgcgtccgggctttccattctgtatgcgcttgcgggaggatatctcctcttcgcgggcttcgcggtcttccgggggtatggcctcaaggaagtctgggagatgtcgattgagggtgtccgcacggtaagcggcatcctcatcacgtttctctttatcggcatgctgaccgcgagctggcgggcagcgggcacgattccggatatcgtgatttttgtatccgacctcatccgtccggaatttttcctcgttctcattttcttcgcgaatacactgctctcggttctcacgggaacgtctttcggcaccgtcgcgaccatgggcgtgatctcaatgacgatcggggcgtcacttggcgtttcgccgcttttcacagcgggtgctgtgatgtcaggaatctttgttggggatcggtggtctccgatgtcgaccagcgccatgctggtttcagcgatcacgcatacggacctgagatgtaacctgaagagaatgctggtgaccggagcgccggcttttattctggcgtctctcctttaccttctgatggggtttctttatcccgggagcggccaggttccagagatccgcggaattttcgcttccgttttcgtttcttcctggattacggtgattccggctctgattgtggtggggctcgtactttttcgcgtcaacgtcaggctcaccatggggatcagcgtcgcggcggcctctctcatctgctttttcattcagcatatgggaatttctgacattctcagaatgcttgtactgggctaccagtcagaaaatgccactgttgctcatctgatgaatggcggcggcatggtgtccttcgcgaaggggatcgcgattgtctgtatttcagcaacgtacgccgggattttcattcgtacccggctgcttcaggggatccgggggctgattgaacgagtcgcggcccgggtaacaattgtcagtgcggtgacgctggccgcgattcttgcttgcggggtctcctgcaatcagtcgttcgccgtcatgctgactcatgatctctgcactggcgtgagaccggatcaggagaagctcgcgctggatattgaggacagcgcgattgtgatcgcgcctctgattccctggtcaatcgcgggcgctattccgctctccgttctcggcgcggcccccgcgtcgctcgctttcgcgtttttcctttatctgctccccgcaagccgccttgtactggatcgggaaaagcttgcgggaacatagaaccaaacgtggggaaacgccctcaggcgttttcaatctgagtctgctcaagcgcccggtcaagcgattcacggatcgctccggcttcttcctctgagaagagaccctcagcggggcttgaaacataggtattcatgaagtcgttccagtcgacattttcaaagtagtcagaggcccagctgaaaatatcgaaagcatccggaacttcagactcgtggaagagcagaaccaatgcctcagccacaacgccctgatcctctcctgcgtcaatcatctcgtagccgcgcttgagagcaatcatcgcgaatcctctcagcacctcatcggtctcgaggtaatgggagaaatcattcggatcgataccgccttcgtctacttcaacgtcatcccattcctgatctaattgcatattatgccttttctgtaacactttataaaaaagccggtcttttcaattccgggaagctccctaataatagtgggaaagaaaagctttttgaggcttttccttctgatctctcggattgaaggagttgcgtgatggaaaaaaattccggatggaccactggcggtctgattggtgccggcgtagcggttggtctgatctttcttggctgcatgttttataccggcgtgtctcagtatctggggcagacccgggtcgtcacggtgaagggccttgctgagcgggaagtcccggcggatcaggtgatctggccgattaccttcaaggaaaccggcgacaaccttctcaccacgcatacgaaggttgaggcggacagccagaaagtggtggcgttcctgaagaagagcgggcttgaagactccgagttcagctttggggccccggaaattcaggaccggaacgctgaggggatggatatgcgcggtccgcgctatacgctcaccggctccattacggtgaattccacaaaagtggatcaggttcgccgtctgatggcggcccaaaaggagctgatcggcgaaggcgttccggtgaccacggataagtggaatacggtgttcctctataccaaactgaacacagtgaagcctgcgatggttgaggaagcgacgaagaacgcgcgcgaagtggcgcagaagttcgcggcggactcgggttcccatatcggaaagatcaagtccgcgaaccagggacagttctccattacggatgccaatcagagcacgccgtatgagaagaaggtccgtgtcgtgacgaccgtgacttacttcctgaaagactgatcacctgataggtgcaccataaagaaaaagcaccgaggcgaagtctgcttcgcctcagtgcctgaagatgagggatcgtcagccggcggtcccttcttttttctctcgggtcaggcggccttcgtcagctcgtcgatacggtaggtcagttcggtgccgggaacagcgccgaccacgtgatccgccacttcgccatccttcatgaagacaaagcacggaatcgaacggatgccgaactgcgccgcgatttcctgctcttcgtcgacattgatcttgccaaccttcactttgccgtcgtaatccttggcaatctggtcaacaaccggacccatcgtgcggcagggaccgcaccagtcggcgtagaagtcgatcagcacaagcttatcgctcttcagcacttcggtttcgaaattgtctttcgtgaacttgtattccatggtgttactccatcaatctgtatgtcggttttcaggcttgaggttttctttaggtatcggggatttctgcagttgtagaagcaacctgatgccccattcctcaatcacgttgaacatcaatctagcatgaaagaaaacaacgaatgagcctttttgagccgcattcagatgggaaggtaagcatccgtttcagtgtcttctctcttggagagggcggcctgaaaacaatacagaagtgataggaacggctgaaaaaacgtgcggcttcccagagggagcaaaggatcccgtatccgatttaagcgtgagaggagataaccgcctgttgaccagcgaagctgcggacatcaatggagagtcagaggatgcgcagaaatccgaatcgtcggatccggatccctgccatgtatctttctctcgatcaatccttcttctttgctttctggatgagttcgtagagagacgcgagcgcttcccgcggagtgagggtatccgggtcgattgcgaggagatcatcccggatggagagggccttctccacttcaggactctcacattcctcctccagttcgatttcgggttccggaag

SEQ ID NO: 1290 - DNA, 58223 bp, Unknown
  gut microbiota DNA sequence
actataaacatttaaatcagacacggttttagacctttcagaaaatattgggtagaataattaaagaataattcactaaaacaaaacttttaagttaatcccccgtttttcagattatggttttgaaataagagccggttttcagatcgccggtcggaagatagagtgaacattttcccctgtcacttttgtcttctaagtattttgaccggttggttatttaaaagactagtccaaattaaatatccggaatctgcggatatttatgaaagaaacgatatctatctgatgcggcacgactaaaaggacaaggaaaaagatgctgaacgaaaataagcagctcgatgcaaagattcagaaagcccgggaactccagcgtcagactgaggctctgatgaaggacattaagcgtacggccatcaaggaaatccaccagtatatggcccgctataacatcacgctcgaggagcttggcgcgactgccgcttcgaagacgaaggccgctgctccggctgccgaccagcagccgaagaaggctgttaagcgcgtcaaggtgagccccaagtatcagagtgaggatggtctgcagacctggaccggccgcggtctgaagccgaagtggctgaaggctgagcttgatgccggccgtaagctcgaagacttcctgatcaagacggaataagaaagcggtgacagactgctcattgtttcttccgaatatccaattctttaagggagaaaactgtgtggcatgacctgctataccggacagtttctgtcgtcacctgtttcctggtcggttatgtcggctatcggattctgcacgcgctcggatttgcgtagagtgtgagaggggcccgggagtcagaccttttacggccgggcggcaggaatgctttaaaaagctgaatttccgcagtgaaagctgcgggattcagcttttttattgcctgcgaagccctctatggaattgatccttctcttcttttaaagaattctgttttttttgctgtcaggaagttgtctgtgaaatagcgggtttttgtattggaagtaatcccggaagtttaaggcgcctattttcggggaagcgttttccggatcagctgatccgcgtgagattttctgacctgacggaggaaccagaagggggaagggaaagagcgctattcctctggcctcagtagccggtgtggcgacagtgccggtgtgtatacattcggggcgcctggaccgcaggataaaaaatccccggttcatcatctgagccggggatcaagcaagtttcattgtgccggagagttttccggcagcgggaagaagattacttcgccttcttcagcgggtgaaccatgttcgccgggacaaccgtcgcgtcgaactcttcaggcgtgcagaccttgagagcgagggcagcatcgcggagcgacaggtcgttctcgtgagcgtagtgagcaaccttggcggcgttctcgtagccgatcagcggagagagagccgtgacgttcatcagggagcgattgaggaagtaatcaatcttttccttgttagcggtaatgccgtcaacgcagtgctcagcgaaggacacttcaacgtcggcgagcagacggatgctctgcagcaggttgtaagcgatcacgggcttgaacacgttcagttcgaagttgccctgagaagcggcgaaaccgatcgcggcgtcgttgcccatcacctggacagcaaccatcgtgacagcctcacactgggtcggattgaccttgcccggcatgatggaggagcccggttcgttcgccgggatgttcagttcgccgaggccgcagcgggggccggaagcgagccagcggatgtcgttcgcaatcttcatcaggtcagcggcgaggcccttcagggcgccttcgaggaacacgacagcgtcgtggctcgtgaggccgtggaacttattgggatcggaaacgaacttgaggccggtggcgcgggaaatttcagcagcgacgaggacgtcgtagccttccggagcgttcaggccggtaccgacagcggtgccgccgatggcgagttcacggcaggagtcgagagccttgaggatctgggccttgctgtggtcgagcatcgaaacgtagccggagaattcctggccaagcgtcagcggcgtggcgtcctgaaggtgcgtacggccggtcttgatgatgtccttgaaggcttcaacgcgggactgcagagagccgcgcagacgatcgatagcggggatcagcagcttctcaacttcatacacagccatgatgtgcagagcggtcgggaacgtgtcgttcgaggactggccgcggttcacatggtcgttcgggtgaacgatgttttccttcttctcgtgagccttgtcgcggaagttgccgccgaggatttcggtggcgcggttcgcgatgacttcgttcatgttcatgttggactgcgtgccggagccggtctgccagatagcgagcgggaagttgtcagcaagctttccggagaggatctcgtcgcaggcctggacgatcgcgttcttgcggcggtcatcgagattgccgagctcgttgttcacaacggcggcggaacgcttcagatacatgaaggcgcgggtgatttcagccggcatcttttccgtgccgatcttgaaattctgataggagcgctgggtctgggcagcccagtacttcgagttatcaacctttacttcgccgatggagtcatgctcaatacgaaaatcgtccatgaagaaatctcctctctctgtaaaaaaaccgagttggcggccgggtcggctgcaactaggtatagacgtaaactgaatgggtattttaggtgaatattggcaatacggaaggagtatagggttaataattagtaaaaattgcggcaaaccaaagaaattaggtagatttactcagataaaatttcccggcattaaagcgggacatatagataaggtattgatattattttatttttaataaattgcttaaaaaatgagcaattttaggttatgcagagcatccgcagtgcacagggatagattcaggggctggcggggagtgtgacagaaaaaacgggatcttttgtataccttattgggtataaaaatatgcgcttctaggagggggagtgaattgcggcagaaaattcctgccaaatgaattagataaaaagtactagcaaaagacccggtaaagcggtcagctttgtccggatcttttaaaaacagcaggttacatcagggcagctgtttttcgaccttcgcgatacgggccttggcggagatcagtgccatcatgacagtgggatgcttcgccgtgaagactttcaggcactccgcccattcatcaatcgcttcgcgcgtttcccagtaggtcaccgtgatccattcggactcacctttggcgtcttcgataccgagaaacccgggggcgttcgccaccgtttccttgatgtaggcattcagcttcgtgaaaatgtcctcagtgccaggcgacacaatggtcgtgaaattgagggcgtagtaagggggcttgggagtttgtgccggcatttttttcagttcttatgaatgggaaacatgcctgcatattaccggaaagccgaagacctgaagcaccgctctttttttcgaaaagtatcaggtcgcttatagtgtggtgtcgttaaccgcaaaagaaggatatcgctacgccatgatgacgcttgatcggatccgtgagaagaaggcctttctgattgatatggatggggtgatctatcacgggaaatttctcctcccgggggttcctgaatttatcagctggcttcgcgaggaaggaaaactctatcggtttgtaacgaataattcgtactttacggcggcggagctttcagagcggctctgcgcgatggggatcgacgaaagacctgagcacttctatacgagcgctatggcagcggcctcattctgttctcatcaggcagatgacccttccgcctgggtgattggggccaatggactttattccgcattggaagcggcaggggtccgaattacggacgagaatcctgaatttgtcatagtcggggaatctgagaaagagtacacgtggcaggcgattgaaaaagcagtgaatctggttgtgaacggagccaggctgatcggtaccaatgctgacctggcggggcccggttcctatggtctggttccggcaaccggggccatgattgctccgattgagaaagcggccggccggaaagcttattttgtcgggaaaccgaatccgctcatgcttcgccgcgtgatggacagcctcggagtgcacgcgtcggagtctgtcatggtcggcgactcgatgggtacggatattctcggagcactggaaaccggcatggccacggttctcgtcctttcagggatgacctccgagcatgacatccgtaaatatgccttcagaccggacgtggtgctccagggggtcggatcgataccgcccgttacagaagactgagccggtttcaggttatccaaagaaaagccgctatagtattttgtaaacggagttccggcgtcagttaccggactctccgcatctgtgagtaaaggtggcttatatggaaaacgttgacaagacgcaggaagagagggatccggtatcagccgcggaatccttttcccgggaaaagccggctgcaccggctgccgatgcagcggcagcgccctccctgaaggttgaggccggtgacgggaaaacagcgcccagtatccaccttgaagaagatgcgtctgatgcgctgaaaacagaagcggggggcggaaacggactcccgcctggcggtaccgcgggttccctgacggcggtgcccgaaccggagccaaagcccgaaagatcaaatcttccggcagagcttccgaagtcttctcagcagactcctcaccccaaggggacgctcgctcagctctgggatctcttctgggatacgttccagaaccgctactggaaattttccggccgcgcgaaccgcaccgaattctggacttttttccttggcggactctttgtgagctcgatcctgaatgttctggcttctcagccttttatcggtttcttcgcggcccttgcctcagccgcctggtggatcgtgacgctcgttccgacctggaccgttgctttccggcggcttcatgacgccggacgctcaggatggtggatcaccgcgccgcttatcgtgatgtgcgcgctttttatcctcttcccgatttcgctgttcttcagtttctttacttttgtggcgctggggccggtctgtttcattacaggggtgctctttgtaatcgtgctgattttctgcgcgctgcctggtgaacggaaggcgaaccgctggggtgaaccgccggaagatctgcgaattttctgattatttctttttatccggaagagggctgggcgctctctcccggcgagtgaattcatgaagccagccgctgcgctatttgattttgatggaacccttgtggatacggagggaccggactgcgcgctgatctcccggatgctgcttgaggttggaatccggaagacaccgaacgaagtaatgaaagactttatcgggcttcccagaacggaaattgaggaggcaattctcgcgcactatggcgtgcaggtgcctcttgactggcatccccgctatatcgaggaaagatcaaagcttgaggaccatatgatcgtcacgccgggaatagaagatgcgctgcgccgccttcagaattcgggtgtacagctcggcgttgcctcaaacagctacgagccccggctgaagcgggtgctcgcgaaatccggtctggaaacctggtttggcgatcggctcttccatcttgatcagggcagccgcagaaagccggccccggatatctatctttttgcccttcggtcccttggcatcagtcctgaggaagcggttgcggttgaggattctccactgggtgtccaggcggccgtcgcggcaggtatccgctgcattggatttacgggacataaccatgtgggagaggcaatcgatcaggagcttctacaggctggggctttcgtgcttgagccggatatggggaaggtggcggacctcattctgaaggggtgagattccaatcgcgtattgggtctcctccgatgtatgggatttccgtatagttaggaaagagaaagaaatttttcaccttgaagtcacacgcggagcggaagccggctgtgcgcctcgtccgttccacttattaggagaaatggcatgtcgatcaccccagtatctgaacttccgccggttcccgagcgtgttgaagaagcgatgcggaggctctctgcgtcagagagcgtgaagtcgcttttggaagcgatccgtcaggatgacgacgcaacgcgcgatcagcagattgagatctgcgaggttccggcgcctcccttcaaggaaaccaagcggggagagctcctgctgtcacttttccgtcagtatgggctgaaagatgcctatgtagatgaagtcgggaatgttctcgggcttcgccgcggtacggggaacggtcccgtggtgcagatcgcggctcacttggatacggttttccccgaggggacggatgtcaccgtgaagaaggatgggaatacttaccgcgcgcccggcatctcagacgatacccgtggccttgcatccatgctctgcgttctccgacagcttgatcagctgaatattcagactgtcggcagcattctctttacagcgagtgtcggtgaggaaggaaacggcgatctccgcggggaaaagcatattcactttgagaagaaagtcccggtggatggcttcatcgggattgacgcggcggatgtgaagcggattctcgctggcgccaccggctctcaccgctggctgatttcgtatgatggccccggcggccattctttccataagttccgcatcgctccgtccgcgattcacgcgatgggccgtgccattgccaaattcgcggatctgccggttccagaggatccccgtactacctataacctcggcacgatcaagggcggcacaattgtgaacgcggtggccgctcactgtgaggcacagcttgaccttcgttccggcggtaatgatgagctgctgaagcttgaaaagacggttctcgcgtgttttgatgaggcgctcgaggaagagaaccgccgcgcgaacgccgagggcgatatgaagctgaagctgacaaagaagcagatcggcagccgtccggcaggtgttgctgatgatctgagtccggtgattcttgcggctcgcgccgcacaggaaactctgggcattcctctgacccgctatgccagcgcgtcaaccgatcacaatgtcccgctgtcgcttggcattccgtcaaccacgcttggcgcggggggcgtggaagggaataaccacgctcttgacgaatggtggacgcaggaagaagcctggaagtctccgcagctcgtggcgctgaccgcactgctgctcgccggtgtggacgggctgacggagccgacgcttccgaagcgcgcctgatcgtatcagaccaacaaaaacggcatagtccagaggactatgccgtttttgtttgaagcaatcccggattactgcgcggtccgtccccaggcggtagcgggtaccgcgccgtttgaggtgtcagactcaaaggtattgcaggtattcgggttcccggagttatagccgcgcttgaaccagtaaaggcgctgggctgaagtcccgtgcgtgaagctgtcaggcacaacccgcccggtcgcttctttctgcagacggtcgtcaccgatagcggtggcggtattcagggccttttccaggtcgccagactcgagaacaccgtcccgcttcatgtaattgccccagacgccggcaaagcagtcagcctgaagctcaaccttgacggaaatccgattggcgtccgccttggatccctggctctccagtttctgagccttttcactgatgccgagaagattctgtacgtggtgcccgacctcgtgcgcgagcacgtaacccagcgcgaagtcaccgccgccgccgagtttcttcttcatatcctcgtagaaagagagatcgatatagaccttctggtcagcagggcagtagaaggggcccatcgcgctttggccataaccgcaggcggtcggtgtggatcccgtgtaaagaaccagtttgggaggtgtgtagcggcttccggccttctggaaaatttcgccccaggtatcttccgttgtcttcagagcgaccccggtgaaatccgcgagctccttttcttcagcggtcggctggtaattggcggccggcgcggaggacgtggtctgagtcggtgcagcgccgttcagaagcggtgtaaggtcgatgccgtagtaacccgccacgagcacgacgacaagaagcagaatgccgccttttcctccaatcggagggagaccgccgcctccgcctgactgcccgcgtcggtcttcaatgttgtcgcttgattctcggttacgccatcgcattgtttttaccccggctaagaataattgggggagccatcgcgccgcgggctccctgaaaatcattttagcggatggcgttttagtggaaaagattgattttcaagtgcaagtttccggatctcatttccatctgtaaaaaagatccggatacgcttgtttatctgtaatacggcttctagaatacagaataatttctgtatacagtctttttacgaagaactatgaacttcctctcgatgaagtactttacgacggttgcacggatccgaagctttacccgcgcagcagccgaactgaagatcacacagcagacgctgtccgctcatatcgccggcgtcgagaaggagcttggctgcacgctcctggtccgccatgtgccgctcgaactcacctatgccggtgaagtattcctgcgttatgcggccggatttcagaagaattacgagcagatggtgatggagctgaatgacatcagcgagaatcacagcggactcatcaaagtcggcgtcggctttacgcgcggtctcgcgatcatgccgaacctgattgaggaatttcagaagaagtggccgaattacgagattcagctcgtagaggtcacgaacgaggaactcacgaagctgctggcggagggagatctggatcttgcgatcgcaaccttcccggatatggcggcggatattgaggtgaagcctttctatcgggaagaaatggttctcgcgatcgcgaagagtctggttgaagagcgtttcccggggaagcgcgctgaactcgcggcggcaatccgtcagggggatctctcgatgctgggcactttcccgtttgtgatgggaaagcctgaggacatttcgggcggcattgcccgggacttcctgcatcgcaataacctgcagcctcaggtgaaggcacggtcagacaatatcgggacactgctcgcgctctgtctccgcggggtcggtgcctgcttctgccaggcgaatttcatccggatgaccctgacacccgaaaacgtgaatcagctcgatattttcagactgccccgcgaagcgacatacgaaatccgattcggtttcccgaagcaggcgtatcagcggaaagccgtgaaggcatttatggaaacggcgcttcagctggtgcctaagcctgaagaagactaagtgatacgctgagaggcacacgatctgacaaaacggttgggagttttaggaatggaagattttgagtttcagaacaagggccggattctgtttggtgaaggaaagcgtgacgagtttctgcagggggtaaaagcgctttcggacaaggttctcgttgtatgcggtccgcattttgcgcgcagcggggaactgggcgaaatgctgacggcctttgaggaaatcgggatccgcacctgggcgatcgcggatcttcatcagtcgactatcgaacaggcgcgtgtcgcctggaaactctgccgggataacgaaatcggcgctgtggttggagtcggcggcgcgaccgcgatggacttcgcgaaactcactgcctatggcgcctgccagaaagaagatatctggccgctgatcgcgacgcgttctagcattacaaccggtaagcgccttggtctcgtcacagtgccgaccttcccgtcctccggttccgatctcgacagcgcctccgaaatggtggaaaagtcgacagatcacgcgggcggtctctatggtgccccgctcattccggatttctgctggctgaatccggcttacgccaagtccattccgcccgagttcctcgcttacggcgtgatgacttccatcattcaggcgtcgaattctttcctcaacccgaagcagtcaggatatggcgaaatgttcacatccggactcatccggaatgagctcgcgaaccttgagcgcgctatccagaaaccgggggatgaggcggcgctcggtgaactgatggtgagcgcctgcatgaatgagttcggcgcaggaacgcttgggaaggacggtgcggacttcagtgtcttcttcatcgagggaattattgagtactactgggatctgccgtatgccccctcgattgtgacgctcttcccgcactggctgaagtcggtctattccgcgcagcccgtgttccgccgctacttcagggatgcctggggggtcgacgtggacggaaagacggatgatcaggtgctggaacttgggttacagacgatcgaagaaacctaccggaaattcggtctttccctgacactgaatgaattgaagccgcagaaggcggatccggcagcgctacgcaagttcattgctgaaccggggccgtgtgaatcgatttaccgcgaattcacgccggatgatcttttcgagctgattacgcggacggccggctgatccgctgtttctgctggagggagaacctatgaagcagctgaaagcgacgcgccgcgttctgatcggagcgggtgccgcggtagcggtcggcgcggcagcttttggggcttccgccttctttaaggatcggaagccttctgaattcaatgcccgcctgatcgtcggatccgatacggataattccatcgccgtgcagtgggaaggaaacggcagctggtatctggagcttcgaaagagcggcagccgggacgccaaacgcttcacgcctcagccggacagctacacagtgaaggggagaacctatcatctgcagaccgttcggattgccggactgcatccgtcgacgacgtatgagtaccagatcaccggtccgaatgatgaaagatccggatggacagctttcagaacatcggatctggaaaactgccgcgcactgatattcccggactctcagtcaaacgatcggtataagacctgggaaggggtttataacggcgctcttggcagaacacccgatattgactttacctgcaatatgggggatctcgttgactgcggggcctggctcgatcactgggattactggttcagcgcggtgaagggcgggatcagccggattccggttgccgtcgtgatggggaatcacgatacctacgacatggattccaagacccgtgtcgcggagcccgtgatgtttctgcattcctttccggtcccggataacggaagtgagaatttcagacgctggtactacacgttcgattcagggcccgtgcatttcattgttctgaacacggagtggcaggaggcggatcttctcagaccgggactcctttcagagatgaagacgtggttccggaacgtggcttccaaaaccgataagccctggagcgttgttctgatgcaccgggacgtgctttactacaagatcaaagggcggaagcgcgcgaacgaaacctttgatgaggtcgggaaggagctgatgccgctctttgacgaagcgggggtggatcttgtcctcacggctcatcttcatacctatcgtcggcgtgaccatatcaaagcgtttgcccgatcggaagacggacctctttatatcgtgaccggcgtggccggcaatatccgatatccggatttctggatcgatcacccgcttgatgtgaagattgctcctcagcctgaaacggataactatctgctgctggatgctaccggtcagtccctgtcccttaagactctccttccgaatgggaacgagattgacagcgtcacgctgacaaagaacacgtaaggcggggaaaagaaaaccaaaaacggcatcaggcagataacctgatgccgttttttatagagagcccgtcagcagatcaggcttttgccggttcagcggttttcacggctgttttctcgattttcggtgacttgacgatcagaagcggcacgatgccgtgagcggcaagggcggccgcggtcgatcccatcacagcggtcttcaggcggttatagccatgagaccccataacgagaataccgatgccgttcgcgcgggcgtaagcggcgatttcatcggccggggtgccgacgagcttcacttcgtcaggcgtaatgccttcggccgcgaaaatcgggcgcaccttggaaaccgtgtcttcgaactcgttcttctccagctgatcaatatctttatcagagagcgtcggaagcgcgatgccggtgacattcgtcatcgccgcgcctcggtaatcgtttaccgcgttgatgatggtgaagaaggcgtggtctccgaaaagcttccggtgcttaagcgtatagcggacagcggcctcgccgtaagccgaaccgtcgaccgcgataccgacgcgaagcgaatccgggaattcgtcatgcttgccgcggacaatcagtacagggcagtgggcgagcgaaataacaccggtcgacacggaattcttgaagagtcccttcagggcgccgagaccgcgcgtccccatcacaatcagatccgctttgtagcgctcagcctctgccgcaatagtctgatcgggaaccccgaccagcatggtttccgaaaccttgaagcccgcgctttccagagtccggcgggcgcgtgagaaaagcttctcggcgtgctcctgatagtaatcatccagagctccttcaccgaagaggaaagagggctttctcttaaccggtgcgtgaacattcagaatttcaatttgcgggttgctgccaagcagtgtctcgcgggaagcgacaaaacggacagcatcctggctgctgcggctgaagtcgatcggaagcaggatcttcatcaggcttactccaattcaagagggacaagggaaacgcgtgtcccgatggatgaagtataagcacgccgaagccggtgggatgagcttttctgtgattttgggaggcacagattcgtggatttccgcgccctcacggctaaaatcaaagagtggaaaggctgctccggtccactttcttcttgatctctatggcaaatctatgacccgaaggcgaaggcgcctcaccgaggcgctgaaaaagattctgatactgcttctcacgctggggcctcagagcggtgctctttggaaaaagcgtgagagaaaaggtgtctgttatggacagaaacggcaggttcggaagtaaaagcgggtcgttttgcagaccctcagggcagaaaaaaagcttcccgattttgatcgggaagcttttttcattcatcaaacctgtcagggatcaggcggcctggggaaccggagcgtccggtgcatcagactcggcaggcggaagcttgcctttcagatcgtggtccgtcatggtggcgacgcaggagtcgctcgcaacgttcaccgcggtttcgatcatgtcgatgatggcgtagaccgggaggatcacacccatcaggtcaaccgggacgttgagggaagacatgagggagagggtgaggaagtagcagcccatcggaacaccggcgttgccgatagcggcgatcacggcgacgaccacccagactgccatcgtaccgcccgtaatcgcgatgccggcattctgcatcaggtagagggacgtgaccagaatgaacgcagcgcagccattcatgttgatcgtggtgcagatcgggagcacgaagcgggtaacgcggcggtcaaggcgcaggttctgttcagcagaggcaagtgtcacaggaagcgtaccggcggagctcttcgagaagagagcaacagcaagcgccgggaacatgcccttcaggacgcgcagcggattgatccggcgggcgagaaggaagagcggcagcacaacgaagaactgcagcaggttacccgtcaccacaacggcgacatacttgccgagggaaccaacgatcacaccggcttcaatctgggaggacagctggcctgcaaaggcaagaataccgaccgggagaatgaagagaagtgcgcggatcagcgtgaaaaggagttcctggagtccgaagatcacccggagcagggaatcacggccttccgtgcggggcatgaaggcgagagccaggccgacggcaacagcgatcaccagaacggaaagcacattgccttcaaggaaggggtgcagaacgttgtccggaacgacagacaggaagtggtcgtagtagctgagggactgaagattcttcggaacggcagcggaaccggcggctgaaatagcagcaggaacgttttccggcgcaatcaggataaagagcccgagtgcgacgagagccgcggcgaaggtcgtggcgagagtgtagaagatcgcgtgagcgaagatctgcttggtttctcttttcgcgccaagctgagaaagcgtggtaatcacagcaagagcgattaccggcacggcgacgaacttaaagaggcgggtgaagacggtagcgatgaagccgaacagttcgttcagccaaccaatctgcagccagccaaggaatccgccagccacgagcgcgaaaaaccagaacgcgataacgcgtgtgtttttcttaagggcagcctgagcgttagtcggggaaccgctcggctctttttgtaggttttccatagagactgtttccaaaaagttttaacccgatgccgcagacaaccggcatcgacaggggaaacaataccctaaaaaaagaaaatagtcgagtaatttactcgggattattcgaactgctccgaaaataccccggatgggggaacctcgcccggggtctttcggatgaagcaatcggattattccctttcagtgtcgaaaccttcggcaaccttccagagaagcttcacgccctgcataaaatcctcaagcttcatttcctcgcggggattatgggacccattctggttcgcgacgaaaatcatagcagaaggaatcccagcgttcgtgagcacagcggagtcgtgaccggcgccggacggcatcgcgatgtaggggataccgttttccgccgcagtcgtcgcgatccgggcgacaaggccgctgttcagcttcgcggggtcggtgcggagcatctgatcgaactcaaatttcacgccgcgttccttggccaccttatccgcgcaggagaggagcacttcatggaaccgctcaagcgttcccatcgagagactgcgcatatcaatacagaaggtgacaagccccggaaccttcgcgatggcggctgagtccccggtcttcagcacaccgaccgtaaagaccaggtcttcctcacggtccagacggtgaatccagtgcttttccatccgcatcaggaagtcagcggtcgcgagcaccgcgtcgtggcggaactcgcggttcacggcgcccgagtgagccgtttcgccgatgcagcggacaaccttatggcggaggtttccgcggatgccggtgacaacaccgacacgcttcgttttattgctgtcaagcgtcgggccctgctcaatgtggagctcaataaatgccccgaatttcttcagatccgcgagaggcttgccgctgacacaggcttcagggtcaaaaccggattcacggatcgcttccgcgagcgtctgctgcttcgtgcggtggcggagcttcaggtcttcgggcttcagcttgcccgtcatcgcgagcgttccgacataggccttgccgaagtaggagctttcttccatgcgggtcacgagcacagacatgtcgcggtacggcgtgtagttggtgcggcgcatccaccagagaaccgtgagaccggcgacgataccggcaaggccgtcataatttccgccctgagggactgagtcgccgtgtgagcccgtcacgaaagccggcaggtcgcggtgttcaccaggcagcgtgaggaaaagatttccggccgcatccgcccactcttcaagaccgagcgtctttccgacctccttcacgtattcgtgaactttattctctaccgcgctgtagccctgccgtgagacgccggcgactgggtcctttgaaaactcacggacgtcatcaaaaatctttttcgcaaaggccgcgccttctaccgcaatatcctgcatctcttcagtcatgcttttctcctggacctcaatggttggtgattgccggttctcccgcatcggacggtgccgcaatcgatgtaggaattaaagcagaaaaaaaccgaagttcccgtcgattcagaaaaattcccgcggattcagtgaaacatgtacatgactttccggtatgaatccatggggacggctcccacccattcatgtatatgaattgatgcaccaaatctgaacatctggattcctgaaagggaaacatccctacttttatcttacacaacatcatgaaaacaaataataaaaataatcactctattggtgcgtcatgaaattttaataacaataaaaaagcagtaatatgcacaaataaagtgcgtaaagattattaaattatggagaaaaattttagtttttaatctataagtatttgaaataaaaataaattagtatcgatgtcaaaagttggcacgatgattgcgatatatccggtaacaatcactggagatgcgctgatggcactgaagatccgaatgaagtcccgggactgggatttttggacacccctgctgctgggggacgttacgtctgacactatcgatctggaactgacgagagtgcagtccctgatcgataacgtggcggatgatcctgactgcgaagcagcggaaatgagtctttcccgatacgcgatgcgccgaagcgcagggaccgaccggaaccttgtcggaatcccgtttttcatcatgcgggggttccgaaaccggtgcattctgacgtcagacgattccccgattaccacgctttctgacctcagaggaaagcggatcgggctctccggatggcaggattccggaaacacctggacccgggcgctccttcttgaagcgggcgttccggtggattccattcagtggacgctttcccgtattacggccgcggaccggattgatccggagcggggaaaacagttctgggatgaccgcgtggtgttccatgacccggacgaaacgccgcttgttgatcttcttaaagccggaaagatcgatgcgattttccaggctttcatgccggctgatttctatagcgaagggtatgggctgcggcagctgcagcctgacttcgtttcacaggaaaaggcctggttcggccgcgccggtttcgttcccgggattcatatcctcgcgatgaaagcggactttatcgcagcgcatcctgaggctccgaggcagctttgcgagctccttcgcgactcacagaatctctggctcgcgaagcgccgcaagtacttcgaaaccacgccgtggctgatcgcggatcttattgatatggcgaagtcgcttcctgaagactgggacccggtggggcttgagccgaaccgcaggatgctcgacgaattcgcccgccagcagtatctgcagaaactgacccccgtgcagcgtgacgctgattttctcttccccgtgaagacgatctgagagagaggagaccgtaatgagtgatcttttccgcatagcccttgggcagatgacggtcgcggagacgggaaccgagaatctcgcgaaggcggtgtctttgatgaagcgggcggcagatgccggcgcgaggcttctggtgctccctgaaggcgtgattgcccggaaaccgactgacggcgcctggagccgcaaacacgcggaaccgctggatggccccttcgtatcggggcttctcgccgcgaccgccgatattccgatcgcggtttcctgcacggttcatgaaccgtcaggagcgccggacggccgggtctggaacacccacattgtggcggacggcggaaagcttctcgccgcctaccggaagcttcatctctatgacgccttttcaggtctcgaaagcgccaatgtggtgccgggcgacaccgtaccgccgctggttgatatagacggctggaagttcgggctcgaaacctgctacgacgtgcgttttccggagctttcgaagcgcctcgcgctggacggcgcggatgccattctgcttccggccgcctgggtgaggggatcgctgaaagaaatgcactgggaaatcatggcgcgtgcccgggcgcttgaaaacaccgtctatgtcgccgcgctttcggaaatctcagcccggaatattggctgctccatggtggtggatccgcttggcgttccggtttcccgggcgggcgcggctgaagccttgatcaccgcggatatgagccgatcggtgcttgaagacgcgagaaaagtcctcccggtgcttgaaaacatgcgtttcgcccgcccggaactgaagccgtgaccgttaaccaaaatccctatttctactgaaaaaaaacaactcagaaggaccaagcgggatacccctggtccataaggagagcatgatgaatttcaagaaactcgcggtggcagccgcagccctcagctttgcgttcagcgctttcgccgccggtatcccggcacagaaactcgataaatcgcttcacgcgaagctcccggcctcgatccagaagagcggcgtgctgcgggacgccgtgaacggttccttccctccctactatgtcgttacaccggataagaagattcagggcgcgctctccgacttctcgaaggcgcttggcgagattctcggggtccgggttgagcatacgaatattccttcgctttccggcacgctgatcggactgcagtcgggccgctacgacatttcgatcggaccgatcggcgacttcccgaaccgcgaggagaagaatgatttcgtggactatgttcaggagtacgtggttttcgcggtgaagaagggcaatcccctgaagatcaatggacttgaggacacctgcggccgccggatttccgtgatggcgggcggttccgcggagcgcgtgatcaagaagcagtcagacacctgcgtgaaggccgggaaaaagccggtcacggtgctctcctatgacggccagacgacttccgctcttgctgtgcgctcgggacgcgccgatgctttcttctcctcccaggctccgctcacgtattttgtgagccagaacaaggcttacctggagctcgcagcggtcgggaagaagaatggcttcaacgatctctatcagggcgcggtgctgccgaagaattctcctctgactcctgtggtgcttgatgctttcaagatcatgtacaagaacggcacctataaggcgatcatggaaaagtggggcctcagccgcaacatggcagcgcaccccggaaagaacatggggatcgatgtgaagtaacccgatctatccgccccggcggtgacttcacccgccgggtcaaagcttttctggaaatctgagaatgacgaattctgaattcaaagcggcggatgtctccagggcacgccgcccggtgccctggttaaggtgggtgctttacgcggcagtgaccgcgatcatcctgtacttcctttggatctgctcgaagaacccgaattttgagtggggagttgttgcgcagtactttacgcacgactcgatcctccacggaatcaagatgacgctggggctcaccgtggtttccatggtgatcgggacggtgctcggccttatctgcgcgctggggaaactctccggcagccgctttttcaatacgctcagcaacatctatctgtggttcttccgctcaaccccgctgctggtgcagctgcttttctggtacaacctcgcggcgttgtttcccgaggtaacgctgcccgggatgggcgcggtatcaaccaacacgctcatcacgccgctctccgccgcgatcatcgggctctcgcttaacgaaggcgcctttatgggggaaatcatccgggcgggactgctctccgttgatccgaatcagaaagaaaccgctcaggcctttggcatgagccgccttcagatcatgttccggattctgattcctcaggcgatgaccgccattattccgccgaccggaaaccaggtgatctccatggtgaaagcgaccgccatggtgtccatcatcgcgatggatgatctgctgtactcggtccagacgatttacaacgtcactttccagatcattccgctcctcattgtcgcggtgatctggtacctcatcatcacgtcggtcctctccgtgattcagtggatgattgagcgccatttttcgaaaggccgcagccgcagcacgccggctgctgaagagaccctcgcggcggaaggagtaagcgcatgacagaagaactgacagcccggaacacggagccctttgtgatctgccgcgacgtgcgtaagagtttcggctcaaatgaggtgctgaggggcatcagcctcgaagtgaagaagggggaggtcgtggtgatcctcggtccctcggggtccggcaagtcaacactccttcggtgtatcaatcatctggaaacaatggattccggaatgatcacggtaggcggtgaggctatcggctacgagatgaggaacggtgaactctgggaagcgccgtatccggtcgtcgcgaaacagcggagccggatcggaatggtgttccaggcgttcaatctcttcccgcatctcacggtgctggaaaacgtgatgctctttccggtgtcagtgcatcacgtgccgaaggacgaggcaaagaaaaaggcgcttgagattcttgatcgggtcggtctcgcagacaaagcgaatgaatacccgaggcggctttcaggcggtcagcagcagcgcgtctcaatcgcgagggctctcgcgattgaaccggagctcctgctctttgatgaaccgacttcagcgctcgatccggagctcgtcggtgaggtgcttcagaccatgaagtcgctcgcggagcagggctatacgatgatcattgtgacgcacgagattccatttacccgtgaagtggcggaccgtgtggtcttcatggcagacggcgtcgtggttgaggagggtgcgccggatgacgttatggtgaatccgaaaacggatcgcttcaggacattcctttcccggtatctctgaggaatctatcagtaaatcaacgaacggcttccctttcctgtgggactgggaggccgtttttgtctctcatataagaccgtacctttcggctagaatagccgggtttccccaagcgggatttctcacctgaccgggtaccgacatatggcaaaaaaagagcttctctgggtccagctggcccgcgatcttgcgtacgcaattgcgaccggccgctatcccgtcgggacgcttctgccaaaggaactcgatatctgccggaagacagggctctcgcggcacaccgtccgcgcggcgctggatcatctgcagcgcaccggtctcatcaagcggacaccgcacgtcggcactgaggttgtcgcccggggcgcggcccgcggctttgcctatcggctccagtcgttcagcgatgtcgatatgatcggccactcgcatgcccgcgaggtctgtcagtcgattcacgtgaaagtcgataaggagaaggctcaggagcttgggcttcccgctggaacctcctgggtcaggcttaccaatatccgcgcgggcgataagcctgaggatccgccggttgtctgcactcaggtttttatcccggaagtctgggaggacgtggtcgcggcggctgcccgcgaaccggaaacactgatcgctacgctgatcaaccggatgcacggcgttgtttgcagcgaagtgaagcaggatgtctcggcggttgcgatgccggtcgatcaggcggcgtggcttcagtgcaagccgggagtcccggcactgaagatccggcgtgtttatctcgatgaatccgggaagccccttgaagtgtccgtgtcctggcatccgggagaccgctacagtttctcaatcagtctgcagcagaacgcggcggactgagaccggtccgcccgcgctttttccgataccccgaattcaaagattccggttcgcgatcaaaaagggattttcccggctgaaatccgggatatcgtcgaaatgcttcgcgaggtccacgatcgccttgacctgagcgtcatccaggatatcaagcgtcatcgtgcggaacttcatctcacactcttcccagctcaccctattctcggggtcccccttcggggctttgacctgagcggtgagaatttcgcctgacccgagctcagcctcaatccggcagggccagtttttcggcaccatggcgtcaagcgacggatcgtctatcacgtcagtgcaggagagcaggccggaaaccgccggatcggataccgcgtccgccgcgaaggacgcttcaacaggcgtgccgcggagaatcgtgctcgcgacgcagtaggaaatcgaaaacttggcatcccggcccgtagcgggcgcggtcttccctgcgatggaaagcgctgtgccgtacgtgtgaaccgtgagatgacggattgggtcgcccgggtgacgcgtgagttgctcacggatcgagagcgcggcgtcaatcgcggaatgcgtgtgccggcagcagggatagggcttgaaggacactgaagctgaacgccagacccggccgaaatcccggaagagatcaaaattcacgctctgccttgcgtagcccgcgaaaaagccctgcttcccctcgagaatatgcgtggcgcctgaaaatccgttctgagccataagtgacacgaggatgccgttcccggccgcattcccggcgtgaaggaatttgctcatcgcgccgtccggattgaattgccataaaccgcaggcgagggtgccggcgtttccgagcgcccactgcatctgctgattggtgagtccgagcatgcggcctgaggccgcggcggctccgaagacaccggcggttgaggtggtgtgccagatcgcgtaatgcgcgggggtgatggcggcgccgatccggagcatcacttcaaacccggcaacgatcgcagtgagaacttcgcgcccggttttcttctgccattcgccgagcgccatggcgcctggcatcaccacggtagccgggtgtgagatcgattcgcggtcgacatcatccatttcaaagatgtggccgaagtagccattttccatggctgcagtccggaggtcggttttatcgcggtttccgaaaacactggcctcggctttcccgccaaggagctccgcggttttttggatcggaacggccgcctggtcccgggatccggcaagagcgcatcccgtccagtcgaggatgtcccgtcgtatcaggtcgagtgcctcgggaggaatgctgtcatacgagaggtctgccgcgaactcagcgcaggcggctgacgggctgaagtgatccatcgttttttcctcaaacttgtcttgatcgctgaaacgtagtgtagtgtgagctctgatccgcggtacagccaagagttacccgggagaaaaaggacttcctgaaagtgcccgtttcattttctgaaataagggcacagtgtgttgcattaatatgtcgggaataggggaaagaaagatatcttttaatttttccgtataccagcagtaaccatgatccccaggggagagaaaaacaagtgaaagaatccggtgaagtcacgcgggaagagctgatgcttttcaccgcgctttgggagaagcgttcactcaccgcagcggctgaacagcttgggattcatcttccgaaggcttcgcgccttctgaagtctctccgggagtctttttcggatgacctctttatccgcatcgggaacacgatggagccgacaagaaaggcgtccgcgcttcttcctcgagttgcggcgtcactcgcctcgctggagcggctgtttgctgaaaatacgtttgatccggcaaagcttcgccgcactttcatcgtgattgcgaacagtcagccgctttcacgttttggccccgtgctgctcgcggatctcagccgggcgtcaccggggagccgtgttgtgtttcagcagcccggaagcgggtggagtgcgagactgtcggacggcagcgccgatgccgcggtgtcgcctgaaggcaatatcccgaacggttttatggagctgaacgcctcgcgctgccagtaccagatcgcgatgcggcccgatcatccgctcctcagactgcctgaaatcacggcttctgatctcgcggaatatccggaatgcattgtggaggcgtcccgcttccggggaaagcggtttctcgaggatggcagggcgtccgataaaacggtcgtgataccggatggactcgcggccccgggtttccttctcgcgtctgacgcctggatggtgtcctgcactctcgtgatccgggatctcttcaagccccggtatgggctcgctgctattcctttcccgaaggatttcaggcccttctcagaacccccgcttcttaagattgtgtggcatccgagaacggcttctgaccccgcagagcagtggttccgggggctgctcgaaaatgccgtgaagagtgcctgcggaaacgcaaccgcgtgacgcttaaattgctcctttcactttttgaaaggagcgattacgggattcccatctgccggcggggtatttctcaatactgtttttcctgattcattctcagaataattacctatgtggaattaatcaggcggatctgataggaataaagaactagatccaaaaaagcggttcccgggagccgagttcccgtaagcttgaaaacttgaacctgaaaaattcccccgatgccggatgagagtccggttttcggccacacacatgcaaggagaatgagatatggataaaaccgttatcgcaaccccggatgcgccagccgcaatcggtccctattctcaggggatcgccggaaacggactcgtcttcgtgtccgggcagctcccggttgacccgaaaacgggtgcgatgcctgagacgattgaagctcaggcacggcagtccctcaccaatctgaaagccattattgaagcctcgggcagctcgctcgacaaggtcgtgaagaccacgtgctttctcgctgacatctcggattttgccgctttcaatgccgtatacgcggagttcttcccgaaagacgctcccgcacgttcctgtttccaggtcgcggccataccgaagaacgcgaagctggaagttgaagctatcgctctgaagtaagccgcttcttcactggtcccggggccggtgacacgaagctccgggagagagaaattctttcggagcttttttcatgttgagtctcatcatcgccgcggtcacaatcgcgatcgtggtttacctgctcgtcaagggctattacccgcaggcagcgctttttatcggcggcctgattcttctcacctgcacctgggttttcggtctgggaacgctgcttcccgcgaagacgaccacccacttcggcgggtttgatgtcttcaaggtcttcagtgacggtttcgcgtcccgaatcggcggtctcggcctgatgctgatggcgatcggcggtttctcccgctatatggagcatgtcggcgcatcaagcgcgcttttccgtgtcttcgagaaaccgctgaagcatattcataatccgtacctgcttctcggcgcggccttcatcgttgaacagatcatggtgatcttcgtgccgtcgcacgccggtcttggtctccttctgatgtgcacgctgtacccgatcctcgtgcgttcgggcgtcagcccgctctcggcgcttggcgtgatcggttgctgccagttccttgacgtggggccgggttccggcaacgcgaacatggcggcacaggtcgccggtatggatgtctcggaatacttcgtctactaccagcttccgcttttcatcgcgctcgttgtgatcctcaccttcgttcatatgttcgtgcaggcctggtgggacaaacgcgaaggctggaaatttgacccgaagaatgtccagacgtttgccggtacaaaacccgcggttgatgtgaaagaagccccgaagatctacgcgattctgccggtgattccgcttttcctcatcatcttcttctcgaaggtggcgggaagcgcgatccgcatggatgtcgtgaccgccatggtgatttccaccgtgatcgcgatcatctgcgaactgatccggtaccggaatctgaaggaagtgctcgcgaccttcaagcttttctttgaaggcatgggaaagattctcgtgagtgtcgtctcgctgatcgtctgcggtgaattcttcgcgcagggtctgatcaagtcgggcgccatgggaacccttattacggcagctgaccaggcaggtttcggccttgccgcgatggtgatcgtgggcggcctgattctctggctcatggctttcatcatggggtccggaaacgcggcgttcttctcgttcgccccgctggttcctccgatcgcgaagacgctcggcgtctccaccgtttcccttattttcccgcttcaggtgctggtgtccttcggccgcgtttcctccccgattacggcagccctgatcgctatttccggtatcgccggtgtttcctccttccaggtggcaaagcggacctgcatcccgatgttcgttgcaacgatcgtgagctacgccgcgtacttcctcttctggtatcacccctgatcccgagcgctgcgcctgaggggctcaggtcccctcagcgcggccgatgaacctgttttctgatattgaatttttggagcaatgactatgacgctcaagcataactttgacgaaattgttgaccgccgcggaacgaacagctcgaagtggctcaagtatccggctgacgttcttccgatgtggatcgcggactcggatttccgctgcgcgcagccgatcgtggatgaaatgaagcgtctcgcggagcacggggtctacggctacccgtatgtgcaggaaggttcatttgagcgggccactgtccgctggtgccatgttcgctatgactgggattttgaggagagcatggtggactttgtgccttccactggcacagccctcgcggtcgcggtgaaggcgttctgcgaaccgggtgacaaggttctgatgcagacgcctatttatcctccgttcactgccgtcacgcagaagaatggctgcaccgcgtccaataatccgctcattttccgcgatggaaagtgggaaattgattttgaggattttgagcgccgtgccgcggatccgaagtgcaagcttttcctcctctgcaacccgcataacccgactggaaaggtctttacggctgaagaactcacgaagatcgccgacatctgcggccgccacggtgttgtggtgttcgcggacgaagtgcattcggatttcgtgcacgcgccgaaccgtcatcaggtcttcgcaaagctctctgaagcggcgaagaacatgtgcgtcacggcggtgaatccggcaaagacctttaatattgccggcctccggacgtcctccgttgtcacgatgaatccggagcttcaggcccggtatcaggcggcgctcgcttcctgcaagctgggccgcgagggcttcggcatcgcgggctacgtgaaagcctttacggaatgcgactattacgccgatcagctgcttccctatatccaggggaatctgcactatgtgctcgactacatccatgagcatttcccgcagatcggcgcctatatgcccgagggaacgttcttcctctggcttgactgccggaagctgccgttcaagacccaggctgagcttgaccggttctttgttgaaaaggtgaagctcggactgaatccgggtgatacgttcggtgttgagggtgagcggttcctccgcatgaatgtcgcctgcccgagagcgtactgcgaagaagccatgcgtcgcatgagcgcggcgttcgctgagctctgagaaacacggtttttctaagcaatactgctcaggtccccgattttcggggacttttttttgattctgtgtgcggtattacccgaggaaagaaggaaatcctcttttgattcgcccataatggattcaacagaaagacggcgcccggaggcgctgcgaattgaaaccgtttataagaaagagaggaacagcattatgcagaagcgagtttttctgaagacgatcgttgcggccgccgccgcggccgctgcgggcggcttcgccacgggctgcacgaagaagccggctgaaatcaaggtcggcgctacggcaggccctcacgctgaagtggttcaggctgccgcgaaggccgccgagaaggacggcctgaaggttcaggtggtcgaattcacggattacctcggccccgataaggccctggctgaaaaggcgctcgacctgaatgtgtatcagcatgagccgttcctcaagaacttcaacgcgaatcagaagactgatctcgttgcggtggctcccgccatcctgatgcggatgggcatttactcgaaccgcgtgaagaacgtgaatgagctgaaggacggtgccacggtcggtatcccgaacgatccgacgaacggcggccgcggtctgcagctccttgagaaggccggccttatcaagctgaaggaaggcgcgggcttcaaggcgacgctggctgacgtggtggataatccgaagcatctgcagttcaaggagctcgaagccgctcagctgccgcgttcgattgacgacctggacgccgctaccatcacgatgaactacgtgatgtccgcaggtcttgatcctgcgaagcagggcatcttccttgaagacaaggatgcgccgctcgctctgatggtgatcgctgcccgtccggacaacaaggattcggaagcggttcagaagttcgtgaaggcttatcactcggatgaagtgaagaagttcatcgccgataagtacaagggcaccattgtcccgggctggtcctaaagtccagagccggtaaggcaggaaagaccgcggaactgaatattccgcggtttttctttatccggattttttgccggtgaaggtgaaaagcgcgagcgaagcgaagatcagcgcgattcctgcgtaggcgggaagagacaggcgttcgccgagtacggccgccgcaagcagcgccgcaaccaccggttccagaagcgaaatagcaatagcggtgcttgcccggacccgttcgagcccgtatccgaaacagatatagccgataaacatcggaaccacggccatataaaggccaacagcagcattctgaaccgagtgcaggaagggagatcctgtcgcgaggagaaccggaagaaggagcagggcgccgattccgaattccgcgcccattgcggctcgggacggaatgccggagagcatcaggcgccgcgccgcgtaagagtaataggcgtacgtaaaggcggcggcgagcgcagccaaaacgcccgccaccgggtgccgaagcggtttcggctccggactccagtgtgatgagaaggattccgatgattccagccgcaacgccggctccccaccggacaccaggcgcttttccttccgctgcccattcaatcgcgcctgagaaaagcggggcggcgccgatcgaaatcacggtaccgagagtgacaccggcaagtctcattgagccataaaacgcgatcgggtagagagcgacagagagtccggctgagagaaggagcgcggagtgccgcttaagcagagcgcggttccggcggatcagggggagaccgcggagcgcctgcaggagccctccccctcccatcgccgccgcagcgatcgcggcggcagacacttcaggagcaaaagcggccgcggtccccgtcgtgccccagagaagggacgcggcaagaacgccgagaattccgagaaagtgagtgctgctttggataggcattccgcaggaaaaagaaaatgaaccaaaactcctattctagtaagggtcaggcaggatgaaaaatcagtctgcgggaactgcgcattaagtacctattttttatcggaattactcccgggttttatccttgaaccgtctgaaaagcccggaatccgggcatcttcgatgtaccacgtttttggtataaaagaatttatttgaaaaaataaattggacaaaaagaaaaatccacgtataattcaaatcctgttccggagttgtagctcagcttggttagagcgacggcctgtcacgccgtaggtcgagggttcgagccccttcaactccgccacaaaattccgaaaaggcgaactttacaaaagttcgcctttttttcttatcttcggaaggcgtcaggcctcgccggccttccatcgctggggaatcaaggatccatgcttcagggtttccgcaaacataagcgctggatgatggcgctgatcatcggcccgatttcgatcgccttcgtggcgacaggcatctatagctattcccgctcgaacgaaggggacaaggcgctcgctgaagtcggcggctccaagatcacccctgaagagttcgatcagacgaagcgccaagagctgcagcagctccagcagcagatgggaagcaatttcaagtccagtattcttgataatcagcaggcccgcgccgcgctgcttgaccggctccttactgaacacgctctcgcggctgaagtcgcgaaagaaggtattctcgtctcccgcgagcaggctatcaacgtgatcaaaacggcctctggcttccaggtgaatggcaagtttgatcccgagctctataagcgctacctcgcgagccagggtaagactgacgaaggcttcgtgcaggaacttcagcaggacctcgcccgccaaatgctcctgaataacattgtgcgcacgacgatcgtctccaagtcttcagtgaatcagctgaatcagctgctccgtgagcgccgcgaagtgcgtctgttccagattcctgcggcccgctttatccagacggttcaggtctctgacgcgcaggccaaggcttactacgacagccacaaggctgatttcatgaaccccgagcacgagaaggtggagtacgtggtgctcacgccggatcagttcgtgaacacgaagccgactgaagaagacatcaagacttattacgagcagaacgcgaagcagttcgccgcacctgaggagcgcgaagcccgccacattctgattggcttcggaagcgacgagaaggccgctgaaaagaaggctgaggcgattgttgcccagctgaaggctcatccggatcagttcgccgctgtcgcgaagaaggaatcgatcgacccgggcagcgccgagaagggcggtgacctcggctggttcggcaaagggacaatggttcctgcatttgaagccgcggttttcagtgcgaagaagggcgatattgtcggcccgatccgcacggaatacggcttccacatcattcaggttcaggatgtccgcggcggcaaggttcctccgctcgctgaagtccgctcgaagatcgaagcccagtacggccgtcagatggctcagaagaagtacgctgaggcggccgacggtttctcgaacatggtttacgagaacagcagctcgcttgacccggtgatcaagaagtacaacctgaagcccgtgatcgttgaaaacgtcacgaaggccggtcttggcaacacgcctgacgctcagtatctgaatgagcacatgattgagcttctgttctcgaatgactgcgtgaacgagaagcgtaatacccaggcgatcgaagtgaagccgaacgttctcgtgtctgcccgtgtgcttgagcacacggctgcggcccagatcccgtttgatcaggtgaaggctcagatcatcgcgaagctgaaggcggacgccgctgtggcagccgccaaggctgagggcgagaagaagcttgccgcgctccgcgcgaagccggatgatgctggctttacggccgccgcctgggtttcccgtcagcagccgatggggcagcctccggaactcgtttccgctgaactccgtatcccggcctcgaagcttccggcttatgttggcacaacgattaacggtgtcggttatgtgattgcccatgtgaccgcgtctgacaccccgaaggtgacggatgacgaactgaaggacgccaaggccgaactcgcgaagctgcatggcggggcggatatggatgcctatatcggcggtctgaagggagttctcaaggccaaggtgctgaataaggattacgtctacccggcgaagaagggctccgctccggcttcgtccccggctgcgaagtaattcctgaagggatagccggaaccgcaggctgcggctccggccccaataaaaaatgcgcttcagatgaagcgcatttttttatgcatccgcctggggctgccaggcgggtgggtacctctatatcagtgacggactttgccgatcatctcaaccggagcgggagcaagctgtcccggctgcagagcgatcgtgccaaccgaggaaagcggatcgcttccggcctctgcccagcggagcttcgcgcggcgaagcatgccgagagcggtcgccgcgcggctcgagagctcatccgcgagcaccggcatagtggcgcactgagctgcggccccgtggagccagaccgcgccgagcacggcggtcgtgaggtcataaccctgagcgataaaggaaccgatcatgccggaaagaacgtcaccagtgccggcggtcgcgagcgccgcggagccggtcgggttcacccaggcgtggccggaccggagggacaccacagtgccagtccccttcagcacaatcgcggctccggtctggagggccagttcgcgcgcccagaaaatgcggttgctctgaacctcttccaccttgttgcgaaggagtttcgcggcttcaagcggatgaggcgtgagaaccgtcatggcgcggcgggtgaggagctcttcctgaagctcaggcttctcagcgaggatcgtgagggcatcggcgtcaagcacgagcggggtatcttcacagtgaatggcgtcaagcagacgcttcacggatttttcccctgtacccatgcccgggccgaccacaagcgcggagaaggacgcaaggtcaagcggcgactcggcaatcatgagttccgggcatcccgggtcaaccgccggagcgtctgaggcgagaaactcggtcttcacgcggcctgcgccaaggcgcagcgcagcgcgtgaggcgaggatcgcggcgccgatctttccgtcatcaccgcccacaatggcggcggttccccaggtccccttgtggcagaagtggggccggggttcaagaatgtggccgtaatccgcttcatcaatcagtccctgaagcggaagcgggatcgagacatcgagttcggagaggcagacgtgccccgcggcgtcacggccttcattcataaagagaccggcgtgagcggagagaagggcgatcgtcatatccgagcggcagccctgaatacggccgttccagttaccggtttccgcgttcagtcccgtcggaacatcaatcgacaccttgagggagttctgcacgttgtaccagatcgtggcgtcaaggatttcgccgcggatcgggcggtcgccgccgatcccgagcatcgcgtccaccacgatatcggctttcccgagggaatccggctcacggacggtcttgccgcccacagcctgccaggccgcgaaagcgcgcttcgcgtcctcagccttcggttcatccccgccgaccagcacacagatcacgtcgtggccccgggccttgaggcagcgggcagccgtgaagccgtccccgccgttattccccgtgccgcagaggatcgtgacgcgtcccttcggaggaagctcgcgctcgaggcgcgacgcgatgtcctgacccgcgcgctccatcagcgtgccggattcaagaacagaggcctggcgccgctcaacatcccgaaggtcgtcgagtgtcagtagggaaatggacatgctttttatctccttaatcaaatgggtgctgcatccggccgtggggcgctgcgcttacgcgtctgatgccgcgcggcttcgggatatctctttatttctctgcaaaccgtcccggactgcagaaggccgcgaattcgcccggatcctctcccagggcggaagccgcggcgatttccgcggattctccggctccggcaagcccgaaaggaccgtgggcaatattcagaatgacgttatccgctcccggcacagggccagccagcgggaagcggtcaggggaggcgagaaattcaccgctccagaactgtgatgccacagtgttggatcgcagattttcaaagcttcccataacggcgtcataaagccggttacattctgccttcttttctttctcggcgggagagccaaggaagaaacggccggtcgcgcgaagccgccggtcgagccttgagaggataaatcctttttcgggcgaggcaaccgtgagagccgggagcgcttccgagtcgctgagttccagtgtcagcgtgaagcccgtgagagacgtaagcggtgcccggaagccggttccggaaatcaaaggcagggcgccgcccgctgaggcgaggactacagcgtcgcatgggatcctttcgttcccgctgatcgccaccgcttccgcgcgtcctccgcggtaaataatttcctgagcctttgcccgataacggcgggtaaatcgcgggccgtacttttcagcgatccgctgcagaagaagcttcgctgcgaaagtggcgttgaaagtggaatcctctgggatcagaagggaggctgcgaaggcaagcgacggatcgatgagcgggaagcgttcaagcgtcgcttcccgggaaaggagctcccggtcagggaatgtttcccgcatcagagcggtttccgcctcggaaagcagcatcagcgaaccgtcaatccggccatccgcgatgccgaattccgcgtgcagcttccgcgtgccggcgtcagacgcctgaacgaaagcctcgaaccgcttcagattttcagcgaaggcggggttcgcggcgctctgtccggccccggtcagaaacgcgcggttcctcatgcggtctgagacgccgtccgcgataaaaaccgaatcatctggcagctttcggaatgaagagaacttcttcatatagaaggcgggatgaaaagcccaggccgacgcgaggaaccctggcgcgtaggaaagcccctgcgtggggccggacgccgattcgagcagcgtcacgctgcatccacgacgaaggagcgactcgcatgtcctgatacctgaaatgcccgctccgataactgcaacccgcattgactttcctctgaattccagggctttcacccaaaaccgctcaattctaatagaagcggcctccccaggaggcggaataccgagaaaatccttccctctctacccacagaaaccgggccgccctctttataatgtgggcaatcttttttcccaccaactcgcagtccggcttcccgcccgaatcagggcgcggcggccggcagaggcttttgtcgatgactacatccggatgcatgtttgcgcttgaggcttcgagcgcgctttctgatttccgtgccgagcggctgcttgccgatctgaaatccgtctatcctcaggtgaaggcggtttcaggccgttacattcactttgtacacgctgcccgggcgctcgaagagcaggaagtgtcccggctccgcgcgctgctttcttatggctttgagggagcggatgcggcggctgatgccgagttcctcgtgattccccgccttggaacgatcagcccctgggcttcgaaagcgacagatatcgtccataactgcggcatgactgaagtgctccgtgttgagcgcggcatccgctacgcggtcgcgtttgaaggcgcggcccccgcttctgacattctggaagcgatcgcctctaagctccacgatcggatgaccgaatccgtggtgccttctgacttcccggttgagaagctcttcacggagcttcccggtaagccgatgagcgtgatttccgcctcaaccccggaagaggctcaccgtgagctcgcccgcgcgaacgccgaaatgggtctcgcgctttctgacggtgaaatggattacctggagaaggcgttcgaagccgaaggccgcggtccgacggacaccgaactcatgatgttctcgcaggcgaattccgagcactgccgccacaagattttcaacgcctcctgggtgatcgatggaaagccgatggatcagtcgcttttcggctacatccgcgcgacccacaaggcgcacccggaaggcacaattacggcatactccgataacgccgcgatttacgagggttccgaagtcccgcgtctctatacgcgtccggcaaaggattctccctacggacagtacttcacggaagagaacgaactgacgcacacggtcttcaaggttgagacgcataaccatccgaccgcgatttctccgttcccgggcgctgccaccggttccggcggtgagatccgtgacgaaggcgctaccggccgcggcggccgtccgaaggccggtctctgcggcttcacggtttccgcgctccatctcccgggcgctgctcagggctgggaaaacgattccgacgtggtgacgggcgagaagacctcccgcgcctacggcgcgccgtcccgcatcgcgacgcctctctccatcatgaaggaaggtccgatcggcgccgcggccttcaataacgaatttggccgtccgaatattgccggctacttccgtgtttttgaggcgaacgtcggcggcatccgctacggctaccataagccgatcatgctcgcgggcggtatcggcaacatccgtaatgacgaaacgaagaagctcccggttccggtcggctctctgctgatcgttctcggcggcccgggtatgcgtatcggtcttggcggcggtgccgcgagctcgatgaccacgggctcgaactccgaagcgctggactttgactccgtgcagcgcggcaacccggaaatggaacgccgcgcgcaggaagtgatcgaccgctgctgggcctgcggtgaaaagaacccgattctcgcgattcatgacgtcggtgccggcggtctttcgaacgccatgccggaactcgctgaaatgtccggccgcggcgcccgcttcgatatgtcgaagatcccggttgaagaatccggtatgagcccgcttgagatctggtgcaacgagagccaggagcgctatgtgatcgccgtgctgccggaagatcttgatcgctttgatgtcttctgccgccgcgaacgctgcccgtacgcggtgatcggccacattgccgaagacggccgcttgattgtgtcgaagcctgaagagaagcaggacccggtgaatatgccgatggatgtgcttcttggaaagccgccgaagatgcaccgcgatgtgaagcacgtggaccgtaagcttgaacctgtggcgctcgatggtgttgagctcgcgaaggtgctgccggaagtgcttcgtcacccgacggtggcttccaagtccttcctgatcacgatcggtgaccgagcggtcgggggtctgacgcaccgcgaccagatggtcggcccctggcaggtgccggtgtctgacgtcgccgtgaccgcgctctccttcctcagcaataagggcgaagcgatggcaatcggcgagcgttccccgatcgccgtgatcaatgccccggcttcctgccgtatggcgttcgctgaagcgatcacgaatatcgcggccgctgatatcgagcttccgaccgtcaagttctcggcgaactggatggcttcctgcggcagcgaaggcgaagacgcgaagctttacgacgccgtgaaggcgacgagcgaattctgtatcgctctgggcgtttcgattccggtcggcaaggattcctgctcgatgaagacggactgggaaaccgagtccagcgaaaagcgctccgtgacgagcccggtctcgatgatcgcctcggcttccggcccggtgcgcgatatccgccgcacgctgaccccgcagctgcgcccgaatgtcgcttccaagctgatcgcgatcgacctttctgaaggccgtgagcgtcttggcggctcgatcctcgctcaggtgatccagagcttcggtgatgaagcgccggatatggaatccgctgagaagctgaaggcctttgtgcgcgtgatccgcggtctcgcctccgaaggcaagatccttgcttaccacgaccgttctgacggcggcttcgcggcaacgctcgctgaaatggcctttgccggccactgcggtgtgtccgcggacattgcctctctgacccgcggcgactctcacgatccgaaggaaatcctccgcgcgctctttaatgaagaagcgggcgctgtgattcaggtgcgtgatgaagacgccgaagccgcgatggcggccttccgcgaagcggggctggaccacgccgcgttcttcatcggcgctccgaagaatgatgaccgctatgtgattcttgtgaacgggaaggaaatctacgccgagacgcgcgccgcgctgcagaaggcgtggactgaagtctcctggcagattgcccgcaaccgcgataatccggaatgcgcggacgcggaatacgcccgtatcgagaatccggaagataccggtctctatatccacacgacgtttgatcctcaggataacgttgccgctccgatgatcaacctcggcgcgaagccccgtatggcagtgctccgtgagcagggcgtgaattcgcagcacgaaatggccgcggctttcatgcacgccgggttcgaggtctgcgatctgcacatgacggatctcctttccggccgtgtgagtctcgatggtctcaagggtatcgcggcggccggcggcttctcctacggcgacgtgctgggtgccggcggcggctgggcccgttcgattctctttaacgagaagctttcggaagagttcgcccggttcttctcgcgttcggacacgtttggcctcggtatctgcaacggctgccagatgttctccgaactgcacagcctgatcccgggcgctgagcactggccgcgctttgtccgcaacctctctgagcagttcgaggcccgcctcgtgcaggtgaagattgaggaaagcccctcgatcttcttcagcggcatggccggttcttcgatgcctgtcgtgaacgcacatggcgaaggccgtgtgctgtggcgtgatccggcggatgccggtcaggcactcgttgccgcccgctacgtagacccgcagggccgtccgacggaaacttatccgtttaatccgaacggctcggctgccggcgtgaccagcgtaacgactcctgacggccgcttcaccgcgatgatgcctcaccctgagcgcagccaccgcgcggtgcagctctcctggggcgaagaggctctggatggtgagtggagcccctggatgcggatgttctggaacgcccgccgctgggttggctgaggcacagccttctgatgaaccggtccggaatcccggaccgggatcagcgaaagccaataaaaaagcagcagattttcatctgctgcttttttattactgcgccggccggggcggtgccgccagccggggggagttcagatctcagtggatcttcgccttcgcgacaaggccgtccacgtaggcgttcacgcgctcacgggtcaggttctgctcgatctgcagcttcgcgcggtcaaacgccgggaagagttcagcaggacgcgactccatcacctggagaatatgccagccgaactgggagtgcacgggcttcgcgctcacggcaccgaccttctgagtcttcatcgcgtcgccgaacggcttcaccatggagctcggggaggcccagtcgagatcgccgccgttatccttcgtgccggtgtcgatcgagacgtccttcgcgaccttcgcgaaatcctcgcccgacttcaggcgctgcaggaccttctccgcgtcagcctcagagctgacgaggatgtggcgcacgtgatactcagtcgcgccgtaagcggccttttccctatcgtaagcagcgcgcacttcagcttcggtcaccgggtgagccttcatgtacttcgcgatcacagcctgcgagaggatattgttcttcgcctgacggagagcggagcgcacagcggcgtccgtcgtttcaagcttctgcttggcggcttcctcaaggagcacttcctgagcgacgagagcgtgcttcacgttctcttcaagctgaggcgtgcgctggttgccctgagcgacggcgccctgaatcaggtgctcctgctcggcagccgtgatcttgtggccgttcacggtaacgtcagagacagcggcgaacgccggggcgctcgcgaagatgacgccggcgagaatggcggcggtggctttcatttgcattggaatgactccaaaaaaaacagatggtttggacagagggttaactcttctgtccggaattatttcggtgcggcgtcgcttttcacgttgtcttcaagagactcggggctgtatttcgcgatgtagaaacccatcgcgagcgtgaaggcgagcgtgaggccaaggaggccgaaaagcttgaaattcacccaggcttccgtagagaacgagtaagcaaccgcgaggttgataaacccgaccacgatgaagaacccgatccagcccttctggaggtttttccagatgttggcgggaagggcgatctgagcgccgatcagcttatgaatgaagttctttccggtcatgctgccgtagatcaggatcgaggcaaagacccagtagaggatcgtaggcttccacttgatgaaaagcggattgtggagccagatcgtgaggccgccgaagatcgtaacgatcgcgagcgacagccacagcatgacttccaccttcttgccgcgcagcagcacaaaggcgacctgcaggattgaagcgacaatcgcgaccgaggtcgccagaatcacaggcgcctgcatgggatcgattccgctgcccagcagccggttcacgattcccattgtctggtcgatcttcgcttcagaaatcttgaaggagaggaagaaaaggatgaccgggaaaaggtcgaaaagtagtttcacggatactgctccgaaacgccggctgaaacaccttcagccatatagagagagtgaaattagcacattcagcgcggatttgcgatttccgccgcatgtaaaggcgtgacaaaacgttgcggtgcgctaagatggaggactcttacgtgcaaggcgaaccggcggcttgttcccgtctcccaaaaggagtgtctggggatccgcagtcgccgggaagaaatgactgcggagggtgcccaggatccgtcctgatgagatctcctccgccgcctcttttttcctttttcttatgagatcgatacttaagttcattatggttactggttctgcagtactgggtcttgcctcggctcccgccggggcggccgctcagccggcttccgagcccgtccgcgccgtgaaggccgcggtggtggaaggaatcactgagtacacccttccgaacggtctgtccgttattctcttccccgatgcgtcaaaacccactgccaccgtcaatatgacgtacaaagtgggctcccggaatgagtcctacggagaaaccggcatggcgcatctccttgagcatctgatgttcaagggatcgaagaatttcccgtcccccacgaaggaattcacgcgccgcggattccgcatgaacggatcgacctggctcgaccgcacgaattatcacgtgtcctttacagcgacggatgacaacatggactgggcgctccgctggagcgcggacgccatggtgaattccttcatcgcgaagaaggatctcgattccgaaatgacggttgtccggaacgagtacgagatgggcgagaacgatccggtgagcgttgtgctgaagcggatgcagtgcatccttttcgactggcataactacgggaagccgacgatcggtgcccggagcgatattgagaacgtgaagatagagaatcttcaggcgttctatcaccgttactatcagccggacaatgccgtgctgacggtttccggcaagtttgatccggctgagattcttccgaagattgagaagattttcggcgcgattccgcgtcctgagcgtaagctgcctgaagagtggactgttgagccggtggctgacggtgagcgttccttcacggtgcgccgtccgggtgaggcgaagtttgtcgcggtcggctaccgggtgccggcttcaaacgacccggatttccaccgtgtggcgctcggtgtctcgatcctgactgacagtccgaaggggcgtctctataaggctctggtcgacacgggcctcgccgaaaaggtgtttggtttctcgatccccggaaaggatccgggctttgtcttcatcggcgcgcttctcaagaagaccggagatgaggcgaaggtgcgcgacgccatggtgaagacgcttgaagagtccttcagcgaaaaggcgccgaccgaaagcgaaatgaaggtggcggttgaggacgagcggacggattatgaccgcatgttctcggaccccgaggagttcggcgtggagctttccgagtacatcggtcagggtgactggaggctcttctttatcggccgcgatgagcttgccgatatgacgcctgaaggtgtggcaggcgccgtttcccggtactttgtccgcgataaccgtgtggtcggcatgttccttccggagacggcccccaagcgtgccgcgatgccgaagcgtattccgatcgaggagcagatcgcgtctcatcacttcaatgagaagggcgaagaggctgaagcgtttgataactcgcagcagaacatcaacgcccgcaccgaagtcgtgaagaccggctccatgaagctcgcgcttctcccgaagaagaaccgcggcgagacggtgactgttgaaatccgtctcaatattggaaatgacgcggcgcttaaggggaagcagctcgagaagacgcttctagagatgatgctgacccgaggcacgaaggatctcacgtatgaagagatctcggaccgctttaccgctctcaagattgacggcgatattacgagtttcacgacggaccgcgctcatatcgcggacgctctccggtttgtgggcgggctgatgcgtgacgcctccttcccgaaggacgaattcacgaagctcgcacgtcaggtggcgacctccaaccaggcgaagctcgataacccgacgacgctcgcgattgacgcgatgagccgccacttcagaacctatccggaaggggatgcccgaaaccgtctgacgagtcaggaaatcgtggaccgtatcggttcgatgacggatgaacaggtgaaggcgttctatgacagcgtcttccagaccgcgaccgcggatatcgcggtggtcggcgactttgatccgaaggaagtgaaggctgcgatcgctgattccttcacgaagaagtcagagacgccattcgtccgcgtggattccgagtaccgtccggtggctccgaagcggatcgtgattgatacgccgcagaaagagaacgccttcctgatggcgcgccgcgatttcgcggcgaacatggatgatccggatgccgcggcgctgatcgtggctgactggattatcggcggcggttccggcctctcgaaccgtctcgcggatcgtctccgtcagaaggacggtctctcgtactcggtttacagcacgatcgttctgaagactttcgggaaccgcgcgagctggatcgctctcgcgatcacggcgccgcagaaccttgcgcatgccgagagtgacatgcgggaagaatttgcccgtgtggcaaaggatggtgtgacggagaaggaagtggaggaagcgaagaagggccttcttgaatcccgttccgtcaaccgttcccaggacacgatgctcgcgaccggctgggtgagctatctcgccgaggacgctgactggacgaagagccttgagctcgataaagccatcagccgcctgacggtggatgatgtgaaccgcgccgtgaagaagctcgtgaagacggatgacttcacgtttgtcctcgcgggtgacagcgcgaaggcagcttccgaaggcaagcccttcacggagctgaagtaagcaagtaaaacgcctcccgaatcggggaggcgctgcataaaaaagaagggagacaggctttgcggcctgtctctctttttgactgtgacagcggttttcgctgttaaccgagcgaggtatcgagcaccatcatgagcaggaatcctgccatgacagcgagcgtggagtcgtggcgcttcgagtcgagatgggccgcgggaatcagctcctcaaccaccacgaacatcatggcgccggccgcgaacccgagaagccagggcatgtagggctggatgaaggatgccgcgaaaaccacgaggatgccgaagatcggttccacgatcccggagagcgacccgccgataaaagctttgacgcgcgactgaccggcgtctttcagcgggagcgcaacggcggcgccttccggaatattctgaattccgatgccaagcgcgagagcgcctgcggcggaaagcgtgctcgcttcgcccgtgatcgcggccatcgcgaaagcgagcccgacagacattccttccggaatgttgtgaagcgttaccgcggcaacaagaagttctgtacgcgagtggttggacttcggtccttcaggggaatcctccgccggatgccagtgggggattgtcttatccatcagaagaagaaaagcaatgccaagcacgaagccgccggtggcagggagccacggaatagcgtctttgctgctcgcttcaagggatggaatcagaagactccagacgctcgccgccaccataatgccggcagcgaatcccagagaaattctctggaacgcgggactggattcttttccggtgaagaggacagatgccgcgccaagcgtcgtcatcagaaagcagaacccggtgccgagcgctgccatctggagtacgagtgaaaaatcggacataaccgttctctaaatgttaatgataattgttattatatgaacgcgaaaaaaagacctgaggctttttgcggaaagaggggatggggagactgaatggaataagagcggcgcggaagataccgcgccgcccttggtcactcaggcgaatccggagcgttttttcacttcttcaggcttttcactgcggaatccgcggcgacgtaacccgagataatggcccaggaattcatcatggcggtcatcgagtcagcgccgttcgcgcctcccacaacgcagccggcgccatagagattaccgatcggctttccgttcttcttcagaatctgcatgctgccattagccttcagaccgccgagcgtcgtgcagaagcggactttctgctccacgatgtagtaagggcctccggcaagcggcttcagcactttgcggccgaaatcagcgtcctttccggccttcacgaaaccgttccagcggtcaacagtcttctgcagctgcgcggggttgatccccattttcttcgcggcttcagcgagtgttttaccctcagccatgacggggcggccgttgttcacgatcttttcccacttgtagagatcggcttcggacgcgacgagcttatcttcgagtgacttcgcgacgtattccttccaggcggcctgatccatcacgatatacatgatctggcctttctgggccttcgtgacatcggtaagtgttccaagtccctgaagctcatcaacaatgcggcggccgtcagaattcacgtagatagcgcccgacttcttcattgtgtcggtagaggaggcggtggcggcaagaccgtgatgcggagtcgtttcgacgccctgcgggtactgcttcacgaggtccagattgatcgtcccggccccgatctcgcggcccattttcagaccgtcgccgctatcggagtcaagaccgtagaagagtccctgagcgaccttcttcgggagcatcgagcggtttgcgccgtagccgccggaggcgagaatagtcgccttttcggagaagttcacataggcaccgtcagcgagacgcgctttcacgccgatgacattgcctttcttatcgaggatgaatttctgcgcccgggtgtccgtcatgatgacgccgccgtgcttcttcagctcgttgctcatcagacggaggaagttgacggagcgaccctcgacaccgagctgacggttagcggagtgatccgggtactgcgtggcggccggtccatacggaatcttcaggtcatcaatcagccagtcgaccactttgcccgcgttctgcgttgtcatgtgaacgaggaccggatcattcttgtttttgccggccttcatgatgtctttgtaagcgagctcggggctgtccttcgtttccttcatcacctcacgctgatagcgggagccggtggcgatcagcgtgccggcgttcagctgcgtgtcgccgccgatattcggcatcttttcaataaggatgaccttttcgccgagagttgccgcacggactgccgcggtgatgccgctcgcgccgccgccgatcacgaggatgtcagtcttgatttctttcggagccgctttggcggtcttcttcacaacaaccggggctgtcatgaagtctttatcggtgccgccggctgccttgatagcgttcctcacggcttcaagaattccgcggctcgtgagcgtcgcaccggacactgcgttgagtttcagcgtgttcttctcgacaatttccttcggaagaatcctgagcgcagagtctgaaaccccgacggtttccgtctgcttggtgattttgacatcagcgatctttccgcccttgaacgtcacggcagcggtaatctgaccgccgcggccgttcccggttccggtaaaggttccgtccttggcagcggctccagcgccactcgcaacgcaggccgcgaccgcggctgcggtcagtctgagagcaaatcctgtattcacgccaattctcctttgaggtgttttcataattccctgttttaattaatgaatcacttaaaacagggcttcgtgaatccctctcagtataggctccccgctatgggcgggggccaggcgtgcttccccttaggatgatgggcttaatgtgtttcggaaatatcctggggagtatttccggacggggtctgattcttggtatccgcagtggtatctggggaggttttcgggattccgcccttcggaagcttagtgacaagcagctgatcaacgcggttcttatccacatccaccacttcgaactggtagccgccgaacgtgagcttatcggttctcttcggaatgcggcggagaaggaacatgacgaggccgcccgcggtttcatacggcggattgtcttcaatatccgggaggtcgaacgtgttctccagttcgtagagcgatgtggagccttcaacgagccacgagttttcatcgcgcttcacgatctgggcgtcttcatccaggccgaccatttcgcccatgatggtgttcatcacgtcattcagggtaatgaggccggccacttcaccgtactcattgatcaccaccacgaagtcagccatggtgttccggatttcttcaatcgtttccgacatggagaggctttccggaatcattttcacggggctgaggagacctttttccgtcagatccagacgtttcccctgaaccaggcgggtgagaagctgcttgctgtccacgtaacccgcgacgttatcgatcgttttttcgcagacgaggaactgatgatgcgggttctgaacaactttggtgcggatgctttcgtcgctctcgtttttgaggaagtagacgatatcgtcgcgcgccgtcatggcagtggaaaccgtccggtcttcaagcgagaagatgttttcgatcacgctccgctcttcaggatcaatcacaccttccttgacgcccgcgtttacggtcgcgaggacgtctgccgtcgtgacgcgttcaccggcgtgcgtcggcatgccgagtttcttcatcgcgaaagtggcgcagctgttcagagcccagacaaccggtttcagaaccgagttcagccaggtgatcgggcggatcacgaggatcgcgcacgactcaggacgcgccatcgcgtagcggcgcgggatcaggtcagcgaagagaacgaagaggagggtagcggtgagatacgcgagccagaaggctgcggtgtcagcggaggattcgctgagcacgtgaatgaatgccgatttgtagagagggatgaaaacatcctgcccaagaataccgccggcaagagcgagggcattaacgccgatctcgacgatcgtaaacataggtccgggattagccttaagcgcaataacttcccgggcgcgctggtcgcctgcttcggagagcccctgaagcctcacattctttgcggcggcgagtgaaatctcggaaatcgagaagaacgccgagcagaggacgaggatcagaagcccgaccatctgtaaaacggaatccataaaagaagtcccttctggttaaggtgtttgaagaatcggaataggctgagactccagaaaaaggtcagggccgcgggcatggagcccgctttcctttcattctaatggtaaatccgaatgcggcaggcgcccgtatcacgaatttagggtaagagaggcggaacgcctcagaatggcgatcacggcatttgccgctttttcgagcgattgagcggggatgcactcatagataccgtgataattaagtccgccggtaaagacattcgggcagggaagtcccttcgcggagaagaaggcgccatccgtcccgccgcggaccggttcttcaatcggttcgattccgcagtcgcggtatgccgcgtgggcgaggtccagaatattttcgtgcccggcgagatagtcccgcatgttgcggtactgatcctgaatcaccacctgcgcgggagcggcgcggccggtgtcgaaattctgcacgagcgccgcgagccacatcttgcggtcctcaaaggcgccgcggtcatggtcacggatgatgaggatcacttcggcatgctcaacgccgcccgagatcgagatcggatggaagaagccttcatgcccctcggtctcttccggagattcagattcaggaaggagagaaatgaatcgggcggcaagcttcgccgcgtttaccatctttcctttggcggaccccggatgaacggaaattcccgtgaaggttacccgggcagtggcggcgttaaaggtctcgctttcgagcccgccgacatcgccgccgtcaatcgtgaacccgtatgaggcgcggagccccggcacatcaacagaatccgtgccccgcccgatttcctcgtccggcgtgaaaagaatccggatttcggcatgcgggtcttccgggtgagtgaggaaccactccgcggcgttcatgatagcggcgacgccggctttgtcgtccgcgccgagaagtgtgcggccatcggtgcagatgatgtcttccccgatatggcgtcggagttccgggaatacttccggatccagccggattttgttttccggatcaagcgcgattgcctcaccgttccaggcctctgccacctgaggatgaatgccttcgcaggaggcttcaggggacgtatccatgtgggaattgaggagaatcacaggcgctttttcagctccggacgacgcgggaatcgtcgcggtcaccacccctttctcggagagtgtcacatcctttgcgccgagtgcccggagttcagactcaaggacccgcgcgagatcaaattcccgtgcagcgctcggggaggctgcgctttcaggatctgaacctgtcgggatcagcgcgtagcggatgaaacggtcgagtagaggtgtttttttagcgtaatcgttataggaaacagggtaaaccatcctgcagttgccttattgatcagatgtttggctgcgcggcacggcggtgagcggaacggtagccgcgaagcgacgtacgttcgaaaccgggcttcgctttgcgggcggtctttgcggtctgagcggcaggctttgtagacgctttggccgaagtcttgacagcctttgcctgcggtgcctgacgggcaggaatcacctcgttcttagcgagcacatagcggtgacgggtcgacttaacgctgttcttcactgtgttcgcgggacccagacgcgcgggttcggattcaccgagagcaatagcgtcaaaaagaggatcaatcgacgtatcggcttcagcgccgctgccgaaatcagtcggatccatctgactcagagccaaagaaatctcgtccgcggaggggaaccgttccgggagacggagaccgcgcacgtggcggatggtcacgattctcggggcccagtattcattcagcgtgctttccatcacgttctttccggtacggggagcgtgaatgaaacgggaggggccggtgagaatgccggtatgaagtccagtggcgccgcggcctgtgcggaaaataatgatgtcgccgacatgggcgtcagaaagcggaatatcctctccaaccttagcgagctcagtcgtcgtgcggggaagattcacgccatgctggcgatagacccaccagacaagtcccgagcagtcgaaaccgctgtcaggttcttcttcgccgtagcggtacggcgttccgagctgctgcttcacggttttgacaatcttgagtccaaatttggtcggcgcgggagcggcatcagcatcaggaagcggcgcgggagccggtgctgcggcaggttccgggggcgtaaagaagatgaagaaaagcggatcttcagtgtcgtgcggagtcgctgacgcgggcagggcgaaaaaggcgctgccggcaagaatgagcaggatctttcctgctatcggggctaaggtttttgagtgcatgttttcccgactttggtttgaggtgctgaggcgaaaaacggagactcccgttttctggctatttattttagatgagtctgtcgtccttcggggatttggcctgaatttctatcctgaattctccggtattaccatccggaaccgatttgacccgtccgaaaaaggcccctttggagagcgcgccggggagaggatcgtcagacgaaacgatgagccgcgcgatcggacggtagtgaccgtggaaaagcgtgacgacggacgtctttttatccgcagatgtcccggagttacgcggctctatgaggtcgccgggtctgacgtgcagcgtgacgtactcccgatcaaagtcagagggtgacgcggcaaggctcgggcgtgaggcgtcgatctcggttttccggacattcagataggcgtatcggccgcccagccaggcgtaaagcccgagcgtcagggcacccccgatgaccgcggcccaggttgagcctgtgagaatcgcggccgcggccgtgagaatgagagcagcgattgccgtttcctgcaggtgtctgatgataaaggtaagcatgaaaaaaccgggccgtctgttaaagactggcccggtcagatccggctttgctccgcgtgaagcaggggggaaagcttatgcctttgcgagcttcacccgggcgtcgaccgcaatcgcttcaccatccttatcggaaatcatgagcggattgatatcgagctcggaaacgcgggggaaatccgtcaccagctgggacagcctgagaagagtttcctcgattttatcggtttgggcgcgcgggagaccgcggacaccctcgagaagcttccatgctttgacggaacgcaccatttcagatgcatcctgatccgtaaggggagcaatccggaaggaaatatccttcagcacttcgacaaacacaccgccgagaccgaacataatcatcgggccgtactgaggatcggtggcgagaccgcacaccatttcgcgcgagctcttcaccatttcctgaatcagaacgccttcaaggcctttatcgagtccgcgctcagtgagcttcgcgatcagatcgcggtattcacgcctgagggcttcctcagaggcgatgccgacacgcacgccgcccacgtcagtcttgtgggaggtggttttcgacgtcatcttcatcacgatcgggtaaccgatcgaattcgcgatagcgactgcctcatcctctgtcttcgcaagagctgagcggcagacacggacgccgtaggcatcgagcagggcgatgctttccttcgtggtcagcgtgtcgcgggactccgcatcagcgccggcgatgatcgccttggctttttcctggtccacggcaaagcgttcgatccggccttccggcttctcgacccacttccgctgacgattaagccgatcaagcgccgcgatgccttcctctgaatacatatagaagggaacggtcacattcttatcggcgagcgacgagaagaattcctgcgtcgtcatgaagacaccgacaatcggcttctcggggtgtttcgcccggatatccatgatcgcgttcgccacatccgtgtctttaaggccgaggaacggcagatagatcgtgaggatcatatcgacgccgtcatccgcgatgacggtttccagcgttctgcggtaatgctcgagcggggcagaagcgatcatgtcgaccgggttcttcaccgaggccgcggacgggaggaaggagcgaagcgtttccttggtctcatcggaaagctttgccatctgcataccgaagtcttcgaccgcgtcggtcgccataatggcggggccgcccgagttcgtgataatggcaatccggtcgcccttcggaagcgggcagagcgagaaagccttggcagacgagaacagatcgctgagggacttctcacggatcacgcccgactgacgaagcagtgcgtcagcggccttgtcggcgcccgcaagggacccggtgtgggaggaggcggcgctcgcgccggcagcggaccgtccggccttcagagcgagaatcggcttctttttcgacacacgggtggcgagcttgcggaacgccttcgggtcgagaatcgattccatatagaggaggatctgatgcacatcctcttcgttttcccagaattcaatcgcgctcgccgcgttcacgtcagcctgattgccgatcgaaatgaactgggcaaaaccaatgccgaggtccttcagaatattaaggatgccgccgccaagagcgccggactgcgaaacgaaaccgatgtcgccgcggcggggcagcgtctcggcaaagcacccgtccatgcggactgcggggttcgtattcacgacaccgaggcagttcggaccaaccatcgtcatgccgtactgatgcacgcgctcagtcagagccttttcgagcgccagaccttccgcgccggtttccttgaatccggccgaaatcacgacaatgcctttgatccctctttcgtggcactgatcgatcgtatccagcatgtatttcgcgttgattgcgatgatggcgagatcgattccatcggggagagcggacacgctcgtataaacttcacggccctccaggacgcctcccttcggattgaccagataaaggtcgccctggaagccgtaatcgatcagacgatgcagcagatcatggccaattgtgtgatcacgggtcgatgcaccgacaagcacgatcgacttcgggttcattaccgaagaaagatccatagttttactctcctcaagaagttggggaacatccctactacgcgggactaaatattaagactaaacgcaaaataatcaagaaaattaggcatagaattccgttcctgaatttattctttgctggacatttttcttatgctgcaggaaaagaatcgggcgaccctcgttgggcttctcgcgccggtttgctggggtatgtcggtcgggctcatccggtcgcttgaggaagtctttggaatggctcagggcctcacgatctgctacgtgatcggaatgctctttacgctgtttgttttcggtattccccatctgtccaagtactcgaagaagtatctcttcctcggggttccgctttctgttatctgctcactctgcttcacattctcgcttcagttttctgctggcggcaggcaaactcttgaagtcggcatggtgaattacctctggccgagtctcacggtgatctgtgcggtgctcttcaatcatcagaaggcacgctggtacgttgcggttggttttctctttacgcttgccggccttgggctagttctggcgggaggtcatggattccatccgcttgagattgccggacatatcgctgaaaatccgattgcttatggtcttgcggcgctcggtgcggttgcatggtctctcttcagctcagcgagccgcgcctgggggaatggccagaatccgactccgattattttcgggcttgacgcgctcatttttgccggcatctttatttccggcggtcttaaggctcccgctccgacatggaatggttttctgctttgcgtagcggcgggctgtgtgtttggcggtgcctatgccgtgtggacttacggcgtacagaaggggagcatgacaattcttgcgatcggttcctactttaccccggtgctgtcctgtctgctcggcgcgctgatgcttggtgccaccctgacgctggacttctggcagggtgtggcgctcgtggtcatcggatcctttatctgctggatggcgacgcgtgaagaaaagcatgtcactcacggacgtccgatccgcttccgccgccgcgctgcggcccattaaggatccgcagcggcttgtttttaatgctcagcggctcaggaaaccgccggtctgcccggcggcagggcttgcgggcgttccatccgttttcacgcaggagacagcggcgctgtcaccctgcggcgtaaaaattgccacacacttcatgtcgtcatccacgatccgatagatcggggatccgacagcggtgccgatgcgcttgacattccggctgtcgttttcgtaaggtgaaaaaatccgggtgacggcgcggtcgcagccagtgaccaaaaccgccgcggcaagggcggcaataccgattttcagtaaggacatgattcctgtgctcctaaacatacagccgcgatcaccccgaactgaagcaaggtgacacgtgagaaagattcactacgagtttaaagcagaagaggcgttatggacggcggtacggagccgcggtgccggcggacagaatgtgaataaggtcgcgaccgccgttcagctgaagtttgatatccgggcgagttcacttcctgaaaaactgaaagagagactgctcaccctgagagacagacggcttggggctaacggcgttattacgatccgggcggaaaataaccgtactcaggaactgaatctggcagaggcgtaccgcaggcttcgagagctgattgatgaagcctcggaaataccggacttccgcataccgacaaaacccacccgggcgagcattcgcagagttcggcagacgaagacgttgcgaagcgaagtgaagaaacttcggggaaaggtgagagacttctaaaggaaaggttcgaaaaaagggcgcttcattgaagcgccctttgatttgtcaggcttccggaaatctcaggcggatttctcattctccgttatattgagtttccgctcctcgcgatcaggggtcttaacggatttttcccagctcgagagctctgccacatcgactccatcatctgttccggcaacgatcttttccctgagtctcatacgggtctgattcgcgaaatcatggacggaggcaagacccagagccactttcagcatggtcttgcggtcagcgggagaagacggaaccttgatctcataccagtttgtaccgccgtcaagcgatccatagaaccgggtccgatagccttctttatcgtttccgtagcagtcgaccaaaatatcatccggatcgagcgccttcagaaccaggtccatcggagaaatcagggtcttgcagacgtgaccttccgggtagacatgcatgcctttcttcgcgcgctcatgcatcgcgcggatcttcgcgtcaaaaagactgttatcagagaagggtgaatcggttttcccggaagcggcggcctgatcttcgtggatcttggtgtcagtcatgttgaccagaaaaccaatagcggcaagaacaatgaggccggccgcgacaaaagtcagatctttggcgatcgccttttcaatatcgggatccgaaatgtaccagggggcggcaagaagcccgatcacgactagagccagtacggcgatgatgaatttgagcagcctgtatttcatagtgcatcccctatggtatttcacctatctattaagtttattgtaacagcgggaaacacaaatgacggcgggcttttctttcagcttctgttaaggtttcgggaacatgattcatgacagatgagttgctgagacatctctcctttaccagaccggattcctgttaatccggtcttttttttcgctctgctggcgtaggataagccactggcaatagaaatagagaaaggtgcaggcattgaaaagaacctatctgattgatatcggcaactcagctctcaagtgggcggaagcgacaacacctcagaatactggcgtgatcacctatggtgacatggtgatgctggcagaacaggtaagagacttttaccggcatcagagaccggaattgatttatgcctgcacagtggctcacagtgtcattgccagtacggttcagcaggtgtgcgagcggacaaggattgagctgctgggaagccagcgggaatttaacggcgcctttcatgtcgtcaaccactacgacgactatacaaagctcggtcctgatcgctggtacgcggcgctgggcgctgtgagcaagcacccggatgagaaccttctcattgttcagatgggaaccgcgctgacggcggacagcattatctgccgtggcgaaggggaatacgaatacctggggggacggattgcgccgggaccgaccatgatgtttaagagtcttcagcagggtaccgcgcggcttcatgtgccgagcggtacgtatcagacgttccctcagaattcgagcgacggtatttcaacagggatcacggattgtgtccgtggctttatttccggggggcttgaagcgatgggaaatgaggcgaaacctaaactcgttattacaggaggggccgctcattattacgagaaagccttcaggcagtatttccctgactatctgatagaagataacctcgtgatcaccggtctttcgcttcggatccgcagcgaaaatgaggaatagcccgatgcatagtgttttttccaaacccttcacgattcatttctcagactgtgattcgacggggctcgtttttcatccgcatttcttccgctgggcagtggatacggaagaagcctttttccgcgagattctcggggaaaagattttcggtcccggagtgacagatcagatctatgcgccaatggccggaatccaggcggaattcagcgcgccgctcagagcgggagataaggtggaattcaggctttggattgagcagttcgggtggagttctatccgttgggcgtttgaaatcatgaaagatgattcgcccgcggtcaaaatcgctgaaactctggtgttcactcagcttcagcctgatggcacatttaaagcgatggaaattactgaaaactatagaagaaaaatggctccctatgtcaaagatgacgatgaaccggggctccggttcaggtcctgagaataaaaaagtttgacatttgaatttttcgtctgtaatatacgtgttcttcgctgctgacgcagtgatgatctttaaaaactgaataacgaaccgataagcgtgagcatctggttttgaagagcttcagctcataa

SEQ ID NO: 1291 - DNA, 377 bp, Unknown
  gut microbiota DNA sequence
gtgaagaggtctcagagaatcggtggctgtaactgtttactaaaaacacagcgctctgcaaagatgaaagtcgacgtatagggcgtgatgcctgcccggtgctggaagattaattgatggggtgcaagctcctgatcgaagtcccagtaaacggcggccgtaactataacggtcctaaggtagcgaaattccttgtcgggcaagttccgacctgcacgaatggcataataatggccacactgtctcctcccgagactcagtgaaattgaaatgtttgtgatgatgcaatctccccgcggctagacggaaagaccccatgaaccttaactgtagctttgcattggactttgaaccgatctgtgtaggataggcgggag

SEQ ID NO: 1292 - DNA, 137 bp, Unknown
  gut microbiota DNA sequence
ctttcgcccaggccttcctcgtagggcgtcgggtggccgacctgccaggcctccatgcgggggatcgctgcgccgtccgtggcgatcaggtaacgggcgatggtggcgatcttctgagccgcggccgtcccgaaggc

SEQ ID NO: 1293 - DNA, 60602 bp, Unknown
  gut microbiota DNA sequence
attctctcggtttcacccgtcgggggattcctttttctgtgtttcaggtgacagttttcgtgtcgatatgacttttcggaatagcgatacgcccggcgtctcaccctccggccaaaaaaaggtccgcgggatccgaagatccggcggactttgaaaggggccaatcactgcagggtaccaagcagtacaagccagcagtttcacaaggcgtaaaagaactacaggatacaaaatgtgccggcggagaaaagaagccatgaacaaccgcatcaaaggttaaggagcaaaacaccgcacggctcctttccttccgccagcatccgggcgggcccctgtgcagacaccactctgcggaacgcccttggtactacgtctgtaatagtagttttattcatactcactgtcaatagcaaaccaaaatcagcgttccgtttttttgatccgaggccgcgaggaaacccattttctgccgggttttcctgatattttccccggtgcgtcatgaatctgatccgcaaaaaataaccctgatttccagatattaagattctgtcattcttatatttaataacgaagatctgaacgaaccccgctcaccgagtcagagtgagagtctcagcgcgagcaccgtgagcgaaacgaaaagcacggggagcgtcatcacgactcccattctgaaatagaaaccccaggagattcggatccctttttcagaaagaacgtgaagccagaggagtgtcgcgaggcttccgatcggcgtgattttcggtccgaggtcgcacccgatcacgttcgcgtaaatcatggcctcccggatgaggctggacgcagtgcttccatcaatggaaagcgctccgacgaggacagtcggcatgttgttcatgagggatgagagaaaggcggacaggaaccccgtcccaagtgccgcgagccatacaccggactctgaaagcgcggtaagggcggaggagagcaggctggtcagccccgcgttccggagtccatagatcacgagatacatgccaagcgaaaagatgacgatctgccagggcgcgttcttcagcacccgggctgtgtcaatcacgcggccccggagagccgcagcgaaaaggatgagcgctcctgaagccgccaccgcgcataccggcacgccgagcggctcaagaataaaaaatcccgcgaggagcaggaaaagcaccgcccaccccgtgaaaaaggtgccgcggtcccggatgacggacgcgggggcggcaagtttcgcggggtcgtatgacactgggatgtccttccgataaaagaaatgaagcacggcaagcgaggccgcgatcgacgcgaggtcgaccggcaccatgaccgaggcgtattccgaaaatccgaggctgaagaaatccgcggacacaatgttcacgaggttcgagacgatgagggggaggctcgccgtatccgcgatgaagcccgccgccatcacaaaggcgatcgtggatttttttccaaatccgagcgacgcgagcatcgcgatcacgatcggggtcaggatgagtgccgccccgtcgttcgcgaaaagcgcggccaccgcggctccgaggagaacgatgagcgtgaagagccgcacgccccggccgccgccccagcgcgcgacgtggagcgccgcccactcaaagaacccggaagcgtcgagaaggagactgatgagaatcaccgcaacaaaggccccggtcgcgttccagacgatatgccataccgtctggatgtcactgagatgcacaacaccgatgagaagcgcgagaactgcgccgagcgacgcgctccagccgattccaagaccccgcggctgccagataacgagagtgagtgtgaggataaagatcgcgagagcaggaagcatggtgggccccggcttcaggcggcatcagaccgcctgaaggacttgagtgaaggaaagcgctgagaaccggatgaagacgctgtccttatccggagagtgagagggatcagatcgtgagcgagaggagtttctccactccgaccggttcctcagcctgaagcgggacaatcgcggtccggggggactcagactcgatcttccggattaagggaagctcagacgcggcccgttctctgaggagcggggactcagggtccgcagccgcgaggctgtcattcacgatatagccccagggggcgatccccgcccgcctgagatccgcttcaaggcccttcgcctcaagcaccggcgtggtttcagggagcgtcacgatgatgacgcgggtcatatcggggttctgaaggagcgtgagaggcgtagtgccgcttcccgtctctcccatcttccggacgacttcccggtgataagcgcccgcggcgtcgaggagcagcagcgtgtgaccggtcggcgcggtatccatcacgacgaaccgtttatccgcctcccggatgacgcgcgaaaacgcctggaacaccgcgatctcttccgtgcagggggagcgaagatcttcttcgagaagcttcttcccggcttcatcgagccccgctccctgagtcttcaggacgagagcgcggtaattctccgtttccttctcaggatcaatccgggagaccgtgagaccggggaccgatcccgcgagcgccgcgtccacatgcgccgcggggtctgaggttgagagatgcacgtcgaagcccagcttcgcgagccgtgccgcgatcgcggccgccatcgtggttttgccgactccgccttttcccatcagcatgatgagcccgtgatccgtgcccgtgagttcagagataaaagcggagagcggcttcggttccgggggcgtaaaagaggttgattcagcggtcgttccggtctctttgataaaaagcgtgcgaagcgcgtccacacccaccatattccggggtttgagggagagggtgtcccgagggaggcttttcagcggctccgggatttccgtgatcgctttccgctccctgaggcagatgctttgagcgagcgcgcctgaggcggactctgtcgccggcatcacgccgttcagcaccagatactgatttttgatcccgatcccggcgagttcgtcagacgtccgcgctgcctcccggatggaggcccggtgagcccgcgcgacaaggacaagctgcgtttccgcggggtccgagagtgaccggacggcggccgcgtactggctccgctgtttatcgagccccgagaccggcccgaggcaggaggttccattcgggttcgcgtcgagatactggctccaggctccggggagctcaagaagccggatcgtgtgcccggtcggcgcggtgtcaaagagaatgtggtcgtactgagaggtcaccccgggatccgtgaggagccccgtaaattcatcaaacgccgcgatttcagtcgtacaggcaccggaaagctgctccgtgatcgaagcgaccgtttcttccggcagcagcccctggatcggctgaatcagtttctcccggtacgcggcggcggccgcctgcggatcaatctcaatcgcggagagccccgggacagattggatcgcggtcacctgattcccgatcggctgatcgaatacctgggagacgttggacgcgggatccgtgctgacgaggagcacccgttttccgagtcccgcgagggcaacagcggccgcggccgcgacggaggtctttccgacgccgcccttcccggtgaagaagagagtgtgcggcgcgttttcgaggaacttcagccccgagaccgtgtctttcagggttgactgagacgacgccttcggggactctccgcagccgcattccggcccgcagaccgcttccgcggaaatcccggtgcttttctcaagctccctcgcccgctcacaggctgtcatcggaatgccgaaccactcggacagctcactccggctggggtaccggcccgagagccgctcttcgttatcaacgaggatgagggggagggcatcggaccccttagccctcaggaaggcggacgccttgtggttcaggacaaacgccatcggctgattcgcgagattccagcgctcagcgggaacgccgtgcgctttcagccagtcaaaatccgacgcgaaatcaatcagcgcctgatccggatccggaccgcagaccccggtgctgcagcacatcgctgggtcaaaaaccgaaagtttcttcatggcgttctccgtatatattcgttaaaacagatatgaatgaataaaaatttttacccgcagcaggacttgccgtccgcggtgccgtttaccgaggtgagtttggaggccagcttccgggccgcggtccgatccgcttcccaggcttcctcaatcacccgcgcggcccacgcgggcatctgcggggaaagccggtagtgcacccatttcccttccttccgatccaaaagcacccccgcgtcccgcagcattcctaagtgacgcgagatcttcggctgcggggcatcaagcgccgcgccgatatcgcagacacagagttctcccatctcgcggagaagtagcacgatgctgagacgtgtatcgtcagaaagcgtcttgaaaagctgaagcggcgtgagaagaaggatcatggtgtgccggaaaacggtaaaagtcggaatacagacttctgacacgcggcgcgtcagaagtcatatgcattttagtgaatgtgtttaaaaaccgcaaggcttttctgatgaccggatgttccgccgtcctgaatttcagtcctcaggcgtttgcggctcttcctcttccgtgagcttcagcagctgttcggctccgatcggtttctcgctttcaagcggcaccaccgcgtagcgcctcgtattcgcggcgacccgggtgaagagcggctcctcagccgcggcccaggttttaaggatcggggacatcggacccgcggccgcgaggctcccattcacgatataggcccagggggcgattcccgcccgcctcaggtcgtccttcaggaactttgtttcccggagagcggagggttccgcccgcgtgacgaagatcgcgcgggtgagagctggttcctgcaggaattcaagcggtgtgcggaatgtccgctcgatcccaagacggttcgcggcggcccggtgataggtgtccgcggcgtcaatgagaaggagggtatggccttcaggcgcggtatccatcacgaggaaccgtgtttccgcttcccggaagtaccgcgacacggcgtaaaaaaccgcggtttcttcggcccacggcccccggagatcctcttcgagaagcgctttttcgtcttccttcatcgagcgcccggccgttctgagcgtcagagcccggtaccgcccggtctcttttctggggtccacggctgtgacctcgagtcccggaaccgtgtcccggataccggacgccttaagcgccgcggggtcggtggtcacgaggtggacgtcacccccgagagcggcgagccgcagcgcgatcgcggcggcaagcgttgtcttcccgaccgagcgtttgccgaccagcaggataaggccgggacccgcgtcatggagttcacgcacgagtgtcgcgagcgtcttcgtgctcgggtaccaggcggtgggtttcggttccgggggccgcgtgccccagcggaagatcccctgaagcgcgtcagcgcccgcggccctccgggactgcagtggaagcacagtgcggggaagagcggaaagcgccttgggaagcgaccgaaggacctgccgctgacgcctgaacaccgcggcgtcaagcgttccttcttcccctgaggccttctccatctcggcgttgaggacgagggacaggttccgaagtccggcgtccgaatactcctccgcgagcctcgcggtctcccggatcgggccgcgtgagagcgtcgccgtgagaataaggcgggttgattgcgggtccttcagcgtcctgagcgtttcgtcgtaaagcgcgcgggattgtccgagaccggcggtgagggcgatcgacgcctggccgtccggacgccgctcaaaaaactgattccacgcggccgggatcccgaggtaccggatcgtgtgagcggaaggagcggtgtcgagaatcacgtgatcaaacggcccctcgatcctggggtcggttctgagcgccgtaaagcggtcaaagcacgcgatttcctcagtgtccgtcccgaaaagctgctccgtgatcgcggcgaaagtcgtttccgacaggaaccccttcatcggccgcaggacctttttccgatagaggtcggcggttttcctggggttcagttcgagggcggagagacccggaacagattgaatcggagtgacggagctcccgatcggctcattgaagagctccgcgagattcatgtccggatccatgctgacgagaagaacgcgtttcccgagccgcgcgagaagcaccgcggtgccgctcgcgatcgatgtcttcccagcgccgacaggccccgtgaagacgagatgcttcggggcgtctttcaggtacgcgagggctgcggccgcgtcccgcagacgctccgcttccgttttcggggcgcgcggcatccgtgccgcggttccccgtttcttctttgcagccgttttttctcccgtccggcgagttcggcgtgaaggggctcccgctccctttcccgttttcatggctctctccgttactctcctgtcaaaacgatgtccgtgcttttgtttttttcgacccgaaggtcgtaggactatagtctgaaggaataggtagcaatgctttaaaaccaaatatcataacgcctgaagccggtttttcaaagcctgaaagaaacgcgccctggattccagggcgcgggagaggggtgaaagagcggagagtgccgcgcctatcgggagctcggttccgtgagtttcaggagcttctcaaaccccacgggttcctcgcggacgagcggcacaatcgcgacgcgcggtgatttcgcctcgatttcctcaatcagcgggatttcggaggttgccctgcggcggaggatcggggtcaccggggacgaggccgcgaggctgcagttcacgatataggcccaggagccgatcccgacatcccgaagattcgcttcaagcgactccgcttcccgcaccggggtgggttccgcgaccgtcacgtgaatcatcttcgtaagcgccggatcctgaaggaagaggatcggggagcggaaggcttccgcgtccgtcctcccggcctttttctcctgctcccgccgatagctttccgagagatcgaggaagatccgtgagtgaccgttcggcggattatccatcacgacaaactgattctcggcttcactgaacacccgggagatcgcggagagcaccgcgatttcctcggtgcagggggatcggaggtcttcttcaaggagcgcgcggcccgcggcgtcgagccgcgatccctgcgtttccatcacgtacgcccggtattcttccgtctccttctcagggtcaatccgggagaccgtgagattggggagcgtgctgtcaagcgtttcctcaatgtgggctgcggggtcacaggtcgagagatggactttgtgcccgagcgccgcgaggcgcgccgcgaccgcggccgctatcgtggttttgccgacaccgccttttccaagcatcatgatgagaccgtggccggatgcgctgatctcgtttacgagattcgcaagcggcttcggagcgggcggatcaaactcgacatcctccaccggctccccgtcatcccgaaggagcgtgcggagattcgcgggcccgaccagggtatcgggtttgagcggcaggatatctgcgcggcagcgcggggagaggcgcgggaagatttttaaggaccgcggattcccactcgtaaattgaggtggcgagaggcccggtgccggattcactttccggcagtactccgttaaggacaagcgtctggttcacgactcccgtgtcccgcagctcgtccacggtccgcgcggcttcgcggacagaccccgcgtgaggccggcagacggtcacaaagcgggtttttgtcggattgataagagactgcatcgcggcctgatactgatgacgctgccgctcaagctccgaatccggtgcgaggtccgatctgttctggacccgcgcctcgaggtaatcgcaccaggctccaagatgcttcatcacgaggagcgtgtggccggaaggcgcggtgtcgaagagcacgtgatcgtactgtgacgccaccgcggggctcgtgatgagtcccgtgaattcattaaacacggcgacctcggtcgcgtagggtcccgagagctcctcaataatcgacgcgatcgcggattcggggaggagatcctgaatgggcttcacaatctgctcgcggtgcgcgaacgcggcgagccgcgggtcaatctcaatcgcggagagaccgggaaccgctttgatggggcagagcgtgttcccgatcggctgctcaaagatatcggagagggaagacgcggggtcggcgctcacgaggagcacctgttttccttcccgcgtcagagcgatcgccgcggcagcggcgactgaggttttgccggatccgcctttgccggtaaagaaaagcgttttcggggcgcggtcgagaaaccggagccccgcggtggagtcgcctgacgccggtgactcgtgaatgacggaaggccgcagcgcggccgcatggtacacccagacagagcgcggtttcctgggggacgcggaagaggcgcagtcttcaggcgttggtttcagcgatacgccaaaccatccggcgagttccgcacgggtcggatagcggccgtaaagcaccggtgagccgtttacaagaatatagggaaggtcctccgcgccgtggcgcttcaaaaacatcgacacccggtggttcagcgcgaattccattgggttcgataccagattccagcgctcaaccgcgatccctttcctcttcagccattcggcgtcagacgcgaaccggatcagttccgggaccggagtggattcgcccgcccccgtggtgtcagcggctgccggatcgaataccgtaagactcttcatgaagttctccggaaatccttaaatagtggagaaataaaagcgaaaccgttccggattcagcgcccggcgggaactccagggttcccatcccggcactggcttctcgcgtgagtcccggaagacgtatcccgggagtgaaaaagcagatctgaatcaggttttctgtgtcacaggcggtgcttatgcggccttgccctgaagcgtcccgcgggtccctctccgtgacatcaggagaaaagccggtgagttacgtgaaaaaacaccctgcggccggataaagagcgatggttgcgatgaagcacgcttttcacgtcaaaaccccggaagatcgctgaagatgacatccggatcagatcaattcgttctttctattctatcgaaatgaaataaaaaggatcaggatttttttgacacgaaattccccaatataggtagaaaatacccgataactaaaatggtttacccagggatagggacacgaaaaagaggaatcccggaaaacccgggattcctcttcaaaagtgcgatttaaatctcacccccggaaggggcgggacttatcttcagagcttcgcgagctcctccgcgaccacatagccctcggtgtaattgtgtccgaggttgaggccgaagatatcaagcggatagtccaccgatccgtagaagttgccggcgaggttcccgatcgcgtagagacccgggatcggcttatcgtccttatcgaggcattccaggcgctcgttgatctcgaccccggagcagccgaccgtgaaccggacgtggcgatggatgccgtagaacggacccgcttccaccgggcagaggtgatcggccggaacgccgaactccgtatccttcccggcgtgtgccatctcgttatagtgcttcacggtttcgaggaacgccggaacgtcctgaatgcggagtttcttcgcgagttcttcgagtgtatccgctttccaggtatcgatcaggccttccatcacgcccttatgctcaatcttctcctccggcatccagttcttcagcgactcggtgtcttccaccgggagtccgagcttcttagcctgctcgatatagttcgagtcaaagatctggcagtagtggccggcgtcttccttcgagagaaggaagcagttcatgtattccatcggcaccatttcgctcgagaaccggcggccggtcgaggccttcacgcggaggtacgggtgactcatcatcgtcgcgggacccgcgtccatatcgtggaccatcttcgtgtggccgacgttttccatgcggccgcccgcccagacgatcatcttctggccgtcaccgtcgcggccccggcgcttcagctcaaggttcgtgacatccggcaggtagtaatccatcatccgcttatcgttcgcgtagtcaccggtggccatcacgacacccttcttcgcgttgaagcggatgaatttcccggcgcggtccttgccgatcacgcccgtcacgcggcccgtctcatcctggatcagctgcacggcaggggtcttgtagtacaccttcacaggcagattcttctccgcccagtcggcgagctcctgcacggcgacacccgtgttatagggcttcgggccgaacacgcaggtcgtgaaattgagcttatcccagccttccttcgcgaggaacgccttatgcggcgcggttcccatatcgaccacctggcagcccgctttcttcgcgcggtcgaccatccaggagacggcgaccccggagttcttcgcccaggtttcgaggacgccccgcttcgcgcggtaatcagaccccgcgacgaggagcgacacgcaggcttcaacctgctccggatcacttttatcaaggagaatgccggccccgaagttgccgcaggcggacgcgtaggattccttctgcagcaccgcgaccttcattccgagctcacccgcgcggatcgcgcaggggacacccggcgatccggcacccacaaccgccacatcgcattccacggtttcgtcgcactgggtgatcggctcaggacgcttgaaaaattccaattcttcactcatctttatcttgactcctcatggacggacgctcactagatagcatccgtatattgattggatccccaacacccaccgtatagtctaggcgctttatcgtgctatagcgaggaaattattgtgtcagttgtaatcataaagaacggtgagatatcttatttttacggatacagttaaggaatttcaggagacgggtaaaattgacgggttaaggtgttttatttaggagccggggctatgaagggcggcaataccttctggattatctggggcggagtgctggtcctctggctcgtccttcggtacttcgcgaagcagcggatgcacccggtccccgggatggaaaccgagacctataagaaggcgcagctctattcagtcttcgggacgaccgcgaccttcatgttcgcgctggtgctcgccacgattctcccgatgcagggattcgcggggcgcgtcgcgctcgcggtcctctttattttcgctgggctgcaggtcacgaaagccgcggtgcagaaggtctggtcctgccccgtctgcggaaaaccgctccccgtgcagaccggccttctcggggtcgtcgtgattccggttcagaaatgcccgcactgcggcacaaggattccgtaaccggggttctttcctcaattcatatatatcaattgagggcggtgttcctcctgaaacccgcctgattttccttgcgaaaacgcctctggaacactcccggaggcgtttatttatgggcgtttcggtgtttccgcctctcgcctcagacgccggttcagccaaaaatttcttttttggcatttttcccaaatcatatatatgaattcagaacccctcgttttttggggttaccctttgggaaaattttccgtgtcaggagatctcccgtcagacgccgttccctctctctgccgcgggagatctccattacggaaaaggaaaagaaaatggctgataactttgattcgtacgttcctgagatggtggcgacccgccggaagtttcacgcccgcccggaactcggctggaccgagttcgagacgacggcgaccgtgatcacgcggcttcgggctctggggtatcaggtgctctgcgggacgcaggtcgtgaagcctgaggcggtgctcgggcgtgacgagaaactcgtcgccgccgcgattgagcgcgcgaagtcagccggggtgccggacgaactcctctccgaaatgggcggctacacgggcgcggtcggaattctcgacaccggccgtccgggtcccacgcttgccttccgctttgatatggacgcgctcccgattcaggagctccaggatccggcggtgcaccttcccgctaaggaagggttcgcgtcgaccttcaagggcgtgatgcacgcctgcggtcacgacgcccacaccgcggtgggtctcggggtggcccggtggctgatggatcataaggatgagctcgttggcaaagtgaagctcattttccagccgtccgaagaagggacgcgcggttcgagcccgatgaccgcggccggtgtcgtggatgacgttgattggttcttcggcgggcacatcgggaccgagtgccattcacacgaagtcggtgtctgccacgacgtgttcctcgcgaccgtcaagtttgatgtggactttacggggctggaatcccacgcgggcgcggctccggaaaaggggcgcagcgcgctcctcgccgccgcgaacgccgcggtgatgctttccgcgatcagccggacgtctgaaggcgacacccggatttcggtcgggaaactcgtcgccggtaccggccgcaacattaccccggcgcacgcccatatggagtgcgaggtgcgcggcaccacgtcagaagcctgtgacttcatgtgggaaaaggctcagaccgtcgtgaagggcgcggccgagatgctgggggtcgaggtgaaactcacgaaggtcggcgaagcgacgaccctgaaagccaccccggccgcgatggaagtggtccgcaaggccgcggctgccgcgaaagacgtgaaggaagtgaaggaaatcaccgccccgcaggcctctgaagactgcacgatcttcacgcgcgccgtggtggcgcatggcgggaacgccgcgttcttcctctacggctgcgagcaccacggtcatcaccgtccggacttcgatgtccaggacaccgtgaatctcgagccgggtcttgaagtctttgccggcatcgcgaaagaggttctcggccggaagtaatcccgacactatttttctctcccactgacttgcagagtcagcgcttgcccccggttcggatgacgccgggggcttttttttggggctgcggggaaacggagataaaggagacgcgggcggggaataaaaaaggatcggtcccttgcgagaccgatccctttccggtttttcgttactcaccaacttcaggtgttacttgaaggccggaacgccgaccccctatttttgggggtgatcagcacggaagagttcccactcctcaatcgagcggccgtccggcagatggcagatcgcgtattcgccgccatccttatcctttttgatttcgagcatcccgtgataatgcttcacgcaccagacagaagcgggatttgccatccccgccatcggttcagaggcgggctgatcagaagcggttccgggagcggcgcatcccgtgaggagagcggcggacgcggctcccacggctccgagcgctttaagcggcttcatcgtttgtgttcctcaaaagaaatgacctatgttccatttattctatcggccggcgcgaaaccgtttgaggtgtcgtccgccgttccggctcccgctacacttctaggtataaagaaccgtgcccttaacgcggctgagaagctcgggggcagggcggcagcaggattcagtttcaaggaaaaaggactcacgcgcgatggaccgatacggaaaaattgaaggaatggaggatatcgtcgatctgattgacgaactggggttcctgccattcttccggaacccgattgaaggatggtcgcttgaagagaagacgccggcggaattctggttcaacgacgataacgacggggtctgggagtggaaggggccgattatttcccggacggaatgcgcgtatgggaagttttaccgcgggaaagcggtttttatatcgcgcggctggtacccggatttcctgaattaccggaggttccgccgtcacctgaccgcggacgaaaagttcatcctggagacactgaagggcgaggattcactcctctcgaaagaactcaaggccttcacgggatacacccgggcgagaacgaaagcgattgatccctttggcgagcggctcacgcatctcgactcgatgctgggcgacgatgatgggcggaaacgcgaaggctttgaaaccgcggtgaatcacctccagatggcggggtacgtgatcatttcggattttgagtattcgcgcgacaagaaagggaacacctacggctggggtgtggctcgctacacgacgccggaatcgtacttcggtgagtccacgcttcacgtggaccgcacgccgcacgagtcccgcgaccggatcctcgcgcatctccggaagattctccctcaggcgacagaggagcagctcgcgtcctttatcgcgtaattcaaggctcgggtcttcgattccggccggcgttaccccacgaaaaagcggattctgttttcatgattcagaatccgcttttttcatgcttcccggaggcggggaggggccagacctttccttatgccttcccgtgcttcagccactttccaccccggaagcgcagcaggaagatcatgccgcggaaaataagctcaccgcacatcgcgatccagacgcccttgaggccaaaggtgcgggcgaggagccaggcggccgggagcctcacaaaccacatcgatccaaggttcatgaggcaggggatcagcgtgtcccccgcgcccataaagacaccgtaggcgacaatcgaggccgcgaacatcggttccgcgaacgcctcgatccggaggatcgtcgcgccgagatcgatgatttcggggacgttcgacatgaggccgatcatgatcggggcgaagatgaacatcagaactcccatcacggtcatgacaccgagccctgtcgcgatcgcgatcttaccgaaccgcatcgcgaggttttcgcgcctcgcgccgatgcattggccggtgagggaagccgcggcgtcactcacgccgtagcccggcatgtagcagaggctttccgcggtgatcgcgagactgttcgccgcgatcgcgatcgttcccaagggagccacgatcatcgttgacgcgacctgcgcgcagcacatcacggtgtgctgaagcccgaccggaatcccgattttgaatgcttttttaagcagcggaaactcggggaggaaccgtcccttttcgccccggatcgcgagttccgggctccgggtgcagacgtaccagagcatcgggaccgcggtgcagagttcagcgagcacggtccccaaggctgcccccgcgacccccattccggcccccggcatcgtgaacgtgaacccgaggaacgtcacgagccgcgtcgggaagatgaggaagtagttaaagaccacgtcctccacgcacataaagatattgaggaacgagggaacgcggatattgccgcttgcccgcagcatcgatcccgcttcgtaactgaggaagagaagcggcatcgcggcggtgtagatcgcgaagtatttcgtgccttcccgcgcgacatccgccgaggcaccgaggaaccccgggagccaggggctgatcatgagccccacagcgccgagaatcgcgccggtcgcgaccgcgaccgtgatgccttgtctcaggagcttccgggccgtggggtacgacttcgccccgatttcctgcgaggcgagcaccgagtaccccgtgatccccgcggacccgaggccccagaagagccagatcgtgctcgacacaataccgacagcggcagcctcgaccgcgccgaggttacccaccatggcggcatcgatgtactgcatcaaaacattcgcgaactgcgcgaggatcgccgggatcgagagccggatcacgagggcgagttcctcggcccgcgtaaaggactcgcccgaccggatctttccgatcagccgctgggaaacgctgtctttcatagatagatgaagtgtgttgctgagttgttgtttttgtagggcgggaaagaggaggggaaggggactttgtgcccccggtttccgcctttctcggccgccgcgccattctaagccagactgcttagaagccggaggcaaaacggatgtgttaacccggagaagggcatgagagtcaaacccgtcaaaatggaaagaaaccggcgaaacgaatcatgacaaaaggcaaacggctgttcttttgagagaattccgctgatcgcctcatgaagacggatgatcccgcccgttaccgatttccctttagagggttattcctaaggatctacctattttgaataactatttgaaaatacatcgtaaattttaacaaaacgacaaaaaagaaaaattcgctttctttcctctgccccaaacatgtgcataccctgctattctggatgacagtttttcgtcgggtactggaaattaacttgcggactgggtgaataagaatgacgcggacggatgaagagaatcagaagagagcgaaggctggccgatggcagaaaagcgtttttgcgctggctgcgcttctgatgatgtcgtccgcctcgttcgctgatctcaaagcgcccgaagtccaggatccgatctacgacacgctcaccacgctgcaggagtcgactgaaatctcggttccgaaggcatcccttggctccgccccggagaaggatggcgaggcgagcctcaactcctctgaccgcccgcatgggttcggtctccgagtcatcaagaccgcggaaacccagcttgggaccccgtaccgcgccggcgctgaaacgcccgggcgcggttttgattgttcggggcttgtgtggtgggtttatcagcagcaggggatctcgctcccccgcgactctgtctcccagtctcacgtcgggacgcgggtggacctcgcggacgcgaaggcaggcgacatcgtcgttttcaagacgaaccggggccccaacggcttccacaccggcatcatgacggattccgagcacttcattcacgcgccccgcgcgggggaccgcgtgcgcgagtccgagctcacgggctactgggcgcgtcacctctattcagtgcgccacgtgggcggcctgaagctcgcgaagaatcgtctgccgtctgacgtcgaagtcgctcaggatgatctcgaagaaaagatcgcggataccgagtcccgagacgccgcgtttaaccccggccccgcgattgagtatcaggaaaaggccgctcccgcccgcgtcgtcgcctccgtccgccacggaaagaagtccgcgaaggctgagaagcgtgtgaaggggtcgaagtctgccaaggtcgctaaggcctcgcgcgccggcaagtcccgcgccgcgtccgggaaaaagattgtggtcgcgaaggcttcaggccacgcgaagggccgccgccacggccactcctgaccgcgctagaatagcgtcaccaaataaaggcaaaacagggccccggtttcaacagccggggcttttattttggtttcgaggtgcggggccaataaaaaaccgcggttccggattcgccggacgccgcggttatgcctgtgtcagaggctctcggtcagagcttgatcgcgcctgagacaatcttcgcgaggaactcggggaaggaccccgcgacacgcttcgcgcgttcctcaaaatcgggttccgtgctcgtgatgacggagccatcctcgatatcgatcgcgtagtagtaatactcgggatcggtgcagaggtagatcgggaaatgggtgtcccagaagtccgtcacttccttcgcccacttcttatcctttccggccgcgtcaagccccatcagctcgagctcattccagctccagtcgtcctccgttttcgcgggcttgaagtccggacccacgaggaaccacttgttcccggtctgatcctcgcacttcgcgagtttcccggcgaagttaagccaggactgcggaatcgcgtgtccgtagcgactgagaacgtcctccggaatcggcgtcgcggtttcggcaggaatgactttccagttctgagcggagagccactgaatgaattcatcaaccattgaggtagccagcttttaataaaagaggtcggaaaaaaggggagatcgcggcgtcgagccggtttcagttccgggcgggcgtctcccgcgcgtggatcccatggattccgatcgaattctagttaaagcgccccggattgcaagagcggataccatgatcctgtaaaaataagccggaccgccggaaattccggtgatccggcccgatctgtcacggtcctgtcacagaactgtgctagggggacagggatgacggtcaggagagcgaagcgctcttttcgacggtcttattggacgcagcggacgcgtgcgtggcttcgaggctcgcctcccggggttccggggatttagcggccgcggtcttcttcttcgacgcggtcttcgccttcgccttgcggctccgggacttcggcttctggctgtccgccgccatcatgccctgaagctgacgctcacggagcgaccggagcgctttaagggactccgcggcctcattcatcgcggtcgcgcggccgacgatcagcggatcaaccggtcccaccatcttgtcatcccgcccttcgtagggaatcgtgttcaggacataacgcatggcattaagccgggcgcgcttcttatcgtcgctcttcacgacggtccacgggcactccacggtgtccgtcttctcaaacatcgcttcctttgccttcgtgtagtcatcccacttatcaagcgacgcgagatcaaccggcgacagcttccagcgcttcagcggatgaacctgacgctccttgaagcgcttccgctgctcttcgcgcgacaccgagaaccagaacttgatgaggtagatcccagagtgaacgaggaaacgctcaaactcaggcacttccttcatgaattcctgatactgctcgtccgtgcagaacctcattacgcgctcaacacccgcgcggttgtaccacgagcggtcgaagagcacgatttcgcccgcggtcgggaggtgcttcacgtagcgctggaagtaccactggccggattcggcggcggtcggcttatcgagagcgacgagccgcgcgccgcgggggttcatgtgttccatgaagcgcgtgatcgtgccgcctttgcctgccgcgtcgcggccttcaaagagaatcacgacccggcttccggtcttcttcacccaggcctgcagcttcaggagctccacctggagcttgaacttttcggtttcatagaccttgcggcgaaggtggttcttataggggtagccgcccttttcccagtcttcggaaagctcaatatcagggttcaggccccgggtgctcaccacgcggcccttctcgtccttcacttcagcggagaggagcccctgcaggatcttctcgcggtccgagggggactggtcttcgaggaccacctcgcggatgaagttcgtcgtgcggccgacagcggagctcgagcggtccgcggtctcaaacttcatcgcgccttcaggcgtcgtgtagcggacgtcacgctccatgctgagctcattcttcaccgcgccgtccttcgggctctcagagacaccgagttcttccgcggcttcgttctgaagcctcttacgctcttccttcactgcccgggcggagcttacggccttcgcggcctggctcgcggcgaccttgttcacgcggtcagagatcgccttggattcgtttttcttatctgccattcagttactctccaaaagttgcaacccgttatgtattactttagtccggttcatatctttcggacatagcgttaattggcatcttgcggaatttgcatgtaaagaggctgaaaaaccgtgatctgtgagggatcggaggggatttttggggccgcggcgcgtgagaaaaatctctgaagcgttttttcctaacgcagagagcaaaatgaaatactgtgtctttaaaaggggattcggaccaggttttcggtatcgaggagaccgggaaccaggcatccccgccagaggccattccggatcccgcggccgcgtgcggttcttgaacttcgttttcacgctggtatcctgtcttcgtaacgtgggaacggcgggagaggggatcgaggcgcgcttctctatatagagaggagaggaggcggagtctcttttctgcggttcccattgaagaaacagaatcagaggggagcgagcggcagaaaatgacagcagcgaaaaagggtttaaacacgtcgaagaccgagactcctccggatcatattgaggtgcgcggagcctgcgtccataacctcaaaaatattgatgtcgatattccgctcgggaaaatcaccgggatcgcgggtgtctcgggctccggaaaatcgtccctcgcgcttggggtgctgtacgcggaaggctcccgtcggtatctggaggccctctccacctatacgcgccgccgcctcacgcaggccgcgaaagccgacgtggatcaggtgctctacattcccgccgcgctcgcgctccatcagcgccccgcggtgccggggatccggtcaacttttggcaccgggactgaattgctgaacagcctccgcctcatgttctcgcgcctcgcgagtcaccgctgcccccacggccactatgtgccgccgagtctcgcggtggcggcggggaagcccctcgtctgcccggagtgcggtgagtcgttctacgcgccgtccgcggaagagctctcctttaacagtcagggcgcgtgcccgacttgcggcggcaccgggatcgtgcacaccgtggacctcgcgaccctcgtgcctgatgagtcgctcacgattgatgaaggcgcggtcgcgccctggaacagcctcatgtggtcactcatgacagatgtctgccgcgcgatgggggtccggaccgatgtcccgttccgggatctgacggacaaagaaaaagacatcgtctataacggcccgatggtgaagaagcacatcttctaccggccgaaaaacggctccaattccgccggggaactcgacttcacctattacagcgcggtgaaaacggtggaaaacgcgctcgccaaggtgaaggacgataagggaatgaagcgcgtcgaaaagttcctgaagttcgacgcctgcccggactgcggagggagccgtctatccgaagccgcccgggccccgaagcttcgggggattacgctggatgccgcgtgccggatgacactcacggaactcatcccctgggtgaagggggtgccggcgtcattgccacctgaaatgcgccccatggcggaaagcatctgcggatcgttcctcgcggtcgcggcgcggcttgtcgacctcgggctctcgtacctgtcgctcgatcgagccggaaacacgctttccaccggcgagcggcagcggatgcagatcgcgcgggcggtcaggaaccggacaaccggcgtgctttatgtgctggacgaaccttcgatcggccttcacccctcgaatatcgtggggctcacggatgtcatccacgacctgattcacgatgggaacagcgtggtgctcgttgatcacgatgtgcagatcctgaaggaatccgactgggtgatcgagatgggaccggtcgccggggcgaaaggcggcaacgtgatcgcgaaaggaacggtgaatgagatcgccgggaacaaaaattccaaaatcggcccgttcctcgccgggacctatgagcgccgcatccggccggtgatcccgaagcccgagattttttcggaaggggagatcaccctcgataccctcccgatccacaccgtgaagccccttcatgtctcgattccaaagggccggatgacagtgatcaccggggtctcggggtcgggtaaaaccacgatggtgctcgaatccctgattccagggcttgaggcgatgctgtccggtggcaaactcccgccgcacgtaaaggcggtggcggcccccgggattgagcacgtgaaactcatcgactccaccccaatcgggatcaacgttcggtcgaccgtcgcgacgtacgccgggatccatgatgagctgcggaagatctatggtcggtcgaaagcggcgaaagccgcgggattcaaggcgggcgacttttcgtacaacaccggtaagctccgctgcccggtgtgtgacggcacgggggaaatcagtctcgacgtgcagttcctcccggatgttgacattccttgcccgggctgccgcgggagccggtactcgaaggcggcggaatcgatccgcgtcgcgaataaagagggggtggagaagtcgctccccgaactcatggcgatggatgtgacagaggcgctcaccttctgccgtgatatgaagaacgtccgcccgaggctagaagtgctttcgcagcttgggctcggctacctgacgctcggagaagagaccccagggctctcaggaggggaggcgcagcggctgaaactcgcgagcgaaatggggcgcacgcaggaagactcggttttcgtgtttgatgagccgacgatcgggcttcacccgcttgacgtcatgacgcttctctccgttttctcgtctctcatcgaccacggcgcgacgctgatcgtcattgagcacgacctcgatatcatccggaacgcggactggatcgtcgatatgggtccgggcggcggagaagagggcggacgtatagtggcggaagggacgccggacgacatcaagcgcacgaaggcgagcgtcaccgggcggtttatctgattggctttaaggttcgcgggggctcttcttctgaaatcgcgaaggggagtcccaggggttcatctctttttcccgccaatatataccaaggtagagcgaataacgcgctttaaaacccaggaatagcgtgaaatcagtccctaaagagggaagggagttttgattgtccaaaggtttcctcaggatcggatctggagaggttccggaggatggcgggatttaaaagtccacgtttcaggagaagagcgtttgcggccgtttaaggaagaccaaggcgtgaattccgtggattccgcgtcagacgttctgggcctgggggctgagagcattggttttcggatgactttttacaaccgcggggttttaagcgatcccaacgggattatatccggatgaaaggagcggaccggtatggtttaacggggcggaagggaagcggcaatcttacccaggatcggtgtgattgcctgttatgcatcgtctttgaccccggtggaaaagacgatactttgtcacggaataattcatagcaaatcacaaaataagaaaatccctgttttcagcgggaatggaatgaaaaaagcatgaaaatcccatagaaacaggagataatataagtgagtctgagttaacttttgtaaattttctttgaccaatcgatatgttttctgatcggagaaaattgaaaacaaagtaacttatgtaatacattaacggcccagagataatcaaaaagatgtgttttaaaacactgagagatgagggaaccgaagcgcgaagcccagtccgcgactgccccgaaggcgaagttcacggacctcctgaagaaccgcaacctccttctcacgtacctcctcgttttctgcagcctctacgggttcttcgtgatgtgcacgtggctcccggtgtatctcgaggaagtgcgcggcatcgcgcggtctgacacgggcttcgtctcgtcgctggttgcctggacctcgatccctgcggcgctgctttacggctacatctcggacaaaatcggaaaacgccgtccggtggtgctttgtctcctcccgctcgcggcctgcagcatccttctgatgctcctcacgaaaagccacgcgctcatgatcacggcgctcgtctgctacgggttcttcggcaaactcgccaccgacccgctcaccatcgcgctcgtcgctgataacacgccgcggaaccagctttccaccgcgttcgggatcttcaacttcgtcgggatgtcgtccgccatcatcgcgccgtccgcgacggggctgctccgcgatatcacgggctcctggaacagcggcttctacgtcgcggtcgggctcctgatcctcggtatcgtcgcggtgctctgcatcaaagagaagaagcagatctgacgcccgagctctcttaatttcaaataactttgctcagcctggcgggaatttctcccgccgggtctcagacaggctttgaaaagaagaatgtaaaaaaccaaacacaccgctttttcttccgatctttttaggaggaaatcattatgtcgcacggtaaatcggggtccggatggctagtcacctcgctcctcttcttcctcggctgggtcttcatgtacgcggaccgcactattctgagtccggtccagggcgtgatccgggaagaatttctcctcagcaacgcggaagtcggcctcatcacctccgtcttcttcatcatgtacaccgcggtccagatcccgtccgggcttctcggggaccgcttcggccgcacgaagatcattctttttggcttcatggtgttcggagccgcgaccgcgctcacgcacttcgcgtcgtccttcctcatgctgatcctgatccgcattctcgcggggttcggggaaggcttctactacggaccccagtacgcgatttcaagcgactccacgcccccgaaataccgggcgcttggctacgcgatcatcaataacggccaggcggtcgggatcacactcgggctcatcggctcaagctacatttcgtttggcctcgacctcggctggcgcgtgacgtttctcttctacgccattccgaccatcatcgtcggcattctgatttatctcttcgtgaagaccgggacgcacgcgaagaaggtggagcacgcgaagacaaaagccggggctgtcgcgagtatcggggagatcctcgggaaccggcagctcgcgacgatcttctttatcgcgttctgcaatgtctacgggttctttgtgatggtgacctggctcccgctgtatctcgcggacgtgcggcacataccgctctcggaaaccggcatgatcgcgtcgcttgtggcgtggacgagtgtcccggccgcgctcctgatcggcaggctctcagacaaaatcggaaagcggaagcccttcctcctcatcctcatcccggtcgcgatcgcgtcgattgtctcgctcgttcacgtccaggaatgggatctcctgatcgcggcgctcgtcgcctacgggctcttcgggaaactcgcctgcgacccgattatcctgacattgatttccgacgcggccccgaaggacaaactctcttcggtctacggtatctataactgcatcgcgatgctgggtgcgattctttcgccctatatcaccgggtggctgcgggacagcacgaacacctggaacagcggcttctatttcgccgctgggatgctcgccgtagggtggctcgccgcctggaccctcaggaaggaaactccggtaccggcgtaaagcgttttacgagattccggaaacaccaagggccgcgggggaatgtctccggcggcccttgtgattggcttgatcggtaaggagggaactcagcggtccgcctcctttttaagcgtcagttctgcgcgtgcgagttcagatgcaccggagccgcaacggtctgcgtgcgggtggtagacgcgacctgcggagtatcggctttgagtgacgcgcggatagacgcccgggcgctctttgagaccgggacgtaacgggtcggtttcagaccgagcgccgtttccatcatcgcgacctcattctgcggcatctggaagttagaggccttgacgcgggcagccgcgcggcgcacaaaccaggcggccgttgactgcggcgcggtcctcatgaacgactgataggacgcgaggtactgattccggagcgtcggattctgctgcatccgggggtcatgcagatagaagtggaggagcgagaaatacaccgactggacctggaacgcgtaggggaagtccgagtacgccttcacgaatgaatcgcagttcgcgatcacgtgcgagagttccgcgggtgacgggatattgcggtttttgttatccgcgctgactcgcccgttccccagcgccatcacgtcaaagtactgcttccacatcggcgggagattcgggagcttagcgaagaacgagtagagcggtgtcacctcaaactttgaccccgaaatcgaatacgttccccagtcgaggatattctcatgcagctcatgctcgatatcgccgaattccggttttccgacgagatccgataccttaaactgcgacgcctcacggctattaaatgccacgaggttattgaggtacatcttgtagaactcagggaaaggtttctttgcggcgtagagcgacgcgttggccttcgcgaggctgatcacgctgtcgtgaaacgccttcagtttcgcgtccgtcggtgtcgcgatcggcttcgccgtaaaggggttccagaaggtattcagagtgccgcccgcggcgagcgagttcgccgcggcagacgctaccgcggatgacgccgggtccgcggggtgcagcgtattctgaccccagttgatgatcttcccaagggcatcgccgatgggattggctgaggcagaaagcgacgcgaagcacgtaagcagtacggcgatttttatagtttttgtatgcatggggaaatcaatgaagagtcgctttttagaccgatttattttaagtcgaaaccccgttttttccggcagattctgtcatcaatctgtaatcatttgatttatctctaaatctgatctgcgaatgattatcagatcacgggaattccggcgctttcggttatgtgtttgtctgccggaggaggagaaaaccgataccagagcgactgggaactgcccccaggaagcgaaaaaagacagaccgctgaggacgagggaagagggagcagagtcagaaatacctggaacggaccgatgagtcgttcagttttcagtctgtcgtttttattattaaatactatttaaaaacaaataattaaataaacaaacttaaagtgccgattaaattttagtggcttcagttttgagagctgcgcgggggctattccccgcgccagacagaaagggcgggaaccgaagtccccgcccattgagacacatgctctgactcctctgagagtcaggtgttgatccgcttagccccaggctttttcagccgcggcagccttaccggcaatacggccgttcacaaggcagtcaagcgtcgcgcaggatccgagacgaaccgcgccatgcacgccgcccgtggattcgcctgcggcataaagtcccggaatcggctgatcatcgacaatcccgatcacgcgcccctggatatcggtctgcagtccgcccatgcagtgatggaccttcggggagaggtatgagaagtaccaagggcccttcgccatgggttgcgctttcgggaagaaagtgcgtcccatttcgtcacctgacttagcggcaagcgccttgttgtagtcatcaaccgacttcttaagcgctgccagcggaatgttattcattttcgccacgtcttcaagggtgtcagccttatgaacaacgccggccgtgagttctttttcaagcattcccgggcgggccaccttccaggcatcggtcgctgaggtatcggcgagcgcgatgcacttgtgcccttcgttattcaggttgattacggcatcggcacggaccttgcgattcgcgagctcattcacgaagcgtttgccggtcgcgcagtcaacccagagtcctcgggtagctgccgctccttgagcgaagtagagagcgatgcccattcctttttcctcaggcgaattccaggggccgcactgaatccagtcctgctggatctgcgtgcagccgatacgggcggtttctcgccagagttcgcttgtcgcgccgggctgattcgtcgtatcgaatttcgccgtgagcttcgggtcatactttgtccggaacttcacatccgcaccgaaaccgccgtagcaaagcaccacagccttcgacgccttgatgtatttcacctttccggaatcggctttcgggaagcggtagccatcccgcaccttgagtccctttacgcgaccgtccgcgtcgcggatgatcgtctccacgtagcagcgggtacggactttgacaccctgtttcgctaggtaatccacttccttctgcacaatagcggaaccggagccgttctttgtatagaggaaccgggggacggagtgaccgccttcctgcccgactttatccatgtattcaacaccgagcgttttgacagtccactcccaggtcgggtaggcctcacgggccatgagcttcactttttcggggtaattgagaccctgaccttcacggatgatgtcttccgcgagaagctgcggtgaatccttgacgccaagcgccttctgaggggcgtttcccggaactgagagaatgccgccattgatgatcgagttgccgccgtaggtcggcatcttctcaagaaccgcgaccgtcgagccggcagccttcgcttcaattgcggcggcaagcccggcgaacccggagccgattaccaccacgtcgtacgtctcatcccacttcgcgggcatcggatccttcggggcagccgcctaagcggggcctgaaagcattgctccggcagtcgccgcggcacccgcggcaagggaatgacggcgattaagatcagtcatagcactctcctctgtttactggtcagaaagcctaattacaaagaactatctattcctattaaacattgaagattctgttatagaaagagtactattgaaatcaacttgtgaaattcacaatttaacgtttattgacggggagatactcctccatgaaagcggtgagcaatatcgatgcctggcgggttcttgccgcgatcgcggagggaaacgggattaccggcgcatcggaatccactgggattgacctcccggcctgtacgcggcttattaagaagcttgaggaagagcttggctacgcgctggttgagcatcaggtgcggccggcgcggctcaccgatttcggtctttcggtgcttcccgccgcgcgggaaatcgcggctgagcagtcgaggattctgtccgccgcggcatctttcactcggacgccgctcgttatccggctaagcgttccggtcaataacccaagaaagagcgtgaatgagcacatcagaacttatagggaatttgatccctcgctttccgttcaggtgatttccgatatggatcatcaggatgtgcttgaggggcgggcggatcttgcctacattccgtacgacccgccggcctcaggtcttgtgattctgccgattgggcgggcgatgaatgtcccagtggcgtctcccgggtatctggagacgcatccctttcctcacacgcctgaggatctcattcatcacaaggtgattctcagggagtcccgccactatccggtgacggatcatctggagaaaaacagcgagaatcggccgcttcgatgcgcgggaatcgctttctctggtgatgtgctttcggggcgtgaatgtgtgctgaatggggaaggagtcgcgcttgatctctccttctcccggtgcctcacggagatcaaagaggggaaattgatccccgtgcttgatggctggcatcgtcctgagtggcatctcaatatcgttatcgcgaaagaaaacgaaagcaacgcgcgtctcatgaaattcgctcggtggttcgcgagcgccgaggcttttgctctgaataaacgatccgaaaagcgtgagtctatgatgaaagacctgttcagggcgtagagaaagcatctccgcggatcggttcacgcctttcatctgtaccgcctttgccgtatccaaacagtgcctcaatatcctccgaaactccctcttcaagccgatattactaaatagaatatcgtatgtagaatagcgttacaccgaagcggaaaccggatacaaaagaaccgattttgccttcccttcggtactgaccacaacgcttctggagagaaaagatatgaaaaataccgccatctttgccgcgctctgcggcgctgctttcgcgatgtcaggcacggccttcgccgctccgtcggtgctaggggtaacgacgggcgcgggctacatcccgatggtgaaggccgtgaatgaagtctgcaaagcgcctgacgtgaagattgaagggcatttcggcggcaacatcggtcaggaactcgctcagattgaggcggggaatgacgtgtcggtcgtggtgtcagacgcgtcgaccttgaagaagatcaagtcgaaagtcacctacacgaagaccgtgacgcttggcgacaccccgatgatgatggtgtggaagaagggcctgaacctcaagagcccggccgacctcacgaacgcctccgtcacccgtatcgccgctccggatccgaaggccgcgatctatggtcgcaccgcgacccagtggctctcggggcagaagcctgaagtgaagaaggctcttgaagcgaagtggctcacggtcggaaacgttccgcaggcgatttcgtatgtcgtccggggagaggcggatgtcgccttcgtgaacgtggtcgccgcgaagaagaatcacgagaagcttggcggcatgatgccggtgaagacgggttacgaaccgatcacgatgacggcctctatcgtgaagggagccccgaatgaaaaggccgcggaacagtatctcagctgcctcacgaccccgaaagcgaaggccgtgctgcagaagttcggcgtgggtgacgcgaagtaagaacgggtttgggtgtcatggaggggccgtactgagtactggccccgtttcatcctgatggcttcaaaaattgaagaggaaatttctgatggtctactttccggattcttatttggatgacctgatccgtgaggacgcgccgtacggcgacgaaacctccacgcttctcgggatcgaggatcagccgggtatggtggttggggctccgaaggtgacgggcgtggtgtcgggtgtttcggtcgccgcgaagctctgccgccgggtgggtctcaaagcgacggaacacgtgaaggatggcgacagggtcgaggcggggactcccgttctgacgcttgaaggcaccgcgtcgcagcttcacctggtttataagaccgcgcagcggctcatggaaacgtgctccgggatcgcggggcggactcgccagatggtggacgcggcgcagtccgtgaacccaaactgccaggtggcgctcacccgcaaacacttcccgggcgcgaagcttctctcgctctacgcgattctgactggcggcggtgtcttccaccgcgcggggctctcggaatcgatcctcgtttttgatcagcatcgggtgtttttaccggatccctttaaggccgtgcacgacgcgaaactgaagtcccctgaacgccgcatcacggttgaagtggcgacgggagaggaagggctcgcctattttgaagccggagcggacgtgatccagtgcgagaagttttcgaccgatgacctcaaagcttttgtggacgcggtgcgtgccaagtaccccgcggggaagattttggcggccggcggtatcaatggctcaaacgctgcggactttgccgcgaccggcgtggacgcgattgtgaccacgtggccgtacttcgcgcagccctttgatatcaagatgcgtttcaaggcgctttgatgcctcgtcatggtgtttaaccgaatccttggtggggatggagcccccgcgggtgtgtcaggaagcccgcgggggctcacttgattttcatcatcggatccaaagaaagacaccaacgcatttttattgagtccgggaaatccttgatttggaatatgactacatattacgaatgagaatcaaaatcatctccggattcaggaaacgacctctggaagcatcggggaaaaatccgttatgtccgtgagggggctttaaaaattggaaatgggaggtggggcttatttagcttcggaatgaagtttctatcgggtttcagtccgtcattcggtgtagggaaataccgctcagtatcttttaaaaccacgtcagaaagagggttttaagatcgaaatttccctttgtagaatgccgggataccttacgtcctgaggcctgtaaaccgggcttcaatgacgtattaaacgacagaaaccttctattggaagttaaaactatgatgactaagcctctccttctcgcggcggcaattggcgctgtaaccctcgcgatctcaggcacagcttcggcggctccttctgttctcggtgttacgacgcccgcaggctacatcccgatggtgaaagcattgaatcaagtctgcgaagcgcctggcgtaaaaatcgaagggcatttcggcggcaataccgggcagcagatcgcccagattgaggcgggaagcggggtctcggttgtggtgacagacgccgcgacgctgaagagcatcaagtcgaaagtgacctacacgaagacgatgacgcttggcggtacgccgatggtgcttgtgtggaagaaaggactgaacctcaaggggccagaggatctcaccgacgcctctgtgacccgcatcgcggtcgcggatccgaaggccgcgatttatggccgcaccgcggctcagtggctttccgggcagaagcctgaagtgaaaaaggcgctcgaaccgaagtggcttgccgtgaggaacctcccccaggcgatgtcttatgtggtccggggagaagcggatgccgctttcgtgaatgtgctcgccgcgaaaaagaacgaacggaaactcggcggctcggtaaaggtgacgtcagggtacgagccgatcacgatgaccgcttcgatcgtgaaggggtcgccaaatgaaaaggcggcggaccagtatctcaattgcctcggaaccccgaaagcgaaggcggttctgaagcagttcggtgtagggaacgacgtctgaagcgatttttaaataaggaagagggggcagcaatccttacccctcctctgattttcaggactaaaggaagagagaagagcagatggtttactttccgggtgcaacgttgaatgaccggttccgcgggggggagacttcccgcggcagaggggctgcggcccccgagccactcctctctctcctggagggcagggatagagatcagcgggcggatgacgattcggcgtttcatagggacagcgcggctgaagaccgctcggatccccgtggctctgagtctctcgtcatggatctttcctgtgtccggggaaagagccgctttcacttcgtcctcaatatgcccctctcaggcgtcaccgctgtgatgggggagagcggcgcggggaagaccacgttttcgcagctgattgccggtctgatacggccgacggaagggttcctgcggctcggaaaccgcccgtttgcggatacccatcgacacttcttcctcccgccgcataaacgcggcatttccatggtgttccaggatcatcgtttgttcccgcacctcacggtccgcgggaatctgacgcttgcggaaaagtggggagggcggaaggcgcgcgtggcgctggaggatgtcgcccgctttttcgaaatcacgccgttcctggatcggaagccggggacgctttcaggcggcgaatcccagcgcgtgtcgctcgcgcggggcgtgatggcggcggattcccttttgattctggatgaggcgctcgcgtcgcttgatcctcctcggaaggcgaggctccttgagcaaatcgcggcgctaccgaccctgattgacgttccggttctcatgatcacgcattccccctcggaagcccttcaggtctctgaaaaagcgattggcttatcgaagggacggatcgcggcgaccggagacacccgctcggtgctcgcgtcgtgtggcttcctgaaggaggaggggaacaatgcctgagtggctttcgatcttcctatcccccgacctctgggaatcgctcacgggacccctttggctcaccgggaacgcgcttttctggagcctcgcgctgcatgcacttctgtcgattccgattgccttttggctcgcgaggcgtcagaacgttctcacgaaactcgtgggatttgtgacaacgcttccgctcatcttccctccgatcgcgcttgggtatctcctcatggtgcttctcgggcagaacgggtggatcggcggctggcttaaggcggagtgggggatccgggtgctcttcacgccggaagcggtgatcctcgcggcctttgtggccggcattccgctcgttgtccggccgcttaaagcggcgttttcggacgcgaaactccgggacctcgaggccgccgcgtcgctctgcggcctttctccccttaaacgcttcctcctgattaccgtgccgctggttcggaaaccgctcgccgccgcctttattctcgcagccggccgagcgatcggggaagtcggaatcacgatgatgctcggcggcaatatcgaagaccgcacggccactgtgtcgcttgagatcttcaacgcggtgggccgaggtgactttgatgaagccaccgcgctctgcggggtgctcgccgcgatttcgctttgcttctatgtgcttctcgaccgtctgggggcgagcgataaggcctgaggctcttcaatcctcaggcgtatcagccgagtctctcggtctcggggcggtttatatcggagcgctgcgggatgaggaaaccgcgctctgcgacctgcttcatcttcccgaacaaagctttgtggtggctgggctcctcatcgggtggccggcggagggcgttcagacgctcgtccgttcccgccctcccgcagaacgccgtggcgtttaagaatggctgcgggccggtctatctgaaagaggcggttgcaacctacgagcggaacttccgcgcgtaccgcgaggcgaacggaatgaaactcaagtcctggacctttgaagtcctgaacggggcaacgagccttgaatatatggatggccgcgaaaacatgaccgcgatgctgaaggggcgcggtttcccactgaagtaaaacgcatccgtgaaagcgtgaagactgtttttccaattcacgcctacacttcgggacagtttgaagagggctcttcgcgcctcttcactgctcaataaaagttcgccgaaacggagaactcacagactgggctctccgttttttacggacgaaaggaaaaaatgatcagccgccgaatgctgttcgcctgtgccgccgggatcgtggcgggaaccgactcccccgcggaaacgaaaccggggagcgataactatgccgtcaaagttcccgtcagcgatggttcccgggatgtcacggccgcgtttctcgatgcgctgaaagcccacggccgggtctatgtgccggagggaatgtaccggatcgatagccgcgtcgacctctcgcgtctctatggaccggggattctcacctttaacaccggacacgaggtggcgctcacgacgccggcggattcggagacacttgatcagatgttcttcgccgatctgaagtacgcggtggagaaggtaggggtgcaggatatgtcggtctgcgggagttctgtcttcctctctcaaaacgtccggaatcccggttggagcgaaaaatccgttgtccgggtgtcggaatacgcgtttccaggattcgctgataaacggccggagttccggatagagaccgatgccgaccagttggcaccggaatcgacggcggcgtttctcggtctcgggcacgggcagggctgccaggccgtgcgggaagaggggcggaccgtgatctacacgacaaaaggtccttcagccggctctcctgccgggaacggcgttacccggatcctgtggcgcggaagcgatacccgggagtcggacttccgcgtgacccgaacaccgaagagcgacttccatcaggtggggctgtcgccggatggcgaatacctgctcgggttcgtgcaggggcggatcaccgtctttaagcggctagagcttctagctcaccccgacaccgcgaaacccgtcctcacgattccttttcgcgatgaacgtccgaggcgctttgtgtcgggtctgacaaccgacggccgctttatctatgtgctgcagagctccacggccgatccctggatgaaacagcggatcgatgtgttcacgagggaagggcggcatcggaagacgatagaaacggattctttcctcgcgtttctccctgaagccgcgaaagaggggaccgagcggggctatttcccgatcaataaggaagcggaggggctctgcgtctcgcggaacgcgcttctcatggtctgtaagctcaactttgcgattccgcgcgacacggtgacgcatgacgggcggttttggatcgctgcgcacgactcaaaaggagtgccgccgcccaatctccagtactggcgcgaggcaaaaaaggcctttttggccgcgaaaccctggaatccggaccaaaactaccgcggattccggggacaggtcacgcatcggtttttaattgggatcgttccgcgcggttttctccgatcagacgctcccttgaacataaaatagaatcctataatacaaatcgcgtccgcccggaatcgaaaaaaatcgatttccgggcttattttttgggatttttcggatcctcattttcttaaaagtgatacataaatttacctctgtaagctcattttctatccctttttactggttatttatcagggataaattagtgtcgcaaaaatattaagaagttatcattaaagatcaatctaaactggtgatttaaagatagatatcaatgcttaaaataccgttattaaatacggtaagtaccggacaacgacttttagctgctgtgggtggaaaagaattgaggtgaagttgaaggcaccgttgggggcggtcatcgttgggcgaagtgatttttgttacatgcgaggagtggatcccgcatgtgtgagtgcctataatttttaaaagacgctcaggaaaatcagaaatgtttaaaaaatttgcgtcggtacagggagttaatccggcggattggccttgattcccttactgtgggggctctggaggttacgatgaagaagctttgtgtgttggtggctttgacacttgcagtgacatcagctgttgaggcaaaagactacccaattaagaggccagcaaacgtttatggtgacgtttatttcgacatgggccccgaagcgaatgttcgacttcattgttggctttatcataaggaaggggttgagcaggagattagagcgtgtcgcccggaagatatcgctgaaccaacccccagaaaaagaacggctgctgattatgaacaggctgaacgcgagatagcagcggaaaaagagcgacaagctttggaagaaaaaatgagagaaaacaagtttgaacgctctctgggtgaagtcagcggtgaggatatctactacaaccgggtcaccaatcagacgatgatcatcaataagaagaccggagaagtcaaaatacggtagaaagctctcgtttaggctccgttatggagccattcttttattgcggtgtcccaaaaagtgtcagagcttgattttcttagcggccttacgaagccgcgccttgccgcgcaaatcgtacatgacggtggttgtaatgcttgagtgtcccagcatgtctttcaccgttgaaatgtcgacgtttttagcgagcagccgggtagcaaaagtacgacggaggtcgtgcgtcgagatgtcttccagaccagcccggacacggtactcctgcacaatatgtccgaccgcatgcggagtaagcggtccagaggggtcaaatttccatcctttgaagaacttcccgaagacaaaatcgccttcttttccgcggacatccagccatttcttgagagcatccttcacctcggggatcatgaaaacctcacgttccttgtcccccttgccgatgactcgtatagaactgtccgcgaaactgatgctcttcagtttgataccagcgacttccgcccggcgcagcccgcagccaagcagaaggcagagaatcgcgtgatcccggatcgcaattgggttcatctcgatctgggtcgcagagagaagggcttcagattcgtcgttagagatcgctcggcctgccgcaagtctaagaaaacgcacggattttatgagtttgatgcgggcataggcttcttcactcatctgctttagaagaaaggcctggttcgcgacgcctttcaaagcggacagatagcagttgacggatcgggggctcatgtggggctttccgtcctcgccaggctcctgcatcgcggtaataaaggcaagaacgtgctcgtaccggatcgcggaccaattgagataacggaggtctttagccccagcccagcgtgctactacgtttagtttgcttgtcatcgtgtaacgtgaagtaccacgatgcaaagttgcaataaaggctaaagcaggattgatttcaggtgcgtcaaattcgttctttataacgagctcatgctgaaccggatctagcacctcataatccattttttgtatacctttaaagttgaaaaacttattttctgaactcaaaaatccagattctgaatgcgattatagaaaaataggatcccatttttattagagtcaacattcagaaacaaacgggacaggcagcagaaaagcgcttttttcagttccggaacaaataggatcctataatcgacattatattatcctatttttggcgaaaaaagggcggaaaaatgaccctgagagccatcaaattgaatccgatttggtgatcaagtgctcgttcctcaaaatttgagccgttttaaatcaatctctgttttctatgcaaagctaaatttacagatttatatctgcataaaatctgagaaccttgaaatatcctgaaatctggatctcggaacggaacgctaaaagtcaggtttgggaatccgggcagtctgggaagcatccagagattttcctcatgacagacgtttgagaatgcgggcgaagaggctgtgtgacgcccagaaccgatcgaaacaggactttgggcaggaagggtcacgcattaaggaattgggtcagccaggtgttgcatccttcagtatggtcttttcgatttatttccctcctcagcgcttaaattcacagcgtggaagtgcagtcagaagccgttcgtatcagtggcaccgcagagccagcctctggcgtcacgagaaaatagtccaccctgctccttcctttgcaacgtgacggttcttaatggacattacaaattgcgcctctatgcgtaatgaaatctatatatatgaaaacttaaagtaatgaaatgaatccatttatttcacgactcttttttaaacatgttcgaaggctatacttttaaaagtaacaaaaatgatttccagatatagctcgatagggagaccttcaaatggataaatttgtgttggttttagctgcggcactctgtttcagcacaagtgctatcgcggaagttacctgtcatactgatgcgtttggcgacgtaaactgtaccggatatgacaaggatggtcattatgtcaacaccacctctcacaaagatgcctttggagatgtcaccacaactggacatattgggaatagtaaagtaaacaccacagctcacacagatgccttcggtgatgtcaatacaaccgggcatatcgggaatagtcaggtaaataccaccgcccacacagatgctttcggtgatgtcaacacaaccgggcatatcgggaatagccaggtaaataccaccgcccataaagatgcctttggagatgtcagcacaaccgggcatattgggaagaaaaaattaaacagtaccgcccacacagatgcctttggagacacgtcctacaggtagttataactgattgttcctgacccccaatttaaagccgctccacattcgagaagcggctttttattgtgctgtgcgctcttttacctcaccttgatcgagaaaacttctttaagtgcctttccactcgaacgcctgcagccctgctcccactaccggcgtgcggctcaccagaagggaattcagagacgttatgaagggtgattgaaaatcggatttagagttccgtgtacttctttgatttgccctttgccttttcgaccgggtatttcgccgcgttcttatcaatcttgttccggatcgcttccggaatgtcgatattgagggcgttagccatatagatgcagtagatcatgacgtctgcgagctcttccgtcatttcaggcttcttacgggcggcctcgagatcagcgccggaccactgaaagagctcaaggagttccgaagcttcaagagaaaccgagatcgcgagatccttgggattatgaaactgcttccagtcacggtcgttccggaactcgatcgccttcgctgccgcttcttcaaatgtgattttgctcataatcgtcttcttattccgatctgtcgaggttatcagataaggtgaggaaagtatcaagactagtggcgtttgtgctgcttatcccatcggctcgtagaaaaacgcaatggaatctgtacctcacgaggcgcaatgaaatctgtacccccttgaaccgaccggatttttcacccaacctttctgggaaaaggggaaaagcgtttagatttacaaacgcttgggaacagcggaagttctcaaaactttataaaagatcaagcgaaaaaaacgatggcagcataggaatagagagaaatataacggttgccacaatgcagtttaaaagcgatattcgtttatcgtctgacgattatttaaaaacgtatttcactttcaaggttggagatatcgcatttgagggacatcaaagtaaagaatttcgttatgggagatttgttgaaaacgacattggtgatggcgttgtttcgcacatatttaccgtctttaggcctattcaacgattcgatttgcatttctggaaatatgctattagtagcgaaaatttgatgcaaaaaatcttatctaggtctacgaaagcttcaacgatgatgcacgacttggtgcctgaagactttcttaacgaaaccttcctggttccgtccattgatgagcaaaaagctgttggaaaatttctacatcagatcgataaccttcttacccttcatcagcgtcagcaaaatggaggctatttatggttagagaactcagcaaaacaagtctgttttgcgattattacagccagtggatacaggtctacaaagaaggcgctgtcagaccagttacgctgaataaatacaaaatgacgctgtcctggcttaagaaacttgctcccggcctaaagctctgcgacgtttcccgcgtagagtaccagcagatcctgaatgcctatgcggtttatcacgaacggcagacaacgatggacttccatcatcagcttaaaggtgccgttattgatgcggttgatgagggatacattccccgtgatcccacaagaaaaactatcatcaagggcagaacgccctcttccaagaagatcaaatacctcaatcaatatgagcttcacacgctgctttccagcctggatttaagcggcaagatcaattgggattggctgatccttctggtcgccaaaaccggaatgcgattttctgaggctttggcggtcacgccaagcgactttgattttgcccaccagatgctctcgatttcaaagacctgggactataagggcgatggcgggtttcttccgaccaagaataaatcttcggtcagaaagatccagcttgactggcagacagtcatccagtttgctgaattagttaagaatctggagccggataaacccatcttcgtcaccaaaacccacgtctacaactccacagtcaataacaggctggcccggtattgcaaaagagtccatgtaccgattatctcgattcatggactccgtcacactcatgcttctctgctgctgtttgctggtgtgtcaatcgcgagcgtcgcgagacgcctcgggcactccaacattacaaccacgcagaaaacctacctgcatatcattcaggaattggagaatcaggatgttgacctgattatgcgagccctttcggggctgagttaatgttttgtttttatgtgaactcttttaaaagctgacgctgatgaagtggttccgacagttcctttactcctcaggttcctccaggtccaaatcacatttatcgtcaaggataaattcccgcagcgcggtatcgattttcatcgtgaccttaggcggcgggagtcttcggccctcgtgcttctcgaaatagtctttggctctcgccttatcgacagtgtctttcaaagcatcgaaacgcccatattcattgatgtttccctccgtgagcgtcatttccttgagaccgcgaagtttctcctcatcaagcccgaaagtctcggagaatcggtgaatccggtcgctgtcggcgcggaccatatactccgtaatgtaatcacgaagcgatttccccggctcgactttcacatcaccgcgctgaatgtcatgaaggaagatgttggcgtacttctgctcatcctgggagagggatgcaaatgagttatgaagctcagcttcagcctttttggttatttccgcattggggccgctgaggttcagctccttgatccatttctcaaaacgggaattcatgtactcagaatcgatcatctcggtatcgatcgtcgtgagatacccatcaatctcgtacggcaggtctgatccagccgcttcggtttcttcttttgtgggcgccagttccttatagcgctgagccatcgttttgaagtcccgctcatccagctgtacatcgatcacggtctcttcgccagtgtcgccctccgcctcttcacccgcttcgggctcaatcaggtagctgcgcttatcccacgtaaagccctgaagctcagccgcttcaatgtactcattcatctgcttgaagagtttcgcgaacttctgcttcaccggaatttcgtccgggagatgggaaaagtccggaatatcagcattgataaagagctgctgaatgtcctgataggtgttgttcaggttccgaaggttgtctttcagcttgtcgacaaagaggccgaacggccggtcgcccgagtagagtttgacggcgtcctcgacgttcttccgctgagtgttcggatagcggtagtaccggatggtgccaaagggcttatccggtccaaagagccgattcgttcgggagaacgcctgaatcacacgttcgtattcgagcaatttgtcgagatacagcgtgttgatccacttggagtcaaagcccgtcagcatctgatcgacgacgatcagaagatccagctgctcttttttatcaagatcgattcgggtgtagggctgcttatgagcgagccgggccgcgatgtccttcttcatcagactgaaggtcgggattgtgaagtcctggtgatagcgctcgttgtagtcccggacgatctcctcaagaccatcttccttgtaattcgcgccagcgttgttatcgatgttggaatcaaagagtgccgtgattttcaattcaggcagctctttcttcatcaggcggtagtactcaatcgcctcattgatgctcgaagtggcaaacagcgcgtggaacttgctgttgtgactcaggatcggccagtgttcccggatatcctgaaccaccatcatctggtgcgcagtgcgccggtactgatcggcggggagatagtcttctatccccttctcgaacttccctgaaatgggatcttttgttcctgccatcgggagctgcataaagacgtagtacttctccttttgcacatccgtcatgttcttcacgtcttcatggcgaacatgagccttttcttcggccactgcctggcggaggtccgattccttataggtgagcaccatatagggatcgaatccgagcacgttcttatcccgtatgccgtcagcgatactgtagcggtgcagctcgtccccaaagatcgacgtagtggtgttctgcttcttctggttctcttcctggatgggtgttccggtaaatccaaagaaaatagcccgcgggaaggtctgccggattgtcagcatcatttcgccgaaggtcgaccgatgacactcatcgatgatgaacaccattcgtttcgtattgatgtggtcaatagcgtcagacatggcgccgccgcgggcgtccttgctgatgcggctcatcttctggatcgaagtaacgatcagggtgtcattcgcgctgtcgcttcgcagtttgtgcagcagatcggtggtgttttccgttgcctggattgactcatcgtcagccgcgaacccctgatactcacgaaggctctgagtgccgagttcgatacggtccatcaggaagatcactttatcggcgtcacgggacgccgcgatcagctgggcggacttgaaggaagtaagcgtcttaccggaacctgtcgtgtgccagacatagccgcccctctgacgaggctcatcccatttggttttggagacgcggtcagaaatagcgttcgcggcatagtactggtagcttcgcattaccttcaggacaccatcagtgtcatccgccacggtgtagaaaccgatcagctgatgcgccatggggatggaaaggaacgacgttgcgattcgcttccagtcattgatcggattgttattgaaatcggcccagtggaagtaaaaatcagggttgaatttaccttcagggcccgggttcgcgaaataccgggtctcctccggattcatggcgacaaaaatctgaacgagagaatagattcccgtgtagattccctctcccgcgtatttttgaatctgatagcacgcctgactcaccggaacattcgtgttcttcaactcaatgtgaataaccggcatgccattgatcaggagaagcagatcccctcttctctgactcttgatatctgagtgaaccgggaactgtggctgctcgacgatctgatagcggcttttaccggccgcgatttcctttcggtcgtaaatcttgagcgaaatctctttcccgaaatgtgccttatcgtcttcgttatcgcgtttgataaggatgctgccgccattgatgaagccattcagcttcacaggggtcctgagagacttgatctgctcaaggatctgccccatttcaccctcagtcaaagggtaatcgttcagccggtcgatctgacggttgttttgaaaaagaatgtcggcccagtttttgatcagatccttttctgaataattgcgcaggattttcttatcccagccgcattcatccgtcagcttcttgatcagggccgcttcgaattctgcttctgaattaaacacggatatttctcctacgcattaaacgaacattttttccaggaaagcctgcttcacgtttttaagcatttccagctttcgctgatgaagggtaatctgctgagacaacgtacggaagaaattgccgatcttaatttgttctttcagagagggaaatgtggaagacgaatccagaatatcatcttcatgaatagcaatttgcgctgttccaccctctatgttagacaaaattacatcttttctaaaaccataggttttgaaaaacgcaaccagaaagtcttgattgaattttttcccatcaactgcaatggttggcatgttttcggttacgatacaaccatctacgtcatttttagcaaaacctataccaccctgttccaccgtttgacgcgtaaaaataagagtcattggataatctcttaaattgaccctcgcttgacgtttacgtccaatatttctccctggttggcttcctctaagggaaatttcccccgtattttttacggtaacctgcttgtaaatttgatcatcttcaataaacactctgtccgtatactcagtcatcccatcagacagttttcgctgttcccaagcgccagtaaatcccttgaatcgaatttcagggacaacctcaccttctttcggaaacattttttcgagcatcgattttttgatgttcaggagcttctcatactttcgctgatgaagggtaagaagggaatctaacttgtttaggaaagcaccaatttttttctgttcggcatatgaagaaacaacaattggcatatcaagaaaggtaacttcatgaattcgtttagcctttctacttccgttagcaatgttcccaaatttcaaatagaaattctgttgcgttacgcgattttgtaggaatgctccatcaatctcatgcagatcaaaggcaggggaatccaaggtagattcgaaccggtctagagatttagggacgataccgaatgcggcgtgaaggaaatcaagctttccatacatgaactgtcccgcgcgacgaacgtaatactgagtattctggctgccgccataaatatctgttttttcgactactccttttccccaaagtttcactgtcagttttttagcatcaactccggtatacccaggaattttgctgagagttaagtaatcgccaatctttcgctgttcccaagcgccagtaaatccggcaaaacggatctcaggttctttagctttttcctgcatttttaggcctctcccagcagtttcttgaactcagcgatgcccttttcgtcaaattcgctgccagtcagctcatcaagcattccttggagttctttctcagtcgtctgaatctgctccccgagatcagagagcgtgatcgaatacttttgggtgagcgcttcaagcttcttcccaaaatcttcgagctgatcagactgctgctgcgcgagttccttcagaagcgcgttaacccacttttgctttacgagcgccttggcctcatcgtcagagagatgctcaatgacttccttcgtcttaacttcgaggtcttccttacccttcttcaggtctttcttcagcgccttttcttctgtgaagagcttcttcacatttttaagtaccgcaagcgtttcatcggacgcggctttggccttcaaggtcttctcaactgccgcggggacaaagctatccttggcgtcattcaggaagtcggcgccttccttaacgtcctcatcaagatcgtcgaggagggattcaagagacgagccgatttcctgcagccgatcttctccttcctgcagagcctttactttgtcggaaaggagcgtgttctgaaccagatcaaacggcaggacacggccgccccattcgaatgacgacttgccgcccttcgatttcgtctccgtcagaacatcaacctttctgataatgtccggaccttccgtctggatcacttcgaggtcctggctgatcttcttccaggcggtatcgaggtactgataggactggtaggggtcgagaatcgggagtcccttcattgaattgaagagttcagcgctcagaacgtcctcttccttcgcgagaggcacagtcatcatctggtcaatcagctctttcgacatgaaagcgtcaaaagactttaggatgccctgatactgcttctgccagccttgcacatccggatcctgaagcagcgcgctgtgaagatccgaggcggacggctgatagtaggcgccgttttcagtcgtaaagagtgaggacttcagagccgggaaggcatcccagtatttctggaaggcgttcagttcatctgccggaattccgccgaacatggaggcgtagatatcccagttctccggtttttcagacgtatcgacgtaacgcggaatattgaggttgtagtcgttatcgcggatttcctgacgggacacgaccttcgagaagttttcaaccgtcttccgggcagagaccgtatccacgatcttcttgatatcgcaggcccggagcttattactcttcccttctttctcaaagcccttagaggcgtcaatgatcagcacgtcgtcattagtacgattctttctcagaatcatgatgatcgtggggataccggtgccaaagaaaatgttggccggcagcccaatgatcgtatcgatattgttctggtcgatcaggttcttacggatcgtgccctcttcaccaccgcggaacagcacgccgtgcgggagaacgatcgccatgatgccatccgacttcaggtgatagagatcgtgaaggaggaaggcgtagtccgccttgctcttaggcgccagcccgtacgacgcgaagcgaggatcggtttccttgccagtcggatcccagacctgggagtacggagggttcgacacgaccgcgtcgacatacagtcgcttatacgtggcatcaggatcctcatcctcaaagtacggccagtcgtcttccagcgtgtcgccgtttcgcgtcacgatgttggcggccagaatgccgcgcatgatgaggttcatacgcgtgaggttatacgtgttctgcttcagttcctgggcgtagtacttgacgcagttttccttgccgatatatttcgtggcgcagtggccgatattgataaggagagagccagagccgctcgtcgggtcatagatctcaatatgatcacgatccttcagatgccgggcgatgatttccgacatcaaaagcgacacttcgtggggcgtatagaattcgccggcctttttgcccgcgttcgccgcgaagttgctgatcaggtattcgtagatgaagccgagaacgtcgtaatcctgcttcccgtccatcgggatgtctttgatcaggtcgatgaggcttcggatcgcctttgactgggcgccggtgttttcgccaagtttcgagagcccggtttccagcgtattgaaaatcttgtcgtaaacacgcttatggtacgggttgatcagacggttaaaggctgcgagagcgtccgtcacgtcgctcaccgagaaatcggcacccttcttcagccaggtcgagaagagattgttgtagctgatgaagtagccgagattctgctggacattcttgaccgtttctttgtcatcttcggtcacctcaggcagaaactcatccgtccagtcgatcgacttcaggtaccggacttcgttgtctgacaggaacttatagaagatgaagccaagaatgtagtccttgtattcgttcgcttcgatcttcgaccgcatacggttagcggattcccagatttttgctgccagtgcctgcttattcatgctgctcttgctccgattgatgaatcttgtctgagaggctgagaaaaacaagagccggatcaggctcctggccgatcttttcagcctctgccatgcgctgtcgctgaccccgagaaagcgtatttctggaggggtatttcaagcgcgtttacgcgatatgttattacataccgggtgaaactagaaatcttttttaatcgcagtaccaacgggagattgatcgttatttcgaaatgatgccagcttctattttgtgccactagatccggttactgactatctgcctgactttcaacgctcactctgagcgaaagcatctcatcggcgctgcgaacaagtgcttatcttaatgggtcggaggggtctttttgagttttttacggagcgaaagtgacccagatcgagtacatggaggatagtgtgccggtgacaggagggtaatttttgtgatttttgctcgtttctttcatcaatcccctgcactttgtctgattcctggaggggacaagtgcatgaaatcacacgcttgggaacagcgaaagcttggtgacgtcttagaatttctaaaagatggtactcatggtacccatcctgatgcagatcagggtccactgttgctgagcgcaaaaaacataaaaaacggcgatgttacctgggacgatactgatcgaaaaatttctcaggctgaattcgatatgattcattcgaatttcaaacttaaaaagggagatgttctgttgactatcgttggatccattggtgaatcagcgatcttaaaggatccacatgagattacttttcagcgtagcgtagcttttttaagacctaataaaactattacctcgggatttctttattctgaaatccaaggtgagaagtttcaaacagaactaaataaccgtaaatccacctccgcgcagccagggatttacctcggtgatttaagcgaaattcctctggatacacctccaaatttaaaagaacaggaggagatcggcaaatttttcagtgagattaactctcttcttacccttcatcagcgtcagtcagtgagttcagatcttctcggggcgagtcttcatctttgatcaatccacgcaccacaaggattcccaaggaggaatccgacgaactcgtatctgcttaatcaatcaaagagatacagagatgcccaggaaaaatggataagtctgttatttatgtcaaggttttcataactcctagagcggtatcccttgacgatttcattcccacttgccagaatggctgtgcggttttacagtgatattgaaatccttacgttcccttgatgagggattgggagaacaggtatggccacaagaaaagcgacccctgaagaacttgaagagctgcagaaaagcatgatggcctggggcggcagcgcctggggtattggcgcgcatcgaccccgccccgcccccgacgactctgccgataagagcgccaagacggaggagaaggcgaagccagaaaagactgacgattaaatcagcttcagacatcactgaaacacggacgagccgctgaaaagcggctctttgtgtatctttgccatcccccgcaggaatttccgcagcaaaccgcatctccgacttcaggcagagtccccattcggtcctttccccaaacaaaaatctccgcttcggtatccggagcggagagtgtgtcaagagtgacctgaggttactgactatcgttctttacggcatggttaccatccacggaacccgtgacgattccccgggtgttcatcgtggctgggagcgggtgcgcgccgttctcgccggtaaaaagaagcttgatcgctatcccgcgcttccgctgcctctctggggtatccgtcaccaatcccatcctgatcgctgccctcggagtcattctccctgaggagctcctccgcgattgggtttcgctcaccgccctccttcttatattcctgataccaccaggaaagaacacgtttcagttcctcctcaccgacatactcaaagtagcgccaggggagccccgcggctccgttcatttccttcagggcgtcggggttgacggcaatcctcccttccggtgttcgggtaagttcgataaaggaaaagggagttttgtcatggattgccgagctgacaaattgataggccacgtaaaaatcagcggcgttaatcatccattcggcaaggcgtgtgttaagccgcctgctgcagctcaggtaggctcctcttttgctgttctgcacattgggaatatagatggtgcagttcttattaaccccggaagtctcatcttcaatgatcataaggttccttttcgcggctcacacgccgcggatttgaatcttcaaggcaaatggcaggtttttcctgctcccttcagaccgatgcgggaaaaccggatcgggatccaaagcacatcttttgttcagagaagaacggtcggcgtccgtgtgccgctccgcgctttccttcagccgcctggcgtcaggaaaagagaacaatgccgtttcaggctttcagcgggtatctaggccgccggaggcggattttccatgagccgcctctgatataagagtatggattcccgtgaccgattgaatagttctctatcgttaatacggtcgctctattgatttgccgcctgtcattccgtcaaggcgtttcattttgcggaagcactgctcttccggaaggggcaattcaaaaccggcaatcaggaagcctcgcttccatcactaagacgctgcgggatcaggactgctcgagggacaccatcactgatcccgaaggcttaaacgggaggtccgtttccttcaggatctcccactgccggccttttccagtctttcatgacgtaaagcggtctccggagcgggttaccgggattgaatccggacgtgatcccgagcgatccatgcgaactgtagggaacgaagcctcagggctgatccgccatctgaagccaatacttgagaccggtatgccgcctgagtgtctgtttcccgcggaccgccatcgcgagcgccttcttctgccccaccatgacgacgagccgtttcccgcgcgtcaccccggtgtagatcagattccgcttcagcatcacgtagtgctgcatcgtgattgggagcaccacaatcgggtactcgctcccctgggacttatgaatcgtggtcgcgtagcagagcacgagttcatcaagttccccgtagggatagatgacgtcccgcccgtcgaaatccacggtcaactcttcctcttcggggtcgaaccgcgtcacaaacccgatgtcgccattaaacacatcgcggtcatagttattctcgatctgcatcactttgtcgccaatggaaaacgtcgtcccgaacttctcgatcgacccttcctttggcgggttgagcgcgagctgcagcgcttcgttcagcgcccgggcgccggcgttcccgcggttcatcgggcagagcacctgaatatcctggatggggttcacgccataggctttcgggagacggttcttcacgaggtctgtcagcaccgcgggcatccggtcagtttcctcaacggtcacaaagtagcagtcgcctttcacgcctttcgcggggaattccggcatcagtcccgcgttgatccggtgcgccgccttgatgatccaggattcggcggcctgacggaaaacttcagtcagccggatcacgggaaccgttccggagccgatgaggtccgtgagaaacgctccggggccgacagacggcagctgatccacgtcccccacgaaaatcacggcggttcggggtgagattgccttgatgagattattcgcgagcggaatatcaatcatcgagcattcgtccgcgacgaggagatcgcattcaagcggattctcctcatttctcttaaattccatcgaggcgggatcgatttcaaggagccggtggatcgttttcgcttccatcccggatgtctcagcgagacgtttcgcggcgcgtccagtcggcgcgcagagcgcgatgcggacccctttcgcgcggaggatcgtgagaatcgctttcacgattgtcgtttttccgacaccggggccgcctgtgatcaccatcactttggaggtgagcgcggaggcgaccgcggtccattggctttcggcaagcgtgagcccgagtttcttttcggcccagggaaccgctttttccggatcaatcgcgggccacggcgggagcgtgcgtgaaagcgagatcagccgctcaccgatactcttttccgagagataaagcggcgtgaggtagacgctctgaggctcggggaagtccgcttcagtcagttcccccgcctcgatctcatgcgtgatcgcgtcagaaatgatggcggccgggatctctaataattcagaagcggttctgatcagctcagtacgggtgagcgcgcagtgcccctgattcccagacgcttcggagagcgtataggacacccccgctctggctcggatcggggacgtcttctcgattccgacatgctgcgcgatcgtgtccgcggacttgaacccgattccccggatatctttcgcgagacggtacgggttctcggtcacgattttcaccgcgtccttcccgtacttcttatagatgcggaccgactttgacgtgctgaccccgtggctatggagaaagaccatgatttcgcggatcactttctggtctgcccagccggacgtgattttccggatccgcttggggccgatcccgcggatctctttcatccgctcgggctcttcctcaatgactttaaagacatccatcccgaaggcgccgacgagactcttcgcgcaccagggaccgatccccttcaccatgccggagccgaggtacttctcaatcccctgaagcgtggtgggcgggtggatactgaggaactccgcccggaactgccgcccgtactccttatccatgatccagcggccaagcgcggacgcgtattcgccgggggtgacggacggggtgtgcccgatcacggtgacgaggtcccgctcccccctcaccttgagacgcagcaccgcgtagccgtttgtttcactgtggaacgtcacccgctcaacgaggccgctcagtttatcaagcggctgtttgttttctgcggtttcaggggcaggcataagaggcagtcagtttttgaaccccctggcggaccggcggggatttcggggaatgcttttctcagggattatcgcctattgtggcacagacggcgccgggcgcaggctccgcttcctcatggccggaaccctcaggagatccggatcgcttatagagaagccatccccccgggggcgcgccgaaagaagagtcttacaaaggaagctcccacccttcagaacccgcgtcttttctgggagaagtgactcgcggcgcattcacgaggaagaccttttcgctcgcgcgggtaatcgctgtgtagtaccagcggaaaagatccgagtctccctcggtctggtttctggacaccactatcacccagggccattcactcccctgcgccttgtggcacgtcatcgcgtaaccgtatttcacgagaaggcagttcaagtacggatccgtcagtttcgcccacttgagatcgttgcctcggagatccggatagcggttcttaaagtcatgccagagcgcgcgggaaagctcaaaccccagttccggcgaagtctgggtgaggaagttttccagaagatagtaggtgacttcagacgtttccggtgtttctggtgtttctgaggcagcggatgggggaactttaaatgtcacggggataaaccggagcgatgtgctgaaacgctcccgctttcgggtctccggattgaaagtggaaaaatccacctgatggacttcccgggaaccgacggtattcacctgcagcgcttccccgttaatgaagagactccagttctgcatcaccgatcggtacaccatcagccagtctttcgggctgagcggcgcgtcctcggccccgaaatatcgcctcctgatcagctggttatagcggaacacctcccgattggtccacgcgatgatcgcgaccggttttttcggctgctggcgccaccccaggtcgaagatccgcacgacgcccgtcggattcgttttcacgatgtcgtcagaaaacggaacacggagactcgagaaatcggagtgatcgatcgctttgtggaggctgttcgcgaagctgaggagcgtgttttctgacttctgccggacgacctctgtcagctggtaactcgaagcccggatcccatactctttttcaaggtaagaaaagtcgaaggccggggagttcctcgacccgaccggcgggagctgagcctcatcgcccacgaaaaggatttttccgctgaaggagggatccatcacctccgcgtgctgaaagatgtccgcgaggaggcatcccgaaccgaactgagtgatagaggtctgatcgaggtctttctgactcttgtgttggaagtcaccgatcatcgatgcctcgtccaggatgaggatcgggttcttctcgccgtcgtcaagttttctcagccgtccgatggatttccggaagtcttcgagttcggggccagaatccttcgcctctctcttatcttccacaatccggtaaatatgcttgtgaatggtagtcgcgtggaaccccgttttcctgcggagcaccagcgcggcttttccggtcggcgcgagaagctaggtgtttgagcggccgcagctgatgagatactcatacacgcctttgagaagcgtcgttttaccggtgcccgcgtagccaaaaagcgcgaaaaccttttggtcactgtcggttaagaaggattggatcgctttaagcgctttcttctgatcgtcattcagggtgatgccgtggtaaaaatcgaaaatttcgcgaaccggttcacgatcgatttcctcatccggagccgaagggacggcgtcggctccgggcgaagcgggaacggtctcttcggcgggtgccctggcctcggaatgaatgtccgctgcctcgtaaggaggaccgggctcaaagcccagtttcctgagaagccactcaccgaacctgtgggcccgctggtgcttctgaaacggcgcctctccgcggctcgtgtaagcagtctcgtgtttagcggtatctaggtgcgacgcggagttcccggagagacggatggcgtggcacgccctgatgtccggtgcctcgtaaggaggaccgggctcaaagcctagttccctgagaagccattcgccgatcctgtaggcccgctgatgattctgaagcagctcctctccgcggcttgcgtaagcagtctcgtgtttagcggtatctatgtgtgacgcggcgttctcggagagacggatggcgtggcacgccctgatgactgaagccggcacaactccggaagcgtttttcccaatgaagtcgagtctttcaaagagattcagcttttcatacttcctgatgtccttcttcagaacccgggcaatcacgtcggccgtaaaaccttcgagataccggcggtaatgaagaatggaggcagcgttatctgaaccgatcaggccttccgcgatgtcagcctcgcctccccacttcgggaacgcttttcggatttgggtgaaattgtctgaaccgctcatcgtgataacctgtcgcgacactcagcgggtattgtatcgtagccattaggcgaaaagaaaccggttctctgcgctattcagaatgcttttgagacacggattcaggccggttcccgggatccgccgcattgagactccggatcgcctcacgcgcccaggttttgaaagccgcagtctcctttgggtcaggatttgccggggggtcgatcagatcctccaggtaccggaccttcagcccatcgttccggatgattttccttcagcgctttaacggattcccggttgaaatccggaattccggggcgtgatttccaaatctcggccgtgatttccgttgaatttttgacttccttatcatcctcacacaccgcgagctcaaacacctggtgaataacaagaacttcctgtcggatacgttcccaagacttgttaggcggctcggtctaatcggaaatgtaggtttgttctcccagaatcaccagctcccggatgaccttgaacgttttttccgtcacggcgtccgggaagtctgtctgggtctgaagggagccgcggagccgggggaagaaccgggacgcctcgcccttctctattcccttgaagagcggtgcttctcttctctcctctccaatcaggtgaagtcagcggcgagggttcgcaaaacaaaaatccgttcggtctctttcaccggacggataggggtaactcgcgatcagtaatacacggtgccgcccttcacgagaggccagtcccggatttctctcgctgcggagtcgaaatcgatgttccaccagccgactaaggtatccacgtccttcgcgtaagtgatcccgttgccacccggcccgaggacgtaacagtgtcccatcaccatacagctttcccaccgcatgccgttcagatggtcaatcgcgagacaggtgagcgcgtcggtttcgccctcgtatgcgggatgcctgagcggaacgcggtaaagctgcttcacgcagaacgggatgaacgccgccttttcctcctcgttcacgaactcgagcggcttacacctgccggggtcgagagcggactggtattttccggattggttccagtttctgacgatgaatttccgaaggtacggaatctgagacgtgacaaatctttcgattctgtccccgatctctttcagtttctcgtcggagagtttctcttcttcctcttcttcttcctcctcatcctcgtcttcgaactcgtcttcgtcctcttcatccagcacttccggcgtttctggcgccttgggttcagtcacttcggccacaggggctgtaacgcttttttctgtctctgccatcagatcatctcctttccggatatccggtaaccatcctgatttatcagcggtttcctgaactctggaatctttatctgctgaagtaaaagtagcaggtttgatgacggaatgaatcacagttcctcgtcaatactgtccctggatcgcaataccggtttttatcttcctgtatccccaggtgcggggcgaaaaaaatccgccctgatgatcaatcaggacggatctggcatgtaaaactgaaagtgtttacttcaggatcgtcagccgatagctgcggcggccgacgccgttcttctccgctttatccaggatcgtaagcgtatgagccttgatccaggcgtcgcgggtcgctttgtccggagcactctgcagcgtgatatcggtgcagaccgcgtccagcgccacggggtcgagcgacgcgaaaacgccgatgttcccgacatcgatcgcgccgcggcagttatctttcggcgtgaaggccggcatcgcgcagaggaacgcccagcggcctgggcgggcggcaagcgcccccttcacggcgtccgtaatggattccgcggtggtctcaggatccgactcctgccacgtgagcgagcgcccggcgctatgaatattgcagcggccgataaagggcgagagcgtgatcgagaggtttttaagcgtccctccgagctgcgcgaggttgtgaagcttatagcggacgatcgagattacggagtcgtaattcttaaagtgagaccccacgcggtggaacttcagatggtagccgttctttaccgggagatcgatcgtcccctgatcatcgatgatgtctgtcggcgcgaccgcggcgaacccaagttcctcggcgagcttcagccggtcccgcgtcgtggagtaggtgtttgactcgagaaacgtccccttcacttctttcacaaccggggcgatgagtctggggtcgacgtacggcttccccttcccttcgaaattcaccttgacaccgacgcggcccacgggcttccagtgaagcgcgtggtagacgcgggtcatggcgtccggtgtcagcgcggggataaagaacacctcgggggcggacctatccgtgacacgatgctcgagcttatcgaaattcggtttaaattgggcggcctcgactgcacggagcgcagcgcttgacccgaggaccagggcggcggacccctgaagcaaatgacggcgattcagcatgggtgacctcttttgacgactgagcgggagaagagagacatccctcaccctcgctctttcaatccgtaacgggcggggaaacgcttgattccccgcggcttttaaccccgaatacgcggcgcggccgagcggaaaccggagaataaagcggggtatcgctaccgggccgttcgtcatattcgcattaactattatccgaaccgcccccgcctctcacttttcggattcactcacaaacttgctcgattttgtcacgcgggatggaagaagtcataaaaatccgcctggaaaagagaggctgccgggcggttacggcgggactgaagtctcgctcttagcgctaaaacgtgtaccaggcggttagcgccggccttacttctcctcaggcttctctgagggcttgcctcgcgcgggttcctcgctcgtctttttctctgcgggactctcctcaagattctttaagctgtccttcgtaaggtaatgcccgacgaataccgtcgtcccgcgattgttcagccatcggctcatggtggtacggtaccactccgcgtccgcttctttgattttcatatctttctcctttagggggcagtcgccttggttcgctttctgcgatcatcccctgacatcaaaggtagtccttttcgtgacggatagcgcacgggattcggtcaatactgtccttcgatcgcaataccttcgatctgtcacggaaatcagggttataacctgaaagttctacaacaggcacacgttcggttgatttcggctgagtagaccgcagaaaggggatgttttctgcgttttttcttgacccatttagtgttactatatataatatagataacattattggagccagccatgtccc

SEQ ID NO: 1294 - DNA, 14236 bp, Unknown
  gut microbiota DNA sequence
agcctacgtgggaaaacttaatgtattgcggcctgccgctgatacattatcatgaagccaatgccgggggtaaattagaacaaaagttcttttctgaattaggtctgacttttgttaataatattgaggttgacattaatgcccttatgctgtcatttgtctctgaagggatgggatggggaataaccaggccatcaactttagcgcagcaccctgatcttgctgaaagtgttaaggctttggaaatgccaccgccggtaatttccagagatgtctttgttatcactaaaagttcttctcacgaaaatttaggagagttattgacaaatatttcgacaaaggctttcacgaaaaacttacttcctctttacgaaaaatttactccttgggttaaaccatatttatttattcacggtgataaaaataattccagagagccgtgctaccctgatctggttaaatttgatgagaatcagaaaacgtttgtcctataaagaattaaataaacttctttaatggcaggacccggcaaacaggccgcaaagcgcggctcaatataagagcaaagcccgaaggtcaagaagacctccggtgctttcgtggttttgggctgaggaacggtatcctcttcttttttaggcgaggctctccagcatcgacgcggcgtcatcagaccccaggtccgcggccttcttcacgagcgccttccccttctcgcggtccagagcgatcacggtgcctgagaggtaagcgagcccgaggttcagcgtcccgtagggatcgttcgcctcagcggccttttcaaggaacgggatgccgtccttcttcatctcgtccccaagcttcccgttcacaagcaggctcccgaagaatcccatcgcttccgggaatccgcccttagcgccttccgatatccagaagacaccgagttccgggtccggcggcacgccgatcccattcaggtagcagaacccgaggagatattcgccttcggggtacttcgcctgagcggccgcgaagtaccagcggaaggcgcgcgccggatcctgcttcacctgccagccggtttcgtacgcccgtccgagcaccacggcgcattcagggatcccctgaagggccggggtaaagagggaggcgagctgacggcgggtcgcctcagggaggtccgccggaatgccggcatccgccgcctcagtctgcgactgcacgggccccatttctttcaggagatccacgaaaagccggttcgcccggacaccctcggattctttaagcgtcttccggagcccggcaagaatcgcgccggcacggacgtcgcccgcggcttcagaaaagatcgaccaggcggccgccttcacggcgtccttcgggataccgatcccgtaagcgagcgcccgggcgtaccagtagcgggagtcgaggtcaccggcccgtgccgccttctggaagagatctgtcgcccgctcaaaatcctgcggcacaccatcccccgtcgaaagcgcgatcgcgaggtttcggattgaggccgggtcaccggcttcctctgcccgcttaagccacatcacggattcgggctcgttcttctcgaccccgttcccttccttcagcatccgggcgtaaagcgccatccctttcgggtaaccggcttcggctgagcgcttgatgaaccccacgcccttctctccgttcttcggaatcccgattccctgaaggaacgcgataccgacctggaaaagcgccttcgggtgacccgcgtccgccgcggtcttgaggaacgtccatccttccgggtccggggttccggtcgcgaacccggagatcaggttccagccgtactccgtcgcggcgtccttatctcccgactccgctttcgctttgaggtcggaaagttcagattcaaacgaccggttctccgcgtcactcaggagcttcgagcggatcgcttccgccgccgcgtgaatccggcgcttcagctcattcatttcgtgctcctgcgccttgcggtccaaaaccgccttttcgttctcttctgccatcaccgtcctccttctaagccggggaaaatcgagcggccgcggatatgtattgttacagccgtcagcggctattttacgtagaaatgcctagaagaaacgggcggacacaagtgaggtgaactgttgctcttttctcacagcagtttgcgtcccgatcattagagtatttctcaacagaacttctgaatccttcagaagaagtgatggagataaacatcatgaaacgccgtgctcttcttgctattctcgccgcggccccgatcgcggccttcgcgaaggaccatcgcccgggcgacgtccctccgtctcctcccgcaggcggcaatcccccgccgcccccgcgcccgaggaagcatcatcgtccggagccgccgcctcccccgaagcatcaccatgagcggcaccaccggaaggatcgtccggcgcccccgcccccgaagggaccgaacggccctcagggcccgcagggtccgggcccgaagcgtccctgatagcctcccgtaacttctgaatggaaaaaacagacggcggaactgcctttaaagcggttccgccgtctgcgtttgtctgggggatctgtaggactgttctttacgcccggatcaatgtcccttctgagcgacgatgaggcctacaaagatcgtcacgatgccggcgatcgcgagcggcgggagcgtctcgtgaaggaacaccacggagagaagcaccgtgatcagcggctgtgcgtagaggaagagagaggtcttcgcgatgccaagcgactccacagcgcccgtccacgtcgcgtagcagagcgcggaagcgaacacgccaaggaacgcgagtcccatgaagactcccggatccgtgagagtcgagagtgagatcttcgacccgaacccgatatcaaagggcagcatgatgagaacgccgaagaagaatgtccaggcggtcatcggaatgatcttgtagccgcgttccgagagcttccggctcaccacgcagtagagcggccaggcgaaacacgcgagaaaggcgagcaggtcgccgagcggactcacggcccccagcttatcggtcgcgagcgtaaggcacgccgaccccgcgaccgcgatcgcggaaccgataaagaactggcgcttcagcggcacgtcccggaagaagaaccacatcacgagcacattcgtgatcgggatcagggacacaataaccccgacgtttgccgcctgcgtaaagtaaagcgcgcagttttcaagcgtgaagtaagcggcgacaccagtcgcgccggacgcgatgaagagcttcaggtcggatcgctcctgaatcatcagcgactgcccggtcgccttcgcgaccgccgcgagaatcagaaagccgatcgtaaaacgggtgaccagaacgtcaatcgccgtgagttccgacatcacgccttttgtgacgacataggtcgcgccccagaccgtgattgtcgttagcgccatcaggacgccgcgtaaagtctttgattgcatgtcagttattaattttcgttaagccagccattatcgcagatattgcccaggcgcttcagatggcatcccctctcccgcctcacccgctgtcccgtccccccattcagaggactacacttcagcgtctttctgtttttcacttgttttatctgccatgccgtccacacctgccgtccgccgtccgattgatctgcgcgcgtttctgatctgtgtcgcgctgagtttcacctggggcctgcagcaggtcgcaatcaaggcggctgccccgaatatcagcccgatgctgcaggtggggatccgctctggcgtttccgccctccttcttctcctcacaaatcacttctggcttcacgaaaagtgggggcatgaggtgaagctccgagacgcgattctggtgggtctcggttttgtcggtgaatttttctttgtgtcagaaggcctccgctttacatccgccgcccacatgtcggtgcttctctacacgtctcctttcttcgccgcgatcggactctcaatcaagcttcccgaagaacggctctcggtgattcagtgggcagggctcttaaccgctttcctcgggatcgcggtggagttcctcgtccccgcgcttctctcgaaagaaacacttgaaggaagcggctggattctcggagacatccttgggcttggctccggactctcctgggggttcacgacgatcatgctccggacaacctcgatgaataacgcgccgccctccctcatgcttttcgcgcagctcttcatggcgtttgtgatccttacgccgctcgcgtttatcacgggacagacgacgttccacaattcgctcgtcgggtggtctagtctcctcttccaggcggtgatcgtctcttacgcgagttacctcgtctggaacttcctcttgaagcaatacctcgcggcgcgcctcggggtgctcgtcttcatgaccccgatcttcggcgtcattctctcggtgctcctccttggagaatcggtcggcatgccgtttgtcttcgggtcgcttctcgtgcttgccggcctccttctcatgcaggcgaagacaattctgctggttaagaagcacagttcttaagaaactcatccccctgattcaccaaaagctgccggaatctccggcagcttttattttttccgggaaacaaaaatctctgctttttctcaatctggttcctgtgttcagttgatcctgttcgctgtatgccggacaataaggaatctgcgccttcactgatggctattagtgcctattgcggctgaattctgcccctatccggtgtgaatcaataaccgtaactctgccctcagggaagcctggagcggccgcgaccaaaaccacagcgtgttttgtattcctgccgccactaaaccaaacacttttcacgaggcagacgtttttttctgtctgcggagccgcaccatggatattttcgagttcagagaccgcttgattgaaagctacaaatccttcagtcggagttttacgaagattgaatccgaggatatccgggagaaagtgaatgaggagctaaaggcctactggcctgagccgctgattcagatcaacccctgctaccagacggacagaaccgttcaggagttctgtgaccatcacgtgctgcatccggagtgcggcgcgattttccgagataaacacggaaagtcgctcaggctttatctccatcaggcccaggcaatcgagttcgcgagaaagaaagagtcttacatcgtgacgaccggcaccggctccggtaagtcgcttgccttctttattccgatcatcaatcggatccttgaagaaaaagcgaccgatccgaaacctcgcacccgggcgatcatcctctacccgatgaacgcgctcgcgaattcgcagaaggaagaaattgagaagttcctgacgaaccccgggcacccgacgccgctcaccgtggcgcgctacacggggcaggaaaccgaggccgagcgtgaggtgctccgcacgaatccgccggacatcctgctcacgaactacatgatgctggaactcgtcctcatgcgttctcccgatcgcccgatcgtacagaactgcgaggggcttgagttcctggtgctcgacgaactccatacgtatcgcggccgtcagggcgccgatgtcgcgctccttgtccgccgcctccgctcgcagctgaaagcggaccacctgatctgcatcgggacgtccgccacgatgtcctccgcccccgaacggtctgaacagaaccgggcagtgtctgaagtggcatcgaagattttcggtacccggattgacgcaaaccacgtcgtgaacgaaaccctgcagggggtgacggacgcggtggaagtggacaaaatcagccaggcggatctgcatagagaagtggtatccgcagcgtctgcccacctgaagccactcgactttgagggcttcaagaagaacccgctcgccgagtggcttgagcggaagctgagcatcacggatcgctttacccgcgcgatgccgcagtcagtcacaacgattgtggagcatctgtcggaagccgccggcacggaccctgaaaccacggagaaagcgctgaagcacttcctctctcagttcggaacggaaaactcaatccgaacgcctgaaggtcggaatccattccccttcaagctccatcagttcatcagcggtccgggaaaggtttatgtgacgcttggggaacctggcaaacgcacgatcacgcttgacgggcagacctctgtcgcggatcccgaggactcgaataagcgcattccgcttttcgaagcttatttctgccgtgactgcggtcaggaatacatcccggtctggattacgcgcacaaacgaaggcgcggtcgtgaatgtcaaaccccgctcgatggatgagatgcgggctggggatagcacgagttacggctacatctgcccggtgaccgaggggcagctcttcacgggcgaaattactgatctcccggatgaatggctggatccgaaaaattccgagcgggtaaagacttcccgtcggaaggatatcccgcagcgtctcacgctttctcctgaaggcttcagctctgggatcggcaccgatttctggctcctcacgggaaaattcaagatctgcgtgaactgccttcacacctattccgcaaacgggcgcgataagcaccgcctcaccggactttccggcgaaggccgcagctccgcgaccacgatcatcagccttcagatcctgcggcagctttacgacatgccgctttcagatgacaaacataaggcgttccggaagctcctcggtttctccgataaccgtcaggacacggcgctccaggcggggcactttaatgacttcgtgagccaattgattctccgaagcggtctcatccgggcgctcgaaaatgaaaccgagccaaagcgccttcccgagatcgtggacgccatctgcacggtgttccgctttaatgatgagaaagacgaagccgcgaaacgcgagtatttgctgaaaccagataccacaaccgggcagctcctcacgaaggcgctgtccgcccttcgcttctcgctctccttccagctcctgaatgaactccaggatcgcggtctctatacgagcccgagtcttgagcggctgcacctcctttccgtgagttacgaggggctggagaacttctgcagggacggcgcgaatttcggctcgaacggagcacttctcgaattggggccccagaaacgattcacgcttgttaagcggttcctggatgaggtccggcaccgtctctgcatctcgtcgatctatttcgatccgaaggagcaggacacggcccgtgcccgtgagtacggtcttctcacgccccgctggagcttctcgtccctctcccctgagtctcaccatcagacggtgggaaccgcgtttgttctgaatacgaacgaccggaaagcctggagcttcgggggcaccgtgaaattcacggagaagtcgggcattatcccgacactcgggaagctcgatatctgggacgggatcaaggacgataccggcgccgtcatccgctctaaccgtcaggccatgcatgaactgctcgtcgatatgacgaaggcgctctgtcagggcgggtatctgaaaccgacgcagaccaaagaaggcacttactatcagcttgtcgacagctgcgtcctctggagcaagtcgaaggaaccgacagacgaaaagttcaattcctattaccgtactctctacctcgatgtcgcggacacgatggcgacggacggtcaggcactttttgactttgaggcggaagagcataccgctcaggtatccgcggaggagcgtcaggatcttgaaatccgattccggggcggtcccgaggatgagaagaagtggaatgagctccacgccggggtgccttataagcggctccctgttctctactgctcacccacgatggaactgggtattgatatttcggctctgaactacgtctatatgcggaatatcccgccgaccgcggcaaactatgtacagcgtgccggccgcgccggtcggtccggtgatcaagcgctcagtattagctactgctccgcgatgagcccgcacgatcaatggttcttccacaagcctgagcagatggttcagggcgtggtgaagccgccgacaatggatctcgggaacgaggcccttgtccgaagccacatgcattccatctggatgtcggccgcctgtatcgatcttccgatcacggtgagccaggtactcgatctcgctaagcctgaggacggctacccggtgaaagaagagatcatggagagcctcaccgctccccgtgtgactgaggacgccatcgtgtttggcaacgcggtcgcctctcagctctcgctctctgaacaatcctggtacacggatacctatgtggaatccgtgatgaagtccgctccccgggagtttgaggcaagcttcgataactggcgggctctctaccgggctacgcttgagcagatccggctggttaacgagactctggggcgctacggcatcacggctgaagagagggacagcgcgaagagccgctggcaggatacccagaaacagcgggagctccttgagagcgcctcactcacgtcgaccaacaacgatttctacacgtatcggtatctcgcgagccaggccttcctccccgggtacaacttcccggcgatgccgctgcttgcctggatcccggacccgagcggatcgagaaacgattccacggtgatttctcgctcccgcttcctcggtctcgcagaattcggtccccggaacgtgatttatcaccgcggccgaatctatcgggtagaccgtctgaagatctcggtccaggcggggggcgctacggcgtccgataacctcgcgactgactccgtgatcgtctgcccgcactgcggctatgcccatgtcatgaatgggacggtctataacgaatgcgagaactgtgggaacgagctccatcaggaaaacattattcaggggctctaccgcgtcaccatggtcgaaacaacggaaatccagcgtattacgacgattgatgagaatcgccagaatcagggtttcgacatgcagacgctctaccggttcggcgacacgaagcctgaacggacggaggtgatggaagggaagaagccgctcgcgacgatcagctacgcgccggccgcctctatctggcgtgtgaatctcggctggaagtaccgcctgaatcagaagacgaagggctttgtcatcaacccgcttaccggctactggcggaacgaaggtcccgacgcggaagaaaaagagaacaagaaagaggacaaggctcagaaaaacgccaagtcccaggtgatcgtcccctacgtgacggatacccggaacatccttctctttgagccgaatgtggatctcggcgaaggtgaagaccgccaggtcttcatggcgaccctgcaggccgctctgaagcgggcgattgagcagtatttcgaaattgagtcaaacgaaatctcgatcgagccgcttccggggaatcaggaccggaagagcctcctgatttacgaaacgggtgaaggcggtgccggaatcctccgcgagatcagcaaggatccgaagacttaccttcgggctctcgcgcgcgaagcgctttcccttatgcattacgagtttaagaacgtgaagcggctgaaggttgaagacctcgtggatacgaaggaaagctgcgcggatggctgctacagctgccttctcacgtacttcaatcagccggagcatgagctcatccatcggcgcgatccgaaggttctcgagttcctcgtgggactcgcgaatacggaagggacagcagcggctcctgaaaccgtgaaactttttccgatgtcatcagacaaaaatggcgaaagcaatactccaatgggtcacttccaggtctgggccgtcgaatatggataccgcgttccggataagattccgaagaccttcaaggcgcttggtctcaaatttgacggtgcttataccgacgccctctgctgcgtgtcgttcacacctgtgagtgatgacgcgcgggagagtctcgctgacttcggctgggatgtactggatctcagtaacgaggacagctggggcacagtcatgagcactcgccctgatctgaaaagcagcaactaagttatttacggcagaaaaatatgagtaatacgttccttcccggcaatctcgtccaggcccgcggccgcacctgggttgttcagtctggttctgaagacgactggctgaagctccgcccgatcggaggcgccgatgatgaaatcacagagctgatgccgcagctcgaacgggaaccggtggaactcgctcagttcccgctccccgatccgacgaaattcggaacgctttattcttctgccgagctgctctacgacgcgctccgcttccagcttcgaagcggcgccggtcccttccggtctttcggcagtatcgcggttgagccgcgctcgtatcagctggtgccccttctcatggcaatgcgacagaaaactgtgcgcctgctgatcgcggatgacgtcggtatcggtaagacgattgaggccgggctcattgtccgcgagatgctggaccgcggcgaaattacgaagttcgcggtgctctgccctccgcatcttgtggagcagtgggtgtcagagctttccgatcgcttcaatattgaggcgaccgcgctgaccggatcttccgcacagcggctggaacgccaggtaccgcatggtcatacgctctcagacaccttccccgtgctcgtcgtgagtctggattacatcaaaagcgataagcaccgcgactatttctacgcgatgaattttgacctcatcgtggtggatgaggcgcatacctgcgtgaaagctggatcacgggataagcagctgcgattcgacctgctccataaactggcgtcggatgctttccgccacatgatccttctcaccgcaacgcctcactccggtaacgaggacggcttctatagccttctctcgctgctggatgaaaaattcctgggactgaaagggcgtgaagtgaagagtgacgatcctctccgtcaggatctcgctaaacacttcgttcagcgccgcagaaaagatattgaggaatggaaagtctccggtgctgaccgtatgacagggttcccgacccgtatgacgacagaactgaattaccggctgactgccaggtgggatcagttcttcgcggatgttcaggaatactgccagaaagtgattgaccgcgatgggaagaaaaatcagctgatctggtactcagtactggctctcttccgctgcgtgtcatcctcacccgccgccgcagtccaggcgctgaataaccgcctgaagaatcaggagggggattcggttgaggaagaggatttcatcatcaatgacctcgataacgtcgatgaaggaacagactccgacgttgagccggcactctggtttgatgagtcagcggaactgaatacgcttcttgcggaagcgaggacgctcgctggaagcaagaacgatccgaagatccggctcctcgctaagcacgtgaaggaactgctggcggagggttttaatcccgtcatcttctgccgctttgtcgcaacggctcagtacgtctacgacgcgctgaaggaagaactgaagaaagaggatgatgtcgcgattggctgcgtcacgggcgaactcgtccccggcgagcgggaagagcgtgtcaatgatctcggcgaaaaagagaagcgcgtacttgtcgcgacagactgcctctctgaaggtatcaatctgcaggatcttttcacggctgtggttcactatgacctcgcctggaacccaacccgccacgaacagcgtgagggtcgcgttgaccgtttcggtcagaaggcaaaggaagtccgctgctcgatgatctacggcgaaaataaccccgtggacggcttcatcctgaaggtcattctgagaaagagtgaggagatcaagaaggatctcggcgtgattgtgccgatcccggaaaagaaggaagcgattgataaggcgcttctccgcgcttcgctcttcagggatcggaatggacagttcaattacgatgatcagcagatgtcgctcttcacctcagaagacctcggtgacatgaatacagtgtggacgaacgcactcgaaaaaatgaagcagcagcgcactgtgtttgcccagcagtctattcatccggaagatatttatcctctttgggaagcccagcaaaaagcccttggcagccacgcggacgtggaaaagttctcaaagtcagcctgcgcatcactcggcgctcagcttgagcctctgaagaacaatcgctaccgtttcccgttggtgtcgctgcagaacaagtcgcttgtcgcccgttttgaggatgagggcttcgaaaataacgacatcatcgacttcgacaccctgcaccgtacctctcccttcatcaataccctctctgaaggtgttgtcgatgaagctctgagggaagaaagccgcctgatctcccggacagctattgctcagacgtctgaggtctccgctgtgacccgtgtatatctcctgcgtcttcgataccagatccgcattgcctaccggaatcagacaagacgttatctgctttcagaggaaatccagccggttgcagtgaccggtatccgggatcccaaatgggaatcctctgaaaccgctcagtcgcttcttactctgagcgcgagcggtaatttcacgtctgttgtggcggagaagcagattcgctctgccatggactttattgcgtctcagaaagaggcaattgaagtctttgccaaggaacgtgcggagcagctgaaaacggatcaccagaaggtaaaggaatactcagcggagggatccgtcacggaagttgccccctgtctcccgattgatgtcatgggtgtctttgtactgatgcctgctgatgaagaatgagattgaaccatgaagaaaaccaataagaaatttaattccacctgctgcgatattcagggtgctctctttcttccagatcagattcagcaagcttttcttgggaaaaacaagcgccagtcaatcgatgactacaaaattctcccgggactcaccctgaaagaggaatgctcacgcgctttccgtatcgctcaagcctcatgggaccgatttaaagacaccctgacccgcacggatctctctgaagcggatcgtctgagccgcaccaaggagtggggccggatcttctttaactcagtgctcgggtacaccattcagtcccaaaccattattgaatgcgatgaacgccaatatccggttgcatttctcgtcagtaatctccctgtgacggtagtgtcggctccggcaggattggacgatgcccgacccgagctcaccgtgattgggggcagccagtccaagaaatccgcttttacccttgtccaggaccttctgaatgcggacacccgctataagtggggattcgcgtttaacggcactgcggttcgtcttgttcgtgacgcgatgtccctgacccgccctgggtatttggaattcaatctccaggaaattcttgctaacgacgactacgcggaattcctacatctctggatggcgctccatgcctcaagagcggaactgattgatggaaatacggcctgggatctgtggatcaaagagggggaagaggccgggcagccggcacgcgaggcgctcagaggctcaattactgaggcccttctgacgtttggtcagggttttattgcccatcctgaaaacgaagccttaagaaaagcgctttctgatggctctctttccgccaaagactatacgcatgagctcctacgtctcatgtatcgattcctttttgtcttctgtcttgaagaacggaatctgatcaatataaaagacgattcaaagaaaaatcaggcagccaccgccagatacctgtcgggctacgcgctccaccggttccgggatcagtctcttaaatcctatttccggaacaggtattccgacgcctgggaatccgtaaagatcgttttccaggggcttgataacggagaaccattgctggctcttcctgctcttggcggtctcttcgcgtctgatgagtgccctcaccttaaagacaccaggctgtctaacgtggtgttcttcaaccctgaaagttctacaacaggc

SEQ ID NO: 1295 - DNA, 418 bp, Unknown
  gut microbiota DNA sequence
tcttgacccatttagtgttactatatataatatagataacattattggagccagccatgtcccgcacctataccggaaaaatccatgtcggccagcgccgcgtaacccgcgccaatggggatgtctacgtctacgagcgccacacgcagtacgaccgggagacgcagaagaccgtcacgttgaaaaacaagcttttgggcaaactagaccctgagacaggcgaaattgttccgacaaggcctaaaagcaggtctaagaaggaggcttccgcctccatcgagcacgcctgcctggctgacatcctggaccttgtcgcaagggaaaccgggatcgacaaggggcttgaaagcgccttcgggacggccgcggctcagaagatcgccaccatcgcccgttacctgatcgccacggacggcgc

SEQ ID NO: 1296 - DNA, 55214 bp, Unknown
  gut microbiota DNA sequence
gataattcgccctttataccgaatggatattaaaaaaccgccgttcggggcggcggttttcatctgaattaaatgtctgatgtcactcagacatcttctctcagtctgttctcagcctcccgcgacagcttcttaccaaactcaacacccggctgatcaaacggattgagaccaaaaagcgttcccagcatcgtgatcttatgttcatacatcgccatcagcgctcccagcgtcttaggagtaaggtcactgatactgatcgtcgtaacgccgttaaaccacggcatagagggatcacgggtcacaagagcttccgcctgagccctggcatttgcgatcatgacacgatgaagctcttcatggctatgccccggcttctcgcaggaaatcaggtcaatactcgttctcccggtcccttcacgcagccactgatagaaagaatgctgagactcgtcaccgtgtccgccccagacagcctgtcccgtattgccaacaatcactgtaccgtcagcccgggtagtcttgccgagactctccatctcaagctgctgttcccaggaaacaaagattctcagccgctcgtcatacggcagcacacactgaagcgtgatattaagtctcgtggcattccaaaaagcaatcagggcaagcagtgcggaaatgttttcggccaccggggcatcgtagacatagcgatccatctcataggcacccgacaggaactgattaaaaacatcggtgccaagagcaatcatatcggggataccgatgctgccccacacagaaaaccgaccgccaacccagtcccacagcggatataagttctccaccggaatccgaagatccttatacgcatcaggattagcagagaccgcgataacgtgtctatcccgggagcttccggtaattcctgctgccgcaagccactcatcaacgaccgacgcgttgaccagtgtctcccttgtgtgaaaactcttgctggatacaacgacgagcgtgcggaaaggatcaagaccataaagaatccggtccagctggactccgtcaacacctgacaggaaatgaaccttgattggctgcggcagccccatcaaagcgtgatagaccgcgcgaggaccaacttcagagccgccgataccaatattgatgacatccgtgatcgtgtctccgcggcatcctgtccatttgccggatctcacagactccgcgaaagcataggcccgatcccgcgcctctttgacctcatcaaaatgaggcgacgcaggatcctgtgagcgaagcgatgtgtgaagagcggcccggttctctgacttgttcacgatttcgccctgaaccatagcgtgatgggcttccatcagaccaaggccatttgcaaaatcaaccagtctggcgagatcgtcctgcgtcagcctctggcggctgaaatccacccgcagtccgcacgcttcaaaagcagtgactccatccccgtcacgaaggaacggtaggagcggctgagcaaattttcttgggctattcattctttttctctgaacagtttcatcaatatgaatcacgtaacggtcattgtaccgggttggcatatggttttcacctaaataagcctacctgtccgatagagaaaaagctaattgttcagcctgttttatttcttcaaaagtattgcagttatcaaaggcagagatatcaggaaaaacagctgtcgctgcaccgatttccttaaaccactgccgtacccgatgattgccggctgcgttgtaggcctcaagctcaggaaagagatctgccctgacacaggcaaacgtgggctggagttctccgcgggcttccgctattgcagctctggcacccgcagcatttgcagcgaaaatcagcttctcggtgagatccgacgggaaaaagggacagtcacagggaaccgtgaaaagccaggtttctttcctggattcctcaggaagactcgcaatcgccgcctcaagccctgccagaggccccggaaaagagtccgtacggtccggaatgagttcagtatcagaaggaagaaccttccggtattcgtcaaacgaccgattggcgctcaccagaatcctgtcgacctgaggtgaaagacgacgataggcacgaagcgccagcggctctccctgaaaaggaacaagccccttatctgccccgcccagccgtgtggcgcggccccccgcaagaatcaatccaatccgcatcatttcttgtggtgcttcttcttcagcttatttttggctttcttaagtttggacttcttttttctattggctttcttccgtctccaggccttgatcgccgtttccggaacaccatccttcacttcaccgccaatcggatccgtccacagaatctcaatcggagaattaagcgccttagcgatgcttttcgccatccgctcgaggcagtcccgttcaattgggcttggcgaatcggattcgacccgtacagtcaatcccttctcgcttctctgaagcgtaaccccggtaaccgccgacctatggctcttatcaagacctaccgccagacgaaggaaaatgccggcctgagctgcctttttccagtcgtcatctgaaagacggatgaaaaaaggatgcgatttgccgtaatacttgctgctatagatgatcgccgcgaggagatgcgtttcgcgctgcgtaaagccgaggagatcagaattcgcgacgatataagcgctgtgctgccgctgcctgagataagaaatggaaatgccggtttcctgaagccaggacgcgtatcccagcagtgccccccactcttttggcagatcagtgagtccgagctcccgcgcctgagaaaacagactgcgggaaaggaacgagacctgcttcgcgtgacgcacatcgatctggaaagtcttggcaaggctcttcacagcatggcctcgctgcttcgactccacagcccgccccggaatcagtccttctgtctcaagatactgaatgagaaccccatcccggagtccgcgatcggtgatcgaaatctgattgaatccgagctcctccatcgccgtgaggaaaatcgcggcacctggaataatgacgccaacccgcttctgattcatgccaggaagcgccgcgcgctcggcggctgttgaactgcagatcttatcgacaacagcccggacttcatcgattgtgataaccgtggtgtcggatgacacagaggtctgttccgcggtacgcatggataaagcgagactcgcgatcgcgccggccgttccggaacttgcgatcagctcacggggcttctttgccagaagccgtttgaacggcatcacagacttatcgcggacatagtcctggacttcacggaacttcgccttcggcacggcatcgggaaaatctctgaaaaagagatccgcgagacgcacacagccaacacggagtgactctgccgcgagcagctccccttcccgcgacacagagaactccgtgctgccgccgccgatatccatataagcgcgcggatagtcggctctgggaagagaggcttcaacccccatcgtgatcagacgggcttcttccggtcctgaaatcacactgaaatcgattccggtctcagccttgacccgttccgtgaattcttttccgttttccgcctcacggacagaggctgtagcgaccgccactaccttgctcacaccgtaggagcggcacgttctcgcaaaggtcttcagtaccgaaatcgtgcgctcaattgcctgcggctgcagcgcctgattttcgaacgccccttcgccaagcctcaccatcgacttgacgcagttcagaacctgaatcctcccatctccgccaacctgactcaccagaagtctgagcgagttgcttcccagatcgatcaccgcaacacgccgggcaccttcaggaagtggtacctgtgaatcttgttcggacgcatcagctgcgtccggcagctccagataggaggatggtttcatactttttttcctttttcaggacccgtacttttcgctcatcagcgcctgggcatcaacgagaggcttgccttcggcagggaggatgcgttcatactcatccccttcaagcttccaggtacgggcgttatccgcgagctgaagcttcagcacttcgttcgcgatacgctccttcagggcttcatcgagcaccggtgtcactacttcgatacggcgatcgaggttgcggcccataaggtcagccgatcccatgtagcataagctcttctcggtatcctcaagaggtccgaaccagtacacacgggcatgctcaaggaacttgccgagaatcgcgcgcacggtgatgttgtcggaaatccccttgatgccggtcttgaggcagcagataccgcgcacgaggcagtccaccttgacgcccgcgatcgaggcttcataaagcagccggatcatatcggggtcaacaagctgattgcacttcagcacaatgcggccgttcccttcacgcttatggcgttcaatctcagcgcggatagcgcgctcgattccgcttcgcatgcaggtcggggaaacgaagagccggcgatagttatcacggacggcgtatccggtcatcacgttgaagaggtccgtcacatcggagcagatatcctgggcggacgtgagaaggccaaggtcggtgtagttcttcgcggagccgggattgtagttgccggtgccgatatgaacataggagcggatgccgctcgcttccttacggatcacgaggcagagcttggcatgcactttgagccccacaaagccgtaaaccacgtttacgccctggcgctccatttcttctgcccagttgatgttccgctcttcgtcgaaacgggccttcagttccaccacagcggtaacctgcttcccgcgctgacgcgcttccatcagcgccttcacgatcggggagttattgccgacgcggtaaagcgtcatcttgatacccagcacagccggatccttggctgcctgctgcaccagatccacgactgaagtgaatgtctggtaggggtggtaaagcagaatgtcacgcttcgcgatgttttcaaaaagcttatcaaccggctgagtatccgggttgaagctcgcgaagtacggcgtgtccttcagcttcggataatccagatcattcagagccatgtagcccgcaaaggccatcggacccttgacgctgtaaacctggaagggcttcagcttcatcttctgaatgatgaattccgtgaggttcgagggcataccgtgttcggtttcgaggcgaaccacaccgccccactgacggcgggtcacggagtcacgaacagcctcaagcaggtcgtccgcctcgtcctcttcaatctccacgtccgtattacgggtgatgcggaacatacccttgctcaccacctggtaccccgggaagagaagcggaaggaattcaccgatgatttcttctgtcggcaccacatcgatgcggcggtttccgagcggatcatccgcctccatttcatccccctcgctcgtcacgaagaagaagcggggaatgttatgcggcacgcggagacgcgcgtagtgatgcgtgccgtcacggctctgcagttcgatcaggaaattgatagagacattcgagattctcgggaaaggatgtcccgggtcgatcgcctgaggcgtgagaatcggataaatctccgtctggaaccgcgcgagaagcgttctctgagcatcaggagaaagctgatcataagaagcgacccgaacacctgcctcagcaagagcgggctgcagtttctcggtccagtgagcagccgctacatcaataagagcaagcgcctttttgcggatttccgtcagctgacgggcgggcgtcatcttatcggggccggaagaaccggaacccgtcttgtactgcttaaagatgttcgccacacggaccatgaaaaattcatcaagattcgtatagaaaatcgagaggaacttcacctgatcgagcagcgggcggttcggctcaatcgccgtttcgagaacgcgcttattgaagtcgagccaggaaagctcgcggttcgtatagagagcaggagaagtgagcgaagtcaccttgcgctgagcacgcttcgggcgggctgacgcggcggtcttcgcggcgcgggaagcaacggccttgaccgggcgggatgtggcagctgcagcaggcttcgcggctcggcgggtgcgcggacggcgtgccgccggcttggcactcttctctgctgtaacaggggactcagtaacctgagcaggtgcattctgatcggaagttttcttggaaactggcatatgaccctcgcgctgactctcttcagctcaaaaagccgttatgggaatctgtctatttttcggagcttcttataggctaaaagaagccgtaaagataaccttagcaccagaaagtgacaaatgcattacaagccgcaaagttgcggggaaagctctttcaggagggggtaaaaaccgatcggaaagcgattgataaatcagaggaatcaggcggaggaagaaacgggaaagaaattttccggcttccataacggaaaaaggccagctatcattagccgacctctcttcatcacatcagaaattctggagcgggagacgagtctcgaactcgcgacctcaaccttggcaaggttgcgctctaccaactgagctactcccgcagaacgaggatgcattttacacagtcttatacaaaaagcaaatgccgtcacaaaaatacggtataaactattttattcagtctgtattggtcttcctgatgcggcggcctgtcagactacaataggcgcaccactcactcagttttacaaagcaggctcaacactatgaattccaggcttctctgcaccgtttccaccgccctgatcgcgctcttttctgccgccgccggggccgcggttcctgatcattcagcagccttctgccccgcgaagggaaagatctcaatcgtggactttgaagccagctggtgcacgccctgcaagatgatgaaacccgcatggaaggccgtcgaaaaagaatacaaggggaaaatttcctttgttcatattgatatcgatgagcatccggatatctcaaaggccatgcagatcagcgctgtgcctacccagatactgttcgaccggcagtgcaaatttattgacgcgcattcgggctatctgtccgaatccgatctccgtgccacgtttaataatgttctgaagaagtactgagtggtatcctttcaataaggtctggtaatctgtagaataaatcgttactagcaatctgtaacgaacggataaccttttataccttttcttagcagtcagccatcaatcggcgccgctagaatgaaagaaataaagcagggatccggccctgacgctgcagatcccgctgcggagctttgctttgtaaggtctccgcctgttcacacagaaggaatacatatgaatctcagatttcttgcccttccggctgcgctcgctgccgttcttgccctctccggctgcgctaacgacaacgcgcgctaccgcgcggatgtctacggtccgggttcccttaaccaagcgcaggctgtgaaaaccgttgaaattctgtcggttcagacggcccgcatcgcgctcccgaatgaaaccaagaactctgcggcacagcttgccggtaccgtcgccggtgccgcggccggcatgattcttggcaatcaattcggtcatggtccgggctcccgtcaggatgcccgcatcttcggcggtatcgcgggcggcattcttggtaaccgcgcctccaacctcgcggctggtgaaaccgactaccagcagggtgtacagatcaccttccgggacggaaaccagatgtttacttctgttcaggtcggcaatccgtgtgagtatcagctcgggaccgctgtgatgattcaggaaacagcccgcggctcccgtattcagccgaataatccgggcggctgcggatctgcaacaacgtctgtcgctcactaagcaagaggtctggactcccatggcgtctcacacgtgagacgccatccagtcttttcagtgaaattccgggcttcggaaggataaaagcatgaaagaatctctggttctcgcgatctttacagttggtcttgccgcaagcggcgcggcttcggctgccggcgcggttcctccggattacgttccgccgtccgcttcttctgcgggtgttcctcctgactacaatccgaacacggcgacgactgtgactgctccccgcggattcactccgccctctgccgtgagccaggttcctccggatacgcagaattcgcggaccaccacggctacggacggtcgggttacgacaacaacgacctatccgccgaccccgattatcaagacagaatccggcgtgctgaatagtctgaagccccgcgcgccccagctgccgctttccgagcagattgatctcgtccgccggaatcaggctgatatcgcagcaaggcgggcggctgacgcggccgccgcggctcagggtcagacgtcatcagactattactacggacgctaaaacactgtctttttgccttctctgttcttaaggcaggatgtcagagacacagaagctccggaatagctgattccggagcttcttttttactacagtcgcagatatttaccagctcataatctggccatctgtccgtttctcagtaccgcccaccaggactcctgtctggctgtccctcagaatggcctgtccgcgtcccatcagcaccttatctgctatcagagtgacatcgtgtcctcgtctctggagctgccgcacgatatggttcggcgtatcctgctcaacctgaaccttcttcccgccgacccactgccagcgcggcgcgtcgagcgcctgctgcgggttcagaccccagtcaaccatattcatgacgaactgcacgtgggcctgaggctgcatatagccgcccataatcccgaagggacccagggcttcaccgttctgggtgaggaaacccggaataatggtgtgatacggacgcttcatgccggcaagcccattcgggtgctcgggatcaaaccggaaattgaagccgcggtcattaaacgaaatcccggttgacgggtcgacgattccggatccaaatccatagaaattgctctgaatcatcgagaccatgttcccctcgccgtccgccgcgcagaagtacacggtcgagctgtaccgggggtcacccaccttgggatcaatcgcttcttcaccgatcagcgcccggcggtctgccgcatagcgttccgaaagtagctgctcaggcgttacccgcatgaaggagggttccgccacatattccttcgtatcggtaaaggcgagtttgagagcctcaatctggcggtggatcgttgccggatcctcacggtcaccgagctccattcccttcagaatttgaagcgccatgagaaccgtaatgccgtgtccgttaggcggcagctcccagacatccactccgcggtagttgactgaaatcgggtttacccattctggagcataagcggcaagatcgtcgcccgtgaggaaaccgttatgagccttcataaaggcgtcagtccgctccgcgatctcacccgtatagaaagagcggccgttcgttttcgcgatgctccggatggtgtccgccattgcctggctgcggaaaatttctcccgcgcgaagcgggtgaccctgaggagcaaaagtcttcatccagccctcaaactcagggcgttctttcgcgagcggcgcgaagcgcttaaacgcgtcatcccagaggcggctgatgttaggtgacaccggataaccgtcttcagcgtagcgcgcggctggctccgccacggtttcaagatcaagtgagccgaatttctcatgcagcgcgcaccacgttgcgaccgctcccggcacatcaatcggttctacccccagcatcgggatcttatcgaagcctcgggctttaagagcgtcaatcgacgcagctctgggagccgggccggacccgttgatcccatacatctttcccttgtaccagacgatcgcgaaacattcgcacccgagaccgttaccggaaggctccaccacgggctgcgcaagcgccatcgcgaccgccgcatcaatcgcgttgcctcctttcaggagtgtctgcagaccggcagaggccgcactcgggtttccagcgcagcacatgccgtttttggcatagaccacattgcgggtcgacgcgtacggatagtgaagcggatcaaattcaatcatttctttgcccctctaaagttaatcgctgagaccggccgtgaaaaaacggcggcggacaggcgcatccgttatttttgcgccttccgtacgccgttgcgttattcattcaggacggaaaccttttatccgacgaacggaacgaggataccggcaatcagaaccgagaccgacgacacggtcgcaaagccagccaccaggtacttcgggagaatcgcgtcaagaatcacctcgcgctccgtttcagtctcaccgaccgctttggcgacttcgttcgcgatcagataagtcgccgggaagccgagcagctggcagacagaaaccgcaagcgccatattcttcgaccccagaatcttccagaacggaagaagccagaaagcgagatagagcacgacaaagacggccgcgaaaatgatgagcgtattgacgccaagccccaggagctgcgaaggcttgatcgttgcgagactcggaataatcgtcgcgaagcaggccacattgaaaataccaagcgacttcgcgtgaagcaggatgttcttcggcacgagccccagagaagtcacgatgacaccgagaagcaaagcccagatcggagcagagatgtgagtcatcttgccgatcacaaaggagagccaggcgaagagcgccgtaatcgcgagggacacgaagacaccgtagtacttcttgttgcgttcgaagaagttgggattcgacagcgtcccgtcctccttcttcggcgcttctttcttgtatttattcacgccggtcttacggaaatctgcgaccactgtttccgcttccttgatgccgaagtgggaggcaaaaggcgtgccaaagaatttctgcacagcgtacacgatcgtaccgagggccgcggccagagcaaagccatgctcaagagcagcagtcgtcatgatctgggtcgccacaatgccgccattcacgatcgggatcgtgacaagcgcttcattcttgccgatcaccgggatcagagcgaacccggtcacgacaacgagcgccatcgcgatgaaggacacggcgagcgtccgccactcatcaatcagctcacggagattgatggtggtgccaagcgaaaacacaatgaagagaatggcccacttgccgaaatccgctagccccgcctgcttgatgatgtcaggcgggatgatccccgtaataaaggcaatcaggaaaagaaggaggctcacgaaaacggaggaaaccttcgccttggtaagcactgagagaaaatctccgatgccgaagaagagcaggcatataaagagatagaagaacatattgttgaacatgacagcctcttattacagggttcgggacccttttttcgtagacgcacggagattgggctccattcgtccgggggatcgttataaagatgtccttcaaatatcttacgtattcccaaaaagaaacccggcctgaagttactcagtagtccctaggcgatacggtactagatcatgttttctgtagtctctgaccgttttttctgttccggatttctcccattcccaaaactaggtacggctgaactgcggtattcttcttctttcggatgaccaaacaaccttggatcaagaaggcaaaataattccatgtccaaacgcttgactgaaaacaaaccgtctgacactcccgttaccgcggcccgccctgtcaaaaacactgataccctgccccgccggatcgcgtcctggctgggtctgctgcttcttattgccttccccggagtcacgtatttcattgagccgcggttcggtgtcgcggcctctgcctgccttctgattctcgcgacgctgcttcggattctctataagccgaacgcccttaccggaatcatggcgatggtcacggcgattcttgggattcttgtcgccctgtcgcagagccttctgatgctgaagttctggccggttctcgcggtgattctcgtgatcctcgcgctctttatcgggcttggaaaggatgacggcatggtcgccaaggcggttgcgggcccggaaggcgcgaagacggatccccagcgggtctacgcccggagtctctcctacgtctggatcgtgctctttgtgttgctcggcgcggttgccgcgctgacctgcttctggggcaatctcaagtcatgggctttctggaatggcggtgtcgcctggtttgtcatcctgattttctatggcacggagcgagccgctcggggctttattcttcgggatctcgagcgccaggcggaaaagaaccgcgagacgctgcggcagatgcagcagaagtaaaacgcttcagctctgacggccggatgccgccagagtttcgagcatctcaggctccggacgccacagcgcgaccggagcctttcttgaaagcgcggtcacccgcatccagccgtccgtgaggtccgtactgaccaccatgccgcggatccgcggctcgtgatcttcccagtaaaactctctcgggcagtccgccttgacagcgcactcgtacgccccccaggccctgaaaaacgcggtcccgatatccggctccgctttgacacgcgccgctgtctcgtgattaaaggctacgtccgcgtagcgaaggagagggcgcgagagatctattttctcgagatccgccgcgcagatttctgagtcaacgaggcacgccacgcggtttccgctatgcgtgatcgatgtccgaagcacaccgtccggaagcacgatccggggagcgcggggcggatcctcaacaatctgaatcgaatgacgcggaatatcggggtacagcttctcagcgagcagccggatcagaacccgggcccagatatgctggttacggcggagaggctttgtgaaacgcgctgcccgcgtgagctgctcatccgaaagaagcccgagacactcaggtgtcacaggtctctcagtgatctcaatctccgcgtaaacgggaagtgttagacggctttccatctgccctgcttagtgggtcgtatcaagccttgcggtacccgtgaagcggctcgcaccggaattcacttcagcgatatctcctgttcccttcttccagaagaaaatccgcccctcgtcagacgtgaggagccggtcgccgaccttaagcaggatcggacccacgccctgaaccttggcgccgcccgtcacctcaatccactcccggccgtctccgggcgcggcggcttcagctgtcgcggtcagcgcaccgggctttacagcgcagaccggaaccgcggttccaggtgtcatcgagcagcggcggaccggataagtcttcccatccggagcctgcagcgtaccatcacccgcgagtccctccgggaagagcgtaatgcggagatccgggatcagatcctttgccttcgcctcaccgattccgccgtctgtccggaggttatcaatcgacgtgtaagcctgccaggtttctgaggcctccgggatcagcggcatcggctttgcttcgggcacccggaattcgtacccggcatgcgtttcaatccactgccggagcgtctgatgaagcgttgctccgccgctcggttccgtgacattgatgaacgccgcgtccacctcgcggatcgcgatcaggaagtcccgcttaccgggctctgccatattgccgatatcgagcgcgatcccggggacatctcccgggaaagccacactcttcacgcgaagctgaatttcgtccgttccggatccgacagcacccggggctgaaaccatcgtgcttttcgcctcttcaagccacttcgagaccggttcaacgccggacggtgtttcgatacccacgcgggttgccatcgcttctggaatccgaaggaccagcctgcggctcagaatcgaggagtctttgttccgggcgtcgagcgtaatcagaatcgcagggctcccgtcatcgatgccctgacccgtgatcacgaatccaggctgcatcggcacaggagccgcggccgccgcatcgaattctgtcgaaaaggatgtcgtgggatcaggtgactgcgcctggacaaccggggccggctgctttacgtcagaggtcgaaagatccgtcaccggggcggttccgggagttacggtctgagaacccgcccccgaagtctcaccactcccaagagggggctgccagatcggcaccggagtctcgcagcctgaaaggagaagcagagcagcagctgccgcggctgcggtacgagagacacaggaaactttcttcatcgttttctccttaaatagactgttcacggacgttctgaatcgggatggaaacctttcgggctatttcgcggcggaagcgctctgagaggctgccgggctctgagaagccgcggcggccgacgcgggagctgactgcgtcagaggcaccccgaaccggggaccgtcctcctggaaataaagcacctgcgtcttcacgacctgccagatgcaataaagcaccacgatcgctgcgatgacccgaagcacctcgaaaaagatccgcttcagtttttcgtcgtccaaaattcctctccctcttgattccgggctctcaacggcccctatcagaataatcccttattttacctgctcacgcctcaggacttcccgagactgatcggcgcttttgcttttggcaacacaattgtcatcacgcagccgtgaccgatcgcggtgttcggggccgccatggcgtggcctttatggcgctcggcgatattcgccacaatggagagcccaagccccatgccggacattttccccgtgtgaagcggctcaaagaaaagatccgccttttcctgcgtgagttcgagcccgttatccgcgactgacagatgccacatgccgtcaacatccttaagcgagatatggatctgcggatccggggagccatgaagcgcttctgacgcgtttttcagaagattcagaaccgcgagctggatttcccaggcatccacctcagcccaggagtacggcaggcaggcgagcgtaatcggcggcgcgtcaggatagatatggtggaattccttcgcggccttttcgagcaccggcttcatatcgagtacctgcatcacaggatccgggtgtttcgcgtagccgcggacgcggtcaacaatctctgacgcccttgtgccctgcccgacgatttcctccagcgccccttcaagcaccttgggatccacgggaccgcggtgaaggcgccgcagaagaccgttaccgaaattattaatggctccgagcggctgcttcagctcatgcgcgatcatggaggacatctgaccgatgataccggtgcgctcaatcgcggcgatatgctcgcgcgacgccgcgatttcctgctcgtaacgctgccgctcctgcattgacttccgaagcgcgagggtcttccggcgcaccatcatctgaagcactgcggcgtatgacaccaccatcaggataaaaatcagggcgaccgccacctcagccgcgttttccttcacaaaccgctgaatgctccactgcgcgagatactgatacggtccgatcttcaggcgataaaaaacgtcaagaacgctctgcatggaagcaggcagcgcccactgcgcctctttcccggtatgcggcatcaggtagagcgcggtcgccatcgttttctgggtattcccgtctgtcttctgcagcgacgccacggtgagagacgggaaaacgtctgttgagtgagagcactgaagctcagtttcacgcctgggattgatgatccggaagtccgagagactgatcttcttctgacggtctagcgcttcaagaacacaggccggaagaattccggccgcggctttcccggacagcacgtcgcgcgtcacattttcgtacggggggcccgtgaagtagagctcctgcaggtagcccggcgcgtagccgcggcgcgagagctcataaagcggcaccagataccccgggaaagaatccggactgatcgccgcgaccgcgtgatcaccgagctgcgcgagcgactgcacatcaagactctgcgccttcgtaaagaaaaccgcggaggccacactattcacgtcacgcgcttcgacaggccagaaagacgcaatcagacggagattgttttccatctgcgcctgggcaatgaagtctgactgcccgatcacgaaatccacatcaccgttccggatcgcctcggcgagttcccctcgggtgagtgtcatgaattccacccgccgtgatccgaaagcctcgcggatacggtcttttgtgcgatcgaggaacccgccgtcgcctggctgcagcacgttcaccgcggtggtctgctggattccgatcctcaccgtggcgttggcatccgcgggggacgccgagacgtccgaaaacggcccggggctcatcatctggggcgcatagtccggatccagcaccgagcggctcggcatcggaaccgcggtttttccagcgggctgtgaccggggagccacaagttcggccgcgatcggttccgcgaccgccggaaacgcgatcgccgccgccatgaggaccgcaacggccttcctcagagaaacccccgcaagacacgaaaaggcatgccgcggagtgaatccgcggcatgcctcagataaagtcggtcgatcagatcgcatcagcgaaacgccgctccggaaatcagactccagggatcggaatgtgctttccgggcttacggtgatccagaacgcggataacttcgtagtcactcacgagaccggcaggagtctgcaccgtcttcacgtgaagattcacgatcaggatgtcatccgcattcaggcggaagacgccgttatcgatgatacggaggaagtccttatccgccatgcgagcgcggatcgtctgttcaccatcgaagaaggtccagatctgatcatcgcggaagttggaggtcgggagcatcagagcgcgggtgtgaatgtcatccacgagcaccacttcctcttccttcggaaccgcgtagaaatccgcatcctcacgcgcgagcttcacggtcacattgccggtcgcgcggttacggatctcaatcgcctgcacttccggattcttgaagactccggcgagctgctcaaccgcctcacgcacaccgaggtggcggaaaagcttgtaggtatgggtcgatacctcgtaggtatcgcggccgcaggtgatcagaacggtttcatccttcagcgtgaccgcgtcaatacggcgtccggcaatctgcttcagcagctgaaagagtcccagcagagacgtgttttccgtctccaaccagcccagagcctcgccgacagaagattccggcggattgatgaactcagcgacgccagccagctgagcgcggcgcgccataccgaaattcttcctgaacccgagatcaacgctataggccgtaagcgacggatcgcggcgcacgtccacttccggatcaatcagatagccgtagagcgcccgggaccccatcgtcagcagctggtccacgccgataatcgcctgcgcgagcggctgattggtagtagtcgtttcaaccttctgcgcaccggcaaaggcaatatcaaaagcggcaatcatggctttaaaaaaacctcagttcaggtttccacggagaacgaaagaaatctttcgctcgtgtacgggtaacaaaacccggcgcataaaggaccgccgggcggaaaattcatacaatgataaaacggaatgcgggaggctgcacctcgcggcgttccgcttcatacagattcttttattgagccggggggatcagaggccggatgtccgccaaatcagccgccaatccagaaattgaaggaagcgcagtgatcctctccgcggagaggaccgctcctggcatcgcgcctctcgagtcactcggcctcccgtcgcttctcgatgggtcccagggacgaaaccggggaccggaagagaaatccgcgctcgacgtttcaaacgacctcgaagcgatccacgcctggctcgcctcgcgcgcctcaaaccccaacacccgaagcgcgtatcagaaagaggctgagcgatttctcctctggtgcatcatggagaaaaacacggcgctcagctcggtaaccgttcctcaggcctctcagtatctccggtggcttgaggatctcgcgcgcctcacgccggaagcctggagccggaagtggcgggttcctgccgcgcagtggattggaaagaagagcgaaagacgggattcccccgcttggcgccctttcaacggcccgctttcccacacaagccggcgtcaggctttgactgtggtgaggctcctcttcagttttctcacgaaaaccggctacctccgcaccaatccttttgatcaggtcccgcagcgcatccgttttctccccggggaaggcgcgccgaaagagttttctgaccgctcgcttacgccagagcagtggggtgacgtcctccggtgccttgacgccatggaggatgggatcgaaaagtcgaggcttgaaaccattctcatgatgggaaagggactcggcatgcgggcaagcgaaatgctctcctccaccgcgggctggatcacgcagcgccggatcgggaatgaatccgtcaccattattgaggtgatcggaaaaggggacaaagtccgccgcctgcccttgcagcaggagcatctcgacgccttcaacgcctatctgaagatccgggggcttcccccgatcggaagctgccccaagggaaccccgcttctcgcgagtctcggaaagggaaagcgtccgaaaaacgcgacagacgccctctcccgctccgggcttcaccgcatactgaaaaagtttctcgaggaagcggcgcttctcgcggatcagaagaatccgatcgacggcgcgaagctccgcacagcatccgctcactggctgcggcacacctttgctgaaaccgctcttgaatccatgccggtgaatgtcgtgcagacggcactcggtcactcctctctctccaccacgtcgctctacctcgtaccggcggacgcccgggtgatccaggaattcaagaaggtaaaaccgatctgagtcagccgctcaggaccggaaagccgagcggtagctttccagaatcttttcaagcgcgagcttgttattgaggggcaccgtggaggcccgtttcagggactcagtctcatcgagccagtgaaagagcgcctgaagatccgcgcgcggcgcgatcgactgcagttcgggggtctcgccgacaaagtaggacggctgaagaccggacttcacgcggatcagatccgtgccccagcgggaaagaaaatccgcgcaggcgtcgagcttccagccggtgccgacacccggcgcgacctgagtgatatccagccgtttccccgccttaagcaggttcaggaaaagcgttctcgcctcatccggcacgatcttatgacctcggaccacggcaagcggattcccgcccgcttcggcaagctgctcatcaaagtccttcagccctttggattcaagccaggaggaggctgcctccggatccggctttctcgcgtgaagcagaacgcagcgcgagcggagggttgggagaatggcgtcgagatcctccgcgatcatgatgaaactgagatcaggcggcggctcctccaccatcttgagaagaactgacgcggcgtccggccggatacggtccgccggcgaaatgagaatgacgcgtctcgggctccggtgaggcttcagcgccacgtagtcccggagctcacggacagccgcaatggagatttcgtctgagagtttcttcccggcgctttcagggatgggcagatcgtgcctcgctgcctcctcttccgaaagcagaaaacggatatccgggtgagttcccgcttccgcgagccggcatcccgggcatttcccgcagggcgtgccgtcctctgccggattctcacacatcaggctcttcgtaaaagcgagcacgagctcaaaggtgccgatatcccggggcccgctcacgatgatgccgctcggcatccggtgtctgaagatttccagatcccggctgagtgcttcctgccaggggtaaatcgcgagcggcataggtttttccttcgctgatgtgaagaaacgggtgaaacagaaaggggcggcaacgccgcctccttcagaatcccctccgttatttcttcagaatgtactgattcacggcggcattatgttcgccgagcgtttccgaaaacttggagcggccggaaccggacgcgacaaagtaaagatactttgtgtccgccggatgcatcgcggcgtgaatcgcctcacgtgacggacacgcgatcggcgtgggcggaaggccgcgctggcggtacgtattataaatattgtctttcagcagatcgtctttcgtgatgttcttcgggtcagagcgggtttccaggcccttcgcgtagagcaccgtaggatcggtctgaagcggcattccgattttcagacggttatagaagacactcgaaacaaggtatttctcctgcccctgacccgcttccttatcgataagggacgcgagaatcagcgcctcatacggtgtccggatgagagcggtggccgccgtatcgcggttctgccactcagaatccagaatctgtttctgatgacgcaccatcttcgcgagaagcgcggcatcagactgccccggcttgtagtaatacgtgtcgggcgctgcgagcccttcgtaataactgacagaagcggattccctgaattttttgcggaccgaatcaatatcctgatcaaatccgcggaaaacctccggatccgatttcagggtggcatccgaaaaatcagtgagcttgcgatcgagatccgggctctccttaaagagtttttcaacgccccagatattcgctccgtccggaatccggataacgaggtaactcacgcgtcccgaggcaagtttgaagaaaagtgaaatcagaggcgacttcggggaaagctgatagcagcccttcttcagacccgaagaggaaaacgcgctcgccgccgacaccacggggtacaggatcgcttccggcgtctgaacgccggagagacggagttttttcaccgcatccgccgtcgttgtgtctgtccggtcaatgatcacggagagcacaccgtttttcgggacggtggtccaggatatcggctggaaaataaaaatcagggccagaagaatgaccaccacgacggtggctctccggtcaaatcggatccgtttcatgaaataacgcaaaaatcagcaaatacggcaggcggtcccgtgtttttctccggaccgctgcggaaccaaaacttttctgatgataaaagatttccgggaccggttcgggcggaaaaagccccggagccgtttcgaaaagtttccaagagaggagcggagccccgggctccgcaccgggcaaaagaaaccggcttccccggtgtaacaggaaagccggcaagtcccgcgattcccggacgaatccgggatcagcgaaacactcaggcgcggttcatcgcgtgaagttcctgcaggctgcggacctcgacatccttcgcgtgcttctggccttcaaccgcggcggcagcgcccgaaatcgtcgtgtagtacacaacgccgagctgcgcaagcgccgtctggcggatctggcgcgcgtcgctgatctgagtacgggattcgtcagccgtcgcgatcacgagctgcacgtcaccgttcttgatcatatcgaccacgttcggacggccttcagaaaccttattcaccacacggcagggaatcgccgcatgctgcagaagagccgctgtgccgcgcgtcgcgacgatattgaagccctggtcacggaggtgcgtggcaaccgacaccgcgcgggccttatcgacatcgcggaccgaaataaacgccgtacccttttcggggagccggtcaccggcgccgagttcagccttataaagcgcttcgccgaacgacgcgccgacacccatcacttcgccggtcgaccgcatttcaggtccaaggaccgggtccacaccgaggaacttggtgaacgggaacacggcttccttcacgcacatgtacttcggcgttaccccaaccttgaccccctgctgcttcatcgtctgcccgaccatcacgcgggccgcgatcttcgcgagcggctcacccgtcgccttgcagacaaacggcacggtgcgcgaggcacgcggattcacttcgagaatgtagaccttcgggttctcggagtaggcgtgctgcacggcgagctgcacattcatgagccccttcaccttaagcgcctcagcgaggagtctcgtctcacgcttgatctcttcaacgagctcagggcggaggctgtaaggcgggagcgagcacgccgcgtcgcccgagtggacgccggcctgctcaatatgctgcatgatgccgccgatccggacttcgtccccgtcactcacggcgtcaacgtccatttccaccgcgtcgtcgaggaaccgatcgaggagcaccgggctgtcgttgctcaccttgatcgcctcacgcatgtaggcctcgagatccttccggctgtggacgatatccatcgcgcggccgccaagcacgtaggacgggcggacaacgagcgggtacccgatttcgtctgccatcacgatggcgtcttcttcggaccgggccgcacggttcggcggctgcaggatgccaaggtctgacgcaagcttctggaagcggcctcggtcttccgcgatatcgatcgaatccggagtcgtaccgagaatcggcacaccttccttctcaagcttccggcagagattgattggggtctgaccgccgtactgcacgatgacaccgaacggcttctcaatgcggcagatctcgagcacgtcttcgagcgtcaccggttcaaagaacaggcgatccgacgtgtcatagtcagtcgacaccgtttccggattgcagttcaccatgatggtctcgtagccatcttcgcggagcgcgtgagcggcgtggacgcagcaatagtcgaactcgataccctggccgatacggttcggaccgccgcccagcaccaccaccttcttccggtcatccggatcggcctcactcgcgccgtggtaggtggagtagaggtaagcggacgtggtcttgaattccgcggcgcacgtatcaacgcgcttataggaggggtgcagcttcatcatccagcggtcagaacgcacttcgtcctcagacacgtggagaagcttcgcaagacggcggtcggagaagcccttctgcttgaggaagaggagctcttcacgcgtgagcgaggaaagcgtccggccctcaagccgcttctcgatatcgatgatttcctgaatctggataaggaaccaggggtcgatattcgtcgcttcctggacttccttcagcgtcatgccgatacggaacgcgtcaccgacatagaagatacgctcggggcccgcgtcggaaatctcatagacgatctgttcgcggtcggatgtcttgctgtcaagaccgtccttaccggtttcaagaccgcggagcgccttctggaaggattcctggaacgtgcggccgatcgccatcacttcgcccacagccttcatctgggtggtcagacggtcatccgcctgcgggaacttctcaaaggcgaaacgcggcatcttcgtgacgacgtagtcaatcgtcggctcgaaggaaatcggggtcttgccgccggtgatgtcgttccggagttcgtcaagcgtgtagcccacggcgagcttggccgcgaccttcgcgatcgggaaaccggttgccttggaggcgagagcggacgaacgcgacacgcgcgggttcatttcgatcacgatcaggcggccgttcttcgggttcacggcgaactgcacgtttgatccgcccgtatccacgccgatctcgcggagaatcgcgatcgaggcgttacgcatgatctgatactctttgtcggtcagcgtctgggccggagcgacggtaatcgagtcgcccgtgtgaatacccatcggatcgaggttctcaatcgagcagacgatgatgcagttatccgcgtgatcgcggaccacttccatctcgtactctttccagccgagaagcgactcttcaatcagaagctcgtgcgtcggggaaagcttgagaccgcgctggcagatccgcacgaactcttccatgttgtaggcgatgccgccgcctgagccgccaagcgtgaagctcgggcggatgatcgtggggaatcccacggtctgctgcacttcgagcgcttcctgcatgttgtaggcgataccggacttcgcgcattcaaggccgattttctccatcgcttccttgaagagcttgcggtcctcagccttttcaatcgctttcggcgaggcgccgatcagttcgatcccgtacttatcgagcacgccgtgattcttcagatcgagcgcgcagttgagcgctgtctgaccgcccatcgtcggcagaatcacatcgggccgttccttcgcgatgatccgctcaaccacctcccaggtgatcggctcaatgtaggtcgcgtccacgagccccggatccgtcatgatcgtggcggggttcgagttcacgagaattacgcggtacccttcttccttcagcgccttgcaggcctgagcaccggagtagtcaaactcacaggcctggccgatgatgatcgggccggcgccgatgatgagaatggattttatgtcctgacgttttggcatttcgctatcctgtctgccgcctttccccgagtggccggagcgctccccgggcaaaggccaatattaagaattaccggaaaattacctggccgccttgctttcagcgtacgtacggaccatctgtccgaaacgctcgaaaagcggggaaatgtcctgaggtcccgggctcgcttcagggtgaccctggaagctgaaggccggagcgtcggtaagctccataccctggagcgtgccgtcaaagagcgactcgtgcgtcacacggacattcgcgggaagcgtggaggcgtcgaccgcaaacccgtggttctggctcgtgatgtagacatgcttcgtcttcacatcgatcaccgggtgattggcgccgtggtgaccggtcttcatctttacggtctttccgcccaccgcgagaccgaggatctggtgcccgaggcagataccgaagaacggaatgccggacttcagaatctttttcgcggtttcaatcgcgtacgtgcagggttccggatctcccgggccgttcgagaagaagaagccatccggggaatacttcatcgcgtcttcaaaggaagtcttcgcgggcagcacggtaacgcgcagtccctgattcacgagaaggcggagaatgttctgcttcacgccgaagtcgtaagccacgatgtggaagggaagctcaggcttcgtgtaggaggtagcgcccgtgtcgttatcgatctgccaggtgccttcggtccactcgtacggagccttggtggtcacaacctgagcgagatcctgacccaccatgccggtgtagctcttcgcggcttccacagcggcattcagttcctcgtcagtcagcgtgccgttcgcggccgtcagaatacagactgcctgcgcgccgcggtcacggatgatctgggtaaggagacggttatcgacttcggcaatgccaaccacgccggaacgggtgaggtattcggaaagcgtttccttcgcacggaagttcgagacgatgggagaaagggtttcgatgacgaggcccgccgcgtaaatgcggcccgattcggtatcttcgttattcacgcccacgttgccgatatgcggatacgtgagattgacgatctgaccggtgtaggacggatctgtcaggatttcctgatagcccgtcatggacgtattgaaaacgacttcagcgatggtacgactgggcgcgccgatggaacggccgcggaacagcgttccgtcggccagggccagtacagcctcaggccggttgtcctgaatgagtgagctcacgtgcttctcccgttacgttaaacagtgtgcccggcgggcaaccgacgggttcctcgctttcggggcgcacgagccggaaccagctttgaagggaaaagaaggcaccggcttacagattgtgttgctcgagacctccgaaaccgaaagtctgttgcggttaactgattattatactgtgagacgaacgtctctgaaaatgcctggtacccgggacgggactcgaacccgtatgccgaagcgagggattttaagtcccctgcgtctaccaattccgccacccgggcactcgctgatgcagatatgaaaaaaggaagcccttgaaagcttcctcttctcgaaaatggagcgggagacgagtctcgaactcgcgacctcaaccttggcaaggttgcgctctaccaactgagctactcccgcataggaatacaaattctacggataaaaagccgtttgtcaaggcttcgtctccaaagattttttccctctactggtttttcgttacgattccgcccttaacggattgacacgcacctatataattaatgagataggacacttatttactcaatcagaaaagccatgccgctgagccgccgaaatctgctgacactgcttctgacagccgccatacctgggctgccggcggctgtctgcgctcagcttccggatccggctctgagaaatacggagtcgagcgaggatacgtcttaccccgcgatgccagaggttcaggcttacattgaggaaaccgccgcggcgactcagcttcctaagtcctttattgaagaggtcctctcgcaggctacgtattccgcccgcgtggagcagctgatgacaccgaagccccggaagccgaatgcgccgaaaaccgcggtccgcggcgactggcgggtctatcagcaccggatggtcggaaagtcccggattgagaagggatcggaattcctcgaggaaaacgacgaggctttcggaaaggcggaggaccgctacggcattccgcgggacatcgtggcgtcgatcatcggcgttgaaacggtctacggcagaaaccagggcagtttccgcgttctggattccctctgcacgcttactttcgattacaagcgccgcgcggattacttcaggacggaactcaccgagtttctcctgcttcttcgcgagcagcatctcgatcctgctacggtctatgggagcttcgcgggcgcaatcggcatggggcaattcatgccctcctcggtgcgcaagtatgccgtcgactttgacggggacggtcagatcgatctcgttgggtcgagcgctgacgcgatcggctcagtggcgaactacctctcaagccacggctgggtccgggggcttccgccgtttttctcctgcacgccggacagcgacgccgatatgcggctcgtcacaggcggcatcaccactgatacgacgtttgaccacgcgctccgggccgggttcattccggatttcgagctcaacatcccgggtgacgaacctctgatgatcgttgatctcccgtaccgcgaccaggatggaaagcaggcgacagagtaccgcctcgggacccggaatttccagacgatcctgaactataaccacagctatttctacgccagcgcggtatcagatctcgcggaggaaatcgaaacgatttcgatggacagcgcagcggccagcatggcgtcaagctccgcctcttcctgaaaccggtgatcatttcccggaatgcaaaaaccgaccccggttctgtaccgaggtcggttttttcttgcctatcccgaaagcgcgcgggagtgacgtatcaaacgatcttcatatcgagcgtaccgacacccgcgatgccgcccttcaggaaatcgcccttcttcacgggaccgacaccagccggcgttccggtgaagacaatatcacccgccttcagttcccagaacttcgagagatggctgatcagctcagccggcgtgaaaagcatctgatcgatattgccgtcctgctttttctcgctgttcacgtagagccagatccccagattctgcagctccggtgtccgttcaatcgggcggagcgccgtgacggggagcgcgctgtcaaccgtcttccccttttcccagggctgccctttgtcacgcattctgaagtgccagtcgcggcgcgtaaagtcgcagccgaccgcgaagccgtagatcgccttttcagcttcttcaggcgtgaggtcgcggccgcctgacttcagcgcgacaacgagctcaatctcatgctggaaattatcggactgaggaggatacgagatttcagccacggttccttccggaaccggcacaaccgcgtcaacaggcttcaggaagatcaccggctcgtccggagcgttcagctccttattgtgggccgagtagttgtgaccgatgaaatacacgcgatgcagggggaagtaaagattcttctcccccacgatcggcagaacggcctgagggggcggtgcaaaaagaaatgacataggaactcctctgataaagggcggctcgcgccgcgtccgcatgatgcttcatttgcctgcggccctcagggcttaggcggaaaagccagcgtcaggcttcttcctcatcacgctcaggcttcacggggttcggacggcccttccaccagagataagcctgatagacgtagcccgagacggcgtaaatgcagaagatgatgaagatcgagagtgacggattgctcgaaataatgatgaagagaatcgccgcgacgaaaaggaaccagaacggcacggttctcacaacggcaaggctcttgccggagaagaacggcgcgttgcagaccatcgtaaggccggcgaaaaccgcgagcaccgcggccatccagggaagcgcgtcacccgtccaggcggggagcttgttatcaaccgcgagccacacaaagcctgcgatcagtgcggcagccgccgggctcggaagcccctggaagaagctcttatccacgaccttcacattggtattgaagcgggcaagacggagaccggcgcccaggcagtaaatgaaagccgcggcccagccgatctttccaaggccggaaagcgcgaactgatagatcacgagagccggcgccacgccgaacgctgtcatatccgcgatcgagtcatactgcacgccaaactcgctctgcgtatgagtgaggcgggcgacacggccgtcacagccgtcaaaaatcatcgagaagaagatcgcaatggaggcaatatcaaagtgcccggccatggcctgaacaatcgcgtaaaacgcgcagaaaagcgacgccgtcgtaaaaaggttcggcagaacgtagatgccccgcgtgcggacaatcctgatattgcgctttccgatttcggtaagcggaactcgctgacccgggatgtgttctgaagtcatttttatcgtcttttcctgaataactgaatgcagacgcggacgccggggcttacccaggcatccgctttgcttttttgggggaacggtcagagcgccgaagccttacttcgctgaagcgtcagtcgtcttcgcgggttcagccgcggcaggagcgcttgtctcagactccgcgggagcggcagccgccggttcggactccgaaggcttcgccgcggcaggagcttccggagcttctgcttcagctgcaggggctgcgggggccgcggccggtgcagcgggggtttcactctgagcggcagcaggtgctgtcacagaagagtcttccgattcatcgagcggagcctcgggttcatccagagcctcgccaagaaccgcgaggacggttgtcgtgccccagaccttctccccgatcacaaccttcgggcgggcgttcagcggaaggtacatatccacgcggcttccgaaacggataaagccgtaacgatcaccccggttcagatgatcgccttccttcacgtaattcagaatgcggtgcgtcacgagacccgcgatctgaacgaacgtcaccaggttcccatcatccgcccgcaccacaaggccgcactgctcgttctcagcgcttgccttatcgagcgacgcgttgaaatacttgcccgggcggtacaccttcttcagcacggtgccgtcaaccggagacttctggctgtggacgttgaaaagattcatgaagacggagatcagaatcgcgtcacgtcccgtatagggatccttcgccttttcaaccttcagaacctggccgtcaacgacggaaagcacaagcttctcgccctggggaatttcacgcgccgggtcccggaagaactgaaccacaagaataaaaagcgcccagaagatgacgctcagaaagccccagcccattgccgtcgcgagaagcgcaagaacgcccgtgcccgccatgaagggccaaccctctttcgcaaagatgggatggggatagattcttttatccatagatattgatctccaggatctcaccaaaaacgtatttccgatagggcattctatcagggtgaccgcgcaatttctctacacctcccccgtatccgttttcattccgcaccgggtatcccggcagatacgctgtcgccccggagaacccatattccccggggcgacggaaagctgctgaaatgactcagcaagagcgatcagttcttgctgcggtcaaccagacggtgagcggtgatgaagggcatcatcgcgcggagtttctcacccgtggtctcgatcggatgacgggcggtctgggcacgcatcgaacggagcaccggatagccgaacgcgcactcttcaaggaacgccttcgcataaacgccggactgaatatccttgatgcactgttccatcgcggcacgggaggtttcattcacaaccttcggacccgtccagtactggccgaattcggcgttattcgaaatggagtagtccatgttcgcgataccgccttcgtacatcagatcgacgatcagtttcatttcgtggaagcattcgaaatacgccatttcaggcgcgtatccggctttcacgagggtctcaaagcccgtcttcacgagttcaacgataccgccgcagagcacggcctgttcgccgaagaggtccgtttccgtctcttcgcggaacgtcgtttcgatgatgcccgccttgccggcgccgttggcggaggcgtaggagagcgcgatatccatcgcgcggccggacttatcctggaaaacagcaacaagctgcggcacaccggcaccggcggcataggtggagcggaccgtgtggcccggagccttcggggccaccatgatgacatcgaggtcctcacgcggaatcacctggccgtagtgaatgttgaagccgtgggcaaaagcgagcgccgcactctgcttgatgttcggctcaacctgctcacggtaggtcttcgcgatgttttcatccgggatcagcatcatgacgacgtcagcgcctttcacggcatcttcaacggacgcgactgcgagaccggcagcctcagccttcttccaggaagcgccgttcgggcgcagaccgaccaccacattgacgccggagtcatgcaggttcagcgcatgggcgtgtccctgggaaccgtagccgatgatcgcgaccttcttgcccttgatgatggaaaggtcacagtccttgtcgtaataaaccttcatgctttttctccagaggcgcggggcctcgtcagatggaagaccggcttcggtcttccggtaaattcagatcagtaaataagaaacgcttttgctgctaggacttcagaatgtgttcgccgcggccgattccgagaacgcctgaccggacagtttccagaatttgcttcggatcaatcgcggtgagaaacgcgtcaagcttcccggcgtcgccggtgatctcaatcgtgaaagagcgttccgtcacgtcgatgatgtgaccgcggaaaatatccgtaagccgcatcatttcatcgcgctcacggcccgcagccctgacctttacgagcatcaggtcgcgttccgcgtagggcgcctcagtcagatccaccaccttcagcacctcgatcagcttattgaggtgctttgtgatctgttccacgagcgcatcgtcaccgtggctcacgatcgtcatgcgcgagaggtgttcagactcggtcggcgcgaccgtaaggctgtcaatgttgtaaccgcgggccgaaaagagtcccacgacgcgcgaaagcgccccggagcgattctcgaggagaatcgaaatcacgtgtctttctccgctcattctcattcctccctcagaatcattcgggtgagaccttctccaggcccaaccatcgggtacacgggttcatcacgcttgatctgaacatcgagcacgcagcattcgttccggttttccccgaaagcatccttaagcgccgcgtcaagctccgcgtacgtgcggcagcggtagccgacgtggccataggctttcgcaagcgccacgaagtcaggctgcggatccagcgtcgtttcggaaagccggccgccgcagtaaagcttctgccagaccgccaccatgccgaggtatccgttattgaagatcacgattttcggcgcaagaccgtaacgcttgcaggtgatcagctcctgaatgcacatctggatcgacccatcgcccgtgaagcagacgaccggtttatccgggaacgcgaccgcggcgccgaccgcggcgggcaatccaaagcccatcgtgccctgaccgccgctcgtcagaaaatgtctgggctcgtcgagcttcaggtactgggcggcgtacatctgatgttcgcccacatccgttgtatagatcgtgtctgcgggggctgcggcctgaaccttttccaccagcgcttccggcatgatcgacttgctgtcagccggatagtcaagcgacttcctcgacctccactcgtcaatctggttccaccagggcgtgaggagctcggtgttctgccggtagtcctcttcttcaagaaggctcaccatgtcagcgagcaccgacttcacgtcgcccacgatggggatctgagccttcacgcgtttcgaaatagatgaagggtccacatcgatatgaatgacagttctcggacggctttcgaaatccgggacattggagaccagacggtcctccatccgggagccgaaattaatgagaacctcgctgttctgcagcgcgtaattcgcttccagcgttccgtgcataccggccatgccgaggaacttgcggtccgacccccggaatccgccaagccccatcagggtcgaaatcacgggaatcccagtcagccgggcaaaccggttcatcagttcagaggcatccgacagcaccacgccgccgcccacaaggatcagcggacgggcagagtcgagaagcgcgttgagcgccttcctgatctgccccatgtgaccgcgggtaatcggcttataggtcggaatatccactttctcgggatagtcgaaaacgcatttctgaagctgaatatccttcggaatatcaatcagcacgggacccggacggccggtcgtcgcgatatagaaggcttccttgatcgttttcgccagatcctccacatgacgcacaaggaaattgtgcttcacgcagggacgggtaatgcccacggtatcgcactcctggaaagcatcggtgccgatgaaggaggtgccaacctggcctgaaataatgatgagggggatggaatcactgtaggcggtcgagatgccggtcacggcattcgtcgcgcctggacccgacgtcacgataaggacgccaggctttccggtagcgcgcgcataggcatcagcggcgtgcgccgctccctgctcgtgccccgtcaggatgtgctggaaagcgctttgcttgaagatttcgtcataaatcgggatgaccgctccgcccgggtaaccgaaaacctttgtcaccccttcctcggcgagcgcccgacagacgatctcagcgcctgtaatcggcgttccggccgcgcgggcggccgtctcactggcattcatatagttgcgttcctttcaaacctaatctggatttgattgggagacctccgggactgcttttggccagcctgtcggtcaactcgaattgctgccgcatctgctcaggtccgttctgcggatcgattgatacgtgttcctggttttgataaaaccaataataaaaaatatacacttttgaacattggtttgccaacaggaaactcagcagaactacagggaaacaactagacagaaccgggtattatcaatattctttcaattcgtagcagaatttctgaaggacctcccggcgcgacatttcctctgcctctcgagagatatttcggttcttcttcggagagtctcataaagatccccctcttctccgggactcccctcacaaaaaatcaaggacagcaacatggcgaaatcaaccgaatggggctcgcgtatcggcttcattctcgcttccgcgggctcagccatcggcctcggcgcaatctggaaattccccttctgggcgggcgcgaatggcggcggaaatttcatcattccctacatcatcttcacctttacgatcggtgttgctctcctgatggctgaggcctcggtcggccgggccggccggggttccgctgttcaggcgatgaagaagatgggaggccccttcttcgcgatcgccggttttatcggcgtgatctcttccttcatcattctttcctactattccgtggtcggcggctggtgcgtgtcgtacctcatcgggtcgctcacgaacagcgtgctttcgagcgacgcggaaacgctgaaagagggctttgcggttctcgtgtcggatccggtaaaaaatgtcttctggcacttctgcttcctcaccctcacctgcggcgtcgtagcgctcggcgttgagaaggggattgagcggattgcgaaattcctcatgccgctcctctttatcctgatggtggtgatccttatccgaagcctcactttccccggcgcgatgaaaggagtggaattccttttcgcgatccacccggagacgatgagcgcgtcgaccatcctgaacgctctcgggtttacgttcttctcgctctcactaggctgcggcacaatcgtcacgtacggctgctacgtgaaggaaacaacggacattccgtcctcttccggctggatcgcgtttctcgcgcttctcggctctattctttgcggtctcatgattctgcccgcggtgttcgctttcgggcttgatccgaatgccggtccgggactcgtctttgtgacgctgccgattgtgtttgatcattttccgggcggggcgttcttcgcggtccttttctatatctgccttctcacggccgcgctcacgagctcgatctccatgctggaagtcgtgattgcgtaccttggaaatgagtggaatgtgaggcgcccccgcgggtgctttgcctgctggatcgctcttttcctcttcggctgcgtttccgccctttccttcggaccgtggtcagatgtgaaagttttcggaaagacgcttttcgacgcgcttgacttcctttcctcgaacattctgcttccgatgggcggtctctttatcgcgcttctcacgggctggatcgcctggccgaagttcaaggaacagctgaactacgtgaagaaccggggcacggcctacaccacctttatccatgcgatggtggcgatcatcgcgccgatcgtggtgcttctcgtgatctaccaggggtgcttcgcctgagggcacccacgttttcagacccagtaagaaggggcagttcaccttgagtgaactgcccctttgcttattcaggaccccgcctggtcttcgtaccgggaaacctcaatcagatttccatcgggatcccggaagtaaaccgagaggatgggacctgcggcgccggtgcgcttcacggggccgagttcgatcggaacaccgttttcagaaagccgccgccgcacggcatcgagcggcccctccgtgatcaggcagagatccgcggatcccggcgtggggcggagagcgtaaggcgcgatttcagcccgcgcctgatggagattgatcttcgtatttccaaactgaagcgcgagccgcccttctccaaaccgcacgggtttcatgccaagaaccgcttcataaaaccgtactgtcgcctgagggtccctgactgtcagcaccaggtgatcaagccgcacgacaagcggctcttcgttttcagtcatcgcatttctccttcccaaaaaactaaggcccggccgcaggtagcgcgggcgggcctcgagggctgccgggcgaaaagcccggcggcgtcagaaccaggaacgatcagtcctcttcagcctttctgcgcttatcggcttccttcgcgaggcgcttctcttcctcaagctggctgagatacgcgtcatcgatgtcaccggtcacataccggccatcgaagcacgagcaatcgaaatcggagattgccgggttcatgtcggaaagcgcgcccttcaggccgtcgatcgtctgatagacgaccttatcagcgccaatgatacgggccacctcatccgcacccttgccatcgccgcagaggagttccgagcgggtcggcatatcaatgccgtagacattcgggaagcagacacggggagcggaggacgcgacatacactttcttcgcgccggcgctgcgggccatggccacgatttcgcccatcgtggtgccgcggacaatcgagtcatccacgagcagcacattcttatccttgaattcgaccggcatcgggttcagcttctggcggacgctcttcttgcggaccgtctggcccggcatgatgaacgtacggccgacgtagcggttcttgataagaccctcgcggtacggaaggttcaggcgggaagcgagctgctgcgcgcacgggcgggcagagtccggaaccggcatcacaacatcgatgtccttcagctcaatctcgtgcgccaccgtgtcagcgagatattcaccaagacgcaggcgggcgccgtaaacgctgatgccgtcaagcacgctgtccggacgggcaaagtagacgagttcgaacgcgcagggggtgagcttcggattctcagcgcactggcagcgctcgatgttgccgttcagatcgatccagatcgcctcgcccggcttcacatcgtcctcgaaattgaagcccgtgccggtaagggcgacggattcagaggccaccatgtactcggtgaaaccgcgttcattcgtataggagccgtagcagagcggacggatgccattcggatcacggaacgcgagaagaccttttccggcaatcagcgcgacgcaggaatagccgccgcggatacgcttatgaacgccgcgcaccgcctggaaagccttttcagcggtgagcgtggtgccgaccacgaggtggctgatttcatccgcgaggacgttcagcagcgcctcactgtcactcgacgtattgatgtgacggtgatcgagctcatagagctcctgcttcaggcgggaagcgttcgtgaggttcccgttatgcgcaaacatgatgccgtacggggcattcacgtaaaaaggctgcgcctcgtcagacgacgtggagcagcctgcagtgggatagcgggtatgcgcaatgccggcattcccgaggaggtttctcatgttgcgggtacggaagacttcgcgcacgagacccatcgctttatgctgatggaaggtcagaccgtccagcgttgcgatgccggcagcatcctgaccgcggtgctgaaggagaagaagcgcgtcataaaggcgctgatttacggggctgtcagagaccatccctacaatgccgcacatagctcttttatttcctcgagaatgatggaaggagagaaactgcttattttacttgaaagaaaagaaagcacactgatgaaaaagcgaaaaagcttcctctatttaagcgatcccgcatgatcttccagccggtacttcgcgttccaaagggccttggcggagtcctgctgctttttcgcgatgtccgcgatctgcacgagcgtgtccggcatcagcgggaggcacatcacgagccctttttcagcgtacggaatcagttcgctctgctgccacatccgggattcaggggatgatgtgaaagaggcgacaaatacgcctgccatcacgatcaccgctccccggatgaagccgaagataaatccaagagccccgtcgccgacgccgcctgaaaccgccttgatcaccagtctgagaagcgaaccgaaaaccgcaaacgcggcaagcgtcacgagaatcacgatcacagcgccggccgcggtccgccctaccggtccaaaagacgtgatcggaagcacctgccccacatccgccgcgtgacggaacgcgaagataaagcccgcgatccagcccgcgaccgaaaacacttccttcacaacgccgcgccagacaccgagaatggaggacgccgcgagtaccgcgagtatcacccagtcgagctgattcagtgttccgctgtccatatggaaaatccgagcctcagagaggcagaaaattgaaaggcgctattttgcctgatgtacgccgcctgtgcggataccggccatagcgagtttcgcttccgcggcttccgcctgatcacgcgtcttgaaaggacccgcggtcacacgggtgagtgtcgtgctgccggacttcacgcttgaagtgctgagcgacacgccgttcgcgcggccgtttgccacaaccttcttcgcggccgcgggatccgagaacgccccgaccgggatcacccagcgctgctgggaggcgtcagccgaggctttcttcgctgcggcttctttcttctgctgctgcgcgatggcagcctgcagctgatcatcacgggcagctttcgcggccttcgctttcttttcgatttcagccttctggcgggcgttctcttcctgagcagccttcatccgggctttggcggcgttatccgcggcgagtttcgccttggcaatatcagcctgagtctgagactggggaaccgcggcggcaggagcctgctgagtgctcggcgcggcctgagccatcggctgggcagcgccaggagcagcggggacggtggctgaagcggccggcgacgcggcagcgggagaagaagtgagctgaggcattgccgcggtcgcgaccgctgcggacgccggctgcgcctgtgccgcctgggaaaccgcgggaggtgacgggatctcggtcttcgcgggagactccgctttcaccgcccgttcactcaccacaaacggtccggcaatcacgatcgcggaaagaatgacagcggccccgaccgcaatccggcgaagccgaacaccgcccggagcatcgctctctgtatcggaccgcttcacggcattgactccgttttccggaaccgctttcggagcctgcggctcctctttctttttatgccagaaactgatccccattacccgcttctccacaaccgctccggccgggatccttcctcaaaggaaagatccgcgccagagaaatgcctactctgtctgttttattttcgtctaggggacgatatccacctggaagccgtctttccggagagcttcaatcgcggcagaaaccgtcacgaaagacccgaatacgataattctatcagcgtgagaggcttctcccctcgcaaattcaagcgcggagggaatattttcaaattttcttacatgttcggccggtacaccggcgcggagaaattccttttcgaggtcatccgcggtgctcgctcggggaccggtgagcgatgcgatccgccactcatcgatctcatctttcacgatgccggcgacatggaaccggtccttatccttcagcatgccgaccaccgcgatcgtctttccgggcgttttatagagcagtgaggcgagattccgcgcgagttcatgagcggcgtgaggattgtgacccgcgtccagaataatcgcgggagactcggcaacacgctggaagcgccccgtgatcaccacgcggcggagtcccgtttcaattgcttcgcgccccacatggatggctttcagttcgtccgcggcctccagcatcgcgagagcgccggccgcgttcgcgatctgcatttctccggcaagcgccgggcgggggagcgccttgagtgaccaggtgcgtccctcgtagtcaaacatgccgtccccgtgctccaccgtgcggaagtcacggttgacgcaccggagatcagcgccgatctcttcggcatgctgcagaagtgacttcggaggctcaggatccgcgcagaccgcggcgtggcaaggggctgcccgatagacaaaagacttttcgcgaccgatcgattcacggtcaggtccgaggaacgctgtgtggtcaattccgaccgtggtcacaatggaaaccgtgggatcaatcgaattgatggcgtcaagccttcctccaagcccgatctcaagcaccaccgcgtcaagcttcgcgtccataaagagcttcagaatgcccagcgccgtgaattcgaagtaagagagaatcaggtcaccccgcttctcttccacctcctcaaacacgcggcagagttcttcatctgttgcctcacgcccgagaagccaggcccgctcattaaaccgcagcatatgaggcgacgtatgcattccgacgcggagaccggcagaccggaaaatagattcgagcatcgcgcaggtgctccccttcccgtttgtgccggccacggtgaaaaccgggcagtcaaagtgaatgcccatccgggagatcatttccgtcatccggccgagcccaagatcaatcacctcggctccgccatgcattgcttcgatatagtcgagccactcaccgagcgtcttcctgctttccatttttcctgagacctataagaaaattccgggctctaatgcagaaagcctccggagcggttttctccggaggcttaactgagagccaggcttgattttagactgccgcaggcaggtcatgcgcccggggcggccgtttcgcgagcatcgcgaggacgcggccgatcgtggagcgcatctcccggcggtcgacaatcatatcgatcgcgcccatcttaagaaggaactcggcgcgctggaagccttcaggaagcttctcgcggacggtctgctcaatcacgcgcggaccagcaaagccgatcagggcacccggctccgcgatcacgatatcgcccacaaaggcgaacgacgcggaaacaccgcccatcgtcggatcagtgaggaccgaaatgaagggaagaccggcctttgagagctccgccacagcggcagatgtcttcgccatctgcataagggattcgagaccctcctgcatgcgggcaccgccagaagacgcgaagcagataaaggggcagttgtggtcgatcgaatagccgacaccgcggacaaaacgctctccgaccacagaccccatcgatccgcccatgaaaccgaattcaaatgcggcggcgaccaccgggtaatgcttcagctcaccagccatcacgaccagcgcgtcagtttccgtggttttcgcgcgggcttcggcgatacgcttcgggtagggcttcgagtcaacaaacttgagagggtctttcgcgaggatttcggctccgatttcctctttcgggctatcgtagtcgaggaacgcctcaagacgcgcgcgggcacccattctcatgtgatagccgcacttcgggcacaccatgagagaggcttccagttcgtgactgtagattacctgatcacatttcgggcatttattccagaggccttcaggaacgcggctctgcgtcgcgttggtttctttcttgattttcggtcgaaggcggtcaatccagctcatcgaaagctcccttttgcttaagtcacactagggtacaacaaaaaaaccgtgcgggggtacccgcacggatggtaatccgaaacagtccggcggtatccggaccgctccgatgtgtcttaaatcccgctatgcggcgtcaagcgccgcgcggattccggcgagccaccggccggcagcacccacagcatcatccggggtcttatccatctcacggatcagggcggaaccaatgatgacgcctgagcagacggaagcgatctcgcgcgccgtctcgccgttactgataccgaaccccacagccaccgggcacttcgcgtaacgctcgattctcgcgacgttttgtctcaccgaagcgatatcgagccggtttccggcccccgtggttcccttcagcgacacgtagtagaggtaccctgtcgcgagacggcatacctgttcaacgcgttcatctgaagaggtcggcgcgagaaggaaaatcggatccatcccggccttcttcaccgcctcataaaattccggcacctcatcaaacgggtagtcgacaatcaggacaccatcaacccccgcctctgccgcgtcgcggataaacgcttcctgaccgcggcactccaccggattcgcgtatcccatgagaacgatcggcgtgtcactgtccgtcttccggaattccttcacgcaattgaacacgaagtcgagattcgagccgcggctgatcgcccgctcagacgcccgctgaatcaccggaccgtccgccatcgggtcagaaaacggcatgccgagctcaatcgcgctcgccccggaccggacgagttcatgcaacagcggcaccgtggattcaagcgacgggtcacccgcgcagatatacggaatcagggcctttttcccggcagcctgaagggacgcaaaacgcttttcaagacggctcatttctcttctccttcatgcgccttaaggtacttcgtcacgattcccaggtccttgtcacctcggcccgagaggttcacgaggatcttcttatccttcggaagcgtcggggcaagtttcagcgcgtaggctagcgcgtggctcgactcaagcgccgggatgatcccttcaatgtggcagagcttctggaaggcgtccatcgcttcgtcatccgtgatgcccatgtactcggcgcggccgatatccgcgagatagctgtgctcaggaccgactcccgggtaatcaagccccgcggagattgagtaggccggcgtgatctgcccatccttatcctgaagcagatacgtgcggttcccgtgcagaacgcccggcttcccgcattcgattgacgcgcagtgcttcccggaaaggagccctagccccgccgcctcaacgccgatcagcttcacgtttggacggtcaatgtagtgatagaaagcgccgatcgcgtttgagccgccgcccaccgcggcgacgatatagtccggatccccgcccgtcagttcagggaactgcgtaaggcactcttcagacacaatcgcgttgaagttacgcaccatctcagggtacggcgcaggacccgcgaccgtgccgatgatgtagaacgtgtcgtccacattcgtcacccagtcgcgcatcgcctcattcagcgcatccttcagcgtgccgctgccggtcgtcaccggacgcacctcagccccaaggagcttcatgcgggtgacattcggggcctggcgttcgatatcttccgcgcccatgtagacacagcacttcatgccgtaacgggcagccaccgtcgcggtcgcgacgccatgctgccccgcgcccgtttccgcgatcacacgcttctttcccatgcggcgggcgagcaacgcctgccccatggtgttgttgattttatgggcaccggtgtgattcaggtcctcacgcttcagatagatctgagcgcctcctgtcacctccgatagccgtctgcaccagtaaatcggggaaggacggccgacatagtgcttgagctcgtcgcgccactccttgtcgaattcaggatcattacggtaatgctcataggcattcttcagctccgtaagcgcatagatcagcgtttccgacgcgaaaacgccgccataaggaccaaagtgtccttttttgtcaggcatgttgtacatgtacgattcctttatcgacaaagaagccggagaggaaatctcttccggccggagacgcctctgctgcaagcactcagcgaagcgctcctaaaaaatcatggattttctgtctggacttgattcctggggaatcctcgacgccggaactgacatccagcgccgcggggtgaaggagcgaataggctgctgcggcgttttccgcattcagccctccggcgagtacaagaggcagcgtgagagacgcggcttcagaccgggccagctcccaatcaaaggcggtgccgttgccgccaggcgctgcgccggaatctggcgcagggcagtcggcaagaatagccgccgcatccgggtagcgggcttcagcccgcagcaaatcccccggtttttcaaagtgtactgctttcatgtaaggaagcccgaacgcgcggcagaactccggtgtctcatcaccatgaaactgcagaagcacttcgggatgccggcgcgttaccgcgaaaacctcgtccggatccggattcacgaagagaagaacaggggtcacgcggtccgggagcgtccggatcagggagtcgagccggtcggacggcacgtagcgggaacttttacggaacagcacgaacccggccgcgtcgattgggagcgacgcgacactgctgatatttttttcatccgtgaatccgcacaccttgacctgcaccgcgtgcggtccggagccgctgctccggagtaaaaaccggccctgcatccgaaaaactttcctcgcaaaagaaagcaatgtgaaaaaaagtttatcaaaagcggcaggatatgatcagaaaggtcccatgaatgtgggggaatagcgggggagtccggccgcgtctccggcctctccgtaattcacgccgacgagataaagcccgtcaggcgcgtaggttggagcggcgagcgcccggttgcgggcttcgaggacatcggcgagccacccgaccggtttcttgccgatgccgacataaaccaggctcccgacaagattccgcaccatgtgctgcaggaaggcattggcttcaaaacggatgccgatcatgttcccgcggaccgtgaaccggatagagtcaatccggcggaccggagatttcgcctggcactcagccgcccggaagctcgtgaaatcgtgctctcccagaaggaccgccgcggcctcttccatcttctccacatcgcacggcctgaagcaccatccggcccgtccggcaagaagcggcacccggaccggctcattcacgatccagtactcataggtccgcccgatcgcggaaaaacgggctgaaaaatcctccggcacgggctttgcccagcgcacagcgacagcgggtggaaggaaactgtttgttcccctcacccaggcgttcatcgggcgttcaaccggggcttcgatatgcaccacctgccctgtcgcgtgaaccccggtgtcagtgcgccccgcgcagattgtaggaaccggctgcccgatacccgcgaaggctccaagcgcctcttcaagcgtctgctgcacggtcggccggtcaggctgcacctgccagccgctgaaaggggtcccatcgtactgaattccaagcgcgatcttcatccgttcagactccgcgctctttcttcaccgcgggcggcagctcatcgaggaactttttcgcttcagtgctgagttccgcgacgccgcctttcgccacatcggtcgcgagttcccgcgcctcatcaaccgcgccgcgggacaggaagtcccgcgcgagcttcagctgcgaagccagcatctcgcgataggcggtcttgggatccaggggatcctctttcttctcaggcttcggaagttccggccttgcgggcggcagggattcgtcagccgaccgaagtcctcctcggatcgcggcaatgcttttcgccgcgttatccgccgcttcatgaatccctgagctgccggtcgacgcttccttttcagctgccatcacggcgtccaccgtatctgtcacggctttcagcccggcctcttccgtcttcaccgccgagtcccgggttccgaaaggcaccaccgtcaccgggttccagagttcttcctgagcgttccggatttcctcaagcttcttattgcggcggccgcgtctcataaaccaaaggagcgcgagcatcagaatggccgctccgagggctgcgtatgaggcccaggacgagtcctcttcctgatcggccgggaccggaacatggggcactgcgggaatttcctgagtcacgtcagaggccggagcgggagtcgcgctctgctcagcgctttccggcgctgtaatcgacggcatcggggccgacgctgacggtccgggcgtgtcgcccagagcgggaagcgaagctgcagcgatcgctgcggccaaggccgaagcgaataatcgtttcagaaccggcatttgatcaaaaatcctttatttcttcgcctgacaaaccgcggtctgctgaccgtgctccgcaggcatctgtcccgcctaattctaaagaaaccggcccccggacgtatagcagtatgaaatccgcggtgtccgaacagattttctccggataagcgaagagctccgggagtgacgctccaggagctcttttctgaacttcagagacatccggaagcgggggggcgctccggatgcctttaacagctcaggccgccttcttgaagtcaaccagaatgcggaacatacggcgaagcggttcagcggcgccccagaggagctgatcacccaccgtaaaggcggaaatatattccggccccatcgcgagctttctgatacggccgatcggcacggaaagcgtaccggcgacggtggacggcgcgagttcgcggatcgagacctcgcgttcgttcgggatcaccttcacccagggattcgcggcggcgagcttcgcttcgatctcttcaaccgacaggtccttcttcagcttcacggtgagagcctggctgtggcagcgcatcgagctgatacggacacagagaccttcaacaatgagggagccgggctgcggctgggccggacggccgagaattttattcgcttcagcgccgcccttccattcttcgcgggacatgccgtttccgagatccttatcgatccaggagaggacagagccggcaagcggagcgccgaatgcggcggtcgggaattcaggagagcggaactgctcggaaacgcggcggtcgatctcaaggatggagctcttcgggtcagcaagcagatccttcacggagccgtagaggcttcccatctgaaggagaagctcacgcatgttcttcgcgccggcgccggaggctgcctggtaagtcatgctgctcacccactcaacgagatcctcgcggatcagaccgtccatcgccatcagcatgagggagacggtgcagttgccgccgataaagtcgacaccgccgttcttcagggactcgcggatcaccgcgtcattcaccggatcgagaacgatcacggcgttaggctccatacggagggcgctcgcggcgtcaatccagtagcccttccagccggcagcgcgcagctgcggatggatcgccttcgtatagtcaccgccctggcacgtgaggatcacgtcgcagcgtgcgagatcatcgatcttattcgcgtcgagcagcaccggctccccattcggaagcgcaggggccgcgccgccggggttcgaggtcgaatagaaaatcaccttgtccgcgaacgcgaaatcgttttcctcacgcattcggttcgtcagcacggaaccgaccatgccgcgccagcccaccatacctaggatcatgttgtttctcccaaattccgccctgcggagccgcccgcaagggggcaggccaggctccgggacactttgaattatttgaaaagcctgagattccgattaaagaaaatcaggctcgcttatacagcttaccccctgaagggctgtccttgcagggggagtcgggttagcgagaagtaatgcggatatcagcgaagcgcggcgcggatcgcatcccccatcccggagcaggaaaccttctcgcatccttcgctccagatgtcaccggtgcggataccgtcagaaagcaccttgcggatcgcggcctcaatccggtcagcctgctcatccatgtggaaggcatagcggatcatcatggcggcggattccacagtggcgatcgggttcgcgatattcttcccggcaatatccggggccgacccgtgagagggctcaaaaagcccggtgcccttctcgttcagagacgcggaggcgagcataccgatggaccccgtaagcatcgcggcttcgtcagagaggatgtcgccgaagaggtttccggtgagcaccacgtcaagctcagtcggcgcgcggacgagctgcatcgcggcgttatcgacgtagaggtaatcaagcttcacctcagggtactgcttcgagacttccgtcaccacttcgcgccagagctgagaagtctcaagcacgttgctcttatccacgcaggtcaggtgcttacggcgctgcatggcggtgcggaaaccgacgtgcgcgatccgctccacttcggggcgggagtaacgcatcgtgtcgaaaccttcctcagcgcccttgaaggggccgtccggcgcctcacggcggccgcgcggcgtaccgaagtaaacgtcaccggtgagttcacggacaatcacaagatcaagacccgacaccacttccgggcgaagcgtcgacgcagacacgagttccgggtagcagaccgcgggacgcaggttcgcgaagaggttgaggttctttcggagaccgagaatcgcctgctcggggcggagcgcgcgcggcagcgtgtcgtacttgaagtcacccacggcgccgaagagcaccgcgtccgcttccttcgcgagcgccagagtctcaggcggcagcggatgcccgtgattcgcgtaggcgacaccgcccacatccgcgtactcgtactcaaaatcctcgcccagcgctttcagcaccttcaccgcctgctcaacaatctcggtaccgatgccgtcacccgggagtactgcaattttctttgtcataacgtgcttctcaatttttctttaaaaggtttacagaaacggccgccgccttactccgcgccgccggggaatgtcttcacaagccagggcttctcagcgagacgcttcgcttcgaactctcggatcgcctcaacgtttgaggaaagggtgatgcccacatcatcgagccccttcatgatcgcctgacggcggaattcgttgaattcaaaaggcgtctcacggccatcgggctcaatcaccaccttcttctcaagatccaccgtgagcttatagccctcggttccttccgcgccggcaaaaagccggtcaatcgtcgcttcatcgagcgtcacgagcacgagcccgtttttcagggagttgctgtagaagatatccgcaaacgacggcgcgatgaccgccttgaaaccgtactgaatcagggcccagggagcatgctcacgggacgagccgcagccgaaattcttcctcgcgagaagaatcgttgaatcccggtactggggcttattcagcacaaagtccggattcagggggcgcttcgagcaatccatgccgggctcacccttatcgaggtagcgccagccatcgaagaggttcggaccgtacccggttttataaatcgacttcaggaactgcttcggaataatggcatccgtgtcgacgtttgagcggtcgagcgggcagacgattccggtatgacgtacgaatttttccatgatttttcctttccgctcccgattacttgagatagtcgcgaatatcgacgaagtgacccgccattgcggctgcggccgccatcgcggggctcatcagatgcgtgcggctgcccttgccctgacggccttcgaagttgcggtttgaggtcgacgcgcagcggtcgcccggattcagcttatcggcgttcatcgcgaggcacatcgagcagccaggctcccgccactcccagccggcgtcgcggaacacctgatcaatcccttcagcttcacacgcggccttcacgaggccggatcccggcaccgccagcgcctgcttcatcgtgggggacaccttcccgcccatgcggcggatgatgtcagctgcggcccggaagtcttcgagacgcccattcgtgcaggagccaatgaacgcgtgatccggacggatctccttaatcggagtaccgggttcaagaccgatataggcaagagcccgttcccagccttcgcgccgcacggggtccggcatatccttcggatccggcacaacgcccgtgatcggagccaccatttcaggagacgttccccaggtcaccatcggctcaatctcttccgccttcatgtcgaccacgatatcgaaatgcgcgccttcgtcagaatgcagcgtgttccagtaggcaaccgccttgtcccagagctcgccctcgggcgcgagcggacggttcttgatgtactcaagcgttttctcatccaccgcgacaagacccgagcgggcaccggcctcaatcgccatgttgcagagcgtcatgcggccttccattgagaggccgcggatcgcggaacccgcaaattcaatcgtgcagcccgtgccgcccgccgtaccgacgcggccgataaaggcaagcgcgatgtccttcccggtgatgccgggctgaagctttccttcaacccgcaccagcatgttcttattcttcttcgtgagaagcgactgcgtggcaagcacgtgctcaacttccgatgttccgatccccatcgcgagcgtaccgagagcgccgtgcgtggacgtgtggctgtcaccgcagacaatcgtcatgcccgggagcgtcgcgccctcttccggtccgatcacgtgaataatgccctggcggcgggaaaggaacgggaagaaagccgccggaggattctttttcaggttatcgatcaaggtcgtcacctgaagctttgaaatcggatcctcaatgccgtcaagccccttatcccagccggtggtcggcgtgttgtggtccgttgtcgccacgacagaagtcatgcgccagggcttgcgatgcatttcggcaaggccttcaaacgcctggggcgacgtcacttcgtgcacgagatggcggtcaatatagagaagcgtggttccatcaggctgtgacttgatgacatgctcgtcccagagcttgtcgtagagggtctttgctgtcatagcagtgattccttcgtaaagaaataggtattgcgatgtggcgatccccggcctgcggccgattctttttgtggctctcgccggggtaccgatgtttctctcagcggccgttgcggccgcctgctccggtttatagggcggagccgcccttcgttagtcgttcgcccgaggcgcgggctagcagcaggaaatccgccgcggtgagggccgcgagcgcttcagcgatgggggacgcgcgaagaccgacgcacggatcatggcgtccggtcgtcgagacttcaacgaggttcccgtgaatatcacgggtcatctgagtcttgcggattgagggagtcggctttaccgcgatatcagcaacgacaggagcgccagtcgtgattccgccgagaatgccgcccgcgtgattcgtggcaaatccgtcagaagtcatctcatcgttattttcggatccccgcatcgagcagacattgaatccttcgccgatcgacaccgcttttacggcgttgaggcccatgagagcggccgcgagtctcgcgtcaaaccggtcatagatcggttcgccaagccctgcggggagagatgtgatttcaagatggattttcgaaccgatcgaatcgccctcgcggcggagaccgtcaagaagcgcttcggccttctgaatcagatcgccgttctccgtcgcggcaaagaaaggattcttttcccgggcatcccagttctccaccgggaagaggatcggtcctacctgagtgacacacgcgcggatctcggttccgaaagcctcgcggagaagcttcttcgcaatggcaccggctgccacggtcggcgcagtgaggcgcgcagacgaccgcccgccgcccctcgggtcgcggataccgaacttcgtccagtaaccaaagtccgcgtgtccgggtctgaatttttcggcgatggcgctgtagtcgcggctcttctgatcggtgttgcggatcaggagcgcaattggcgtgccggtcgtacggccttcatagacgccagaaagaatttccacggcatcaggctcccggcgctgcgtcacaaagcggcttgtgccgggacggcgcctgtcgagctcagtctggatgtcggcctcagacagcatcagtccagccgggcacccgtccaccacgcagccgatggcgggcccgtggctttcaccgaaattttccaccctgaaaaggcgtccgatcgaagaacccggcatgcttgtccttaaagactgatgtcctctgttgaatccgcctgaaatggcggtgttttcgtacagcgttcttttgattgtatgtgatttgccgcggttttggggagtcttctgaattcagtaaaaccgaatatgatgaggcattccatcatccacctaaaaaaatgaggttttccgaatgactgatccgatccaggctgactggctccttgcaacgctggaagacgcgcgggacgcgcttgatacggcgatcgactccctttcccgccacccggaagaagctgaggaaattctgacggaagagatcgctgcggcctacgccaaactgaactacgcggtgaacaccgcccgatgcggggcggaaggccttgacacgatggaggatgacgaactggtcgcctatccagtaaaagagctgccgttctgaggcagctctcctgatgctttattcttcgtccgcccgatctttcggagggcgaagatcccgcgggcggaatccgaagaaaaccatgcccgcgccgtaaaccgcggcaccgaacgcgcagatcgcaagcaccttcgcggcacgccgtatccagggatcggaaagcgctgaccagtcgatattccactgcacgccaagcagcacgcagagcatgacaaatgacgagcagatgatcgcgaggaagtgcttcttccacccgggaagcgggcggtaaatgccgcgcttccgaagcagatagagcagcgttcctgaattcacaaggctcccgagaccgacagaaagagcgagtcccgcctgatggaaaagcggcaccgtgatgaggttgaagacctgcacgcagacgagactcagcgccgccacccggaccggcgtccggatatcctttctcgcgtaaaacgccggggccacgattttcatcgcgataagcccaagaagccccaccgagtaaccgattacaccgtaagcggtctgccggacatcctctccggtaaaagcgcgtcctccgaaaaggaacgcaacaagcccatccgcgcaggcgaaaagcccgatcgcggccggaatgccaaggagcacgatgagccgcaggccatggtcaaggagttcgttataacgatcctcattccctgcggcgtgagcggctgagagtgacgggagaagcaccgtgcccaccgcgaccccgagaagcgccgtcggaaattccatcagacggtccgcgtagttaagccatgtgaccgcgccgcgctcaagatgcgacgcgatatttgtgttgatcagaatggaaagctgcgccacggcaacgccgaacagcgccggcaccatctgcttcatggtcatgatcactgaagaatcagcgagcgcggttctgaatccggtgaaggatggaatcatgccgatcttcttcagcgccggaagctgaaacgcgagctgcgcgataccgccgagaatcaccgcgatcaccagtgcgtagattggctgcgacatgtggggcgcgagaaggagcgagcaggcgatgaaggagagattaaggagcaccggggtgaccgccgggatccggaaactcttataggtgttcagcaccgcggcgctcatggcaaccaggctcataaacgcgatataggggaacatccaccgggtgagcgacgtggcgagagaaaattcctccggatccgaacggaaccctgccgcgatcagccagaccagcaccggcgcgatcagaacgccgaggatactcaccagaatgacaaccggggccagaatcgagaacacatgatccacgaagcgcttcgtccgctcttcgccctccgtctggcggacagaagccaccatcgggacgaaagcctgctgaaacgccccttccgcaaacagccgcctgagcagattcgggagcctgaaggccacgtaaaacgcgtcagtctgaacggacgcgccgaagaatcgggcgatcagcatatcgcgcacgacgcccgtaatgcgggagacgagcgtaagaagcgaaattgaggcagcggctcggaatagattcatgagtgaaaagacagcggcattgtcccgactgacggcatccgggccgtcggcaagacaggtgtttccggaaaagaaagggtgagtttagcgcttttacgcggataactcccttcttattgaacaaaaagtctttttctgctatattttgcgtttctgccgcatggcagactttaaacataagccccaccgggatcgagattccgccgggcaacttcgaaaaggaaattcaaaatggcaaataccaagcaggctcgcaagcgcgttcgtcaggacatcgagcacaacctccgcctcaccgctcagcgcacccgttatcgcaccgccatcaaggctgtcgagaagctcgtcgccgctggcaacaaggccgctgctgctgaagaattcaagaagacctccggcatcctcgaccgtctctcctgccgccacgttctccacaagaacgccgctgcccgtcagaagagccgtctgtctgccgctatcaaggcgatggcctaatagcgtccgatccggaaggagcactggtctccttcccgccggaaaaaaagcgcactgattttgaactgactcccatttttaggac

SEQ ID NO: 1297 - DNA, 1522 bp, Unknown
  gut microbiota DNA sequence
acaagtcctaaatttggggagcagttcaggtcagctctttttatagttgaaagacggtatcagccggctttctgtttctcaattttatcgaggaacgtttccttttcaccttcctcgtgccagcggtggaagaccgttgcaaggatcggaccggaaacgttatgccagaaggagaacaccgcggacggcacggcagccatcggcatagcggcgaagtgagtggtagcaagagcaacaccaaggccggaattctgcatacccacttcaatagcgaggcacttacgcttggcaaggttgagaccaaggagcttcgcggtccaataaccgaagagatagccaaaaccgttatgaagcacgacaaccaggaaaacgagcgggccgacagcgagaagcttattcgcagtcgcggcaaccacggcagcaacaatcagagcgatggcgacaaccgagataagcggcatggccgcagcgaagccttcaaccttcttgccgagcactgtgtgaaccacaacaccgagagcgatcggaagcagcacgatttccacaatgctcacgaacatggcaacaggggagatatccacccactgtttagcgaacacccagatcaggaacggagtcacaaccggagcgagaagcgtggtgcaggaagtgatggtcacagaaagcggaagatcaccgcgggcaaggaacgtcatcacgttggaagccgttccgccagggcagcagccaaccagaatcacaccaacagcgatctcgggcggcagatgcatcacgaggcagagcagataggcaacgatcggcataatgaggaactgggacagaatgccgataatcacatcacgcggctgacgaacgacttcccggaagtcagaggccgtaagagtcagccccatgccgaacatcacgataccaagcagcggggcaatgtaggcaccaagaggcttaaaagtggacgggaaggcataggcgagcgcaccgacaacgatgacccaaagcgcaaatgtcttattgaagaaaagacttaattttgctaacagctgcatgatggtggttccaatataagaaggaaatccggcggatcctgttttatttcttcctctgccagttctcagggaagacaggctgactgccggtaaccaaaatcctctccaacggaatcaatgttggaatatatatattttatatttctatccagaaaatgccgttctgatagcctttatgcgctatttttagtgtgattattctgatttaaaagctaaaacgtaggtaactctgcttagataaaagatgtcagaaacatccctggaaatagattaggttcagaaaatatataaatatctaacaaaaatcgaataaaaaaagaggcgggagcgccagctcctgcctctttttatctgttttatcagccttgtataaaacaaaaccctcgaaagaaaaactttcgagggttttgaaagggggagcctgacagtgacctactttcaccggaaatacaaccgactatcattggcgcgagagcgtt

SEQ ID NO: 1298 - DNA, 45313 bp, Unknown
  gut microbiota DNA sequence
aggctttgcacttgaagtgataattcgccgttaaaaaatccgtctctcccgcctcgtcctttttacggttacccatgaaagctcagatccgccgctcattactgctgctggccctcgcgcttcccgcctttggagccagtgcccagtcactgctgccgcagcagcggcctctgggtcctgcgccttcaatcgctgtgcctgcggaggactttctttttcagaatttcccgctgtccgcgcaggaccaggcgtttctctccttccggcgcgctcgtcagtcaaacaccggcaccgccgagtcacagcaggcgctttttgcccagctcgccggatacccgctcgttgactacgccgtgtcctggaatctgtatgacgccataaagtccgatccttcggatcccattctgcaggcccaggttctcgattttctgaagagccatcagggggaatacatcgctgagcggctgggaacagatgtcgcgagaatcgccgctccgaaaggagattcagcgttctttgaagcgctttatgcgccgctgcagtggaataagacggagcctgatctcgccgcatggcacgagtccttccagcttctcgccgggaaggggaacacggagtacggcgtaagcctccttcgggaagccaggaatccgcacgccccggccttcatgtcgctcgccgagtccattctcggacgcgacccgggaaaaatctgggagatctcgtcctacctgatcgagcatcggttcaattcggacgcccagcgcctgctgcaggcctatatgccgaatgcgccgctttcgcttcccgaggtcttttcgtccccggagaaatgggtcaccacgcctgacgcgcaggcgaacccccgtctgatcacggcggcctgtctcgctgtgggctacagccgtccagaggacgccgcggccatgatcgcgtcgctcggcagccagattccgaaggaagaccggaatctgctctggaacttcctcggctaccgctcagcgatcatcaatacgatttccgactcaagccgatacttcacgaatgccggcgaaggcctgatggacagccgcgtctcgcagcctgacgaagtcgccgggtggcgcgtgaaggcagcgctcgctgccggcaactggaaggaagttgagcgggccatcggctcgatgaccccggaaaagctgggagctgacgaatccgcctactggctcggccgcgccaaaatcgctcagggcgacaggagcgagggcgagaaagttctctcatccatcaccggtcaccacacgttctacggcaaactcgcctgtgatgcgcttaacgttccctatccgggtgacggcgcgcgcccctcggtcgcggagtctgacgtccggcagtggatgcagaatccgagcattatccgggccgtgctgctccgccgtctcggtctctactccatggcgagccgcgaatggaactgggcgcttcgcgacgcgaagaagccgcagctcatcgcggccgctgaatatgcccgccggatcggactcgctgaccgcatgatcagcaccgcggggaaactccccgacagccttttccagagcgacctctccttcccgattccgtctcagaagagcgtcgccgcgattgcccaggaaaccaatgtgcccgaggcctggatttacggcattacgcgtcaggagtcccgcttcatggtaacggtgtcgtcgggggccggtgcccgcggactcatgcagctgctgcccgccactgcccggtggaccgccaagcgctacggtgtcggcgatgggaatcctgatctctcggatccgctcaccaacatgaagctcggcgcttactacctcaagtacctcaacgaccggtttgacgggcagaagactctcgccacagcgggctacaacgccggccccggccgctccatcacctggcgccggaatctgtccgcaagccaggacggcgcgattttcgctgagctcattccgttcagcgagacccggacctacgtgaagaatgtgctgaacaacacggcggaatacgcccggattctcggcaaacccgtgcggctcacggagcttctcggcacgattactccgccctcccccgacaactgatactgaataaacgcagcatggcaatccaaacgtacctggtcggcggctatgtccgtgacctgcttctttcccgtcacgggatcccggccacgccctccgacaaggactacgtcgtggtcggcgcgacccccgaatacatggtgtcgaaggggttcattccggtcggcgccgatttcccggttttccttcacccgaaaacgcatgaggagtacgcgctcgcccgcacagagcggaagaccgctcccggctaccacgggtttacgttcagcgcttcgcctgatgtcacgctcgaagaggatctgatgcgccgcgacctcacgatcaacgcgatcgcaatgtctgaggacggcacactctttgacccctggggcggagaggaggatatccggaggagagtcttccgccatgtaagcccggctttccgcgaggatccggtaagaatcctgagaatcgcccggttttccgcccgacttcctgaattttcagtggatcctggcacctggcagctcatcaccgacatggtgaaggcgggggaggctgacgccctcgtgcctgagcgcgtgatgaaggagctgtcccggggactgatggaaaaggccccgtcccgcatgatgaaaatcctgcttgagtgcggcgcctggacaaggatcgcgcccgacgtcccctgcagcgaagccctgctccggaaactcgacgaggcttccggcatcaatgccccggccgcggtccgcctcgcgctcctcttttcggaagccggagaccgcggaagcgaggccgcgaagtcgctccgggccggatctgacgcgatcgggctcgtggagcttggtgagcggtgcggcgcgatgctgcgggaaaaggtagaagctgagtctgctgtccgtctattcgaaaaagcggatgccttccgccgttatccccggttcagggagttccttcaggtgcagcagatcgcttccggagttcggccggaaccctggctgagagccgctgacgccgcgcgcgccgtggcgacccgcgatattgcggccgcggcctcttctccctctgaaattcccgccgccatccgggctgcccgcgtgaaagcggtcagagatactctcgcccagactcacaccgataaagacaacgcatcatgacgcttgaagaactgcagctctcctgccgccgcatctatatcgaggacctccggcttctcgctcggctcggcatttatccgcacgaaattgccgccgctcaggaaatcctgatttccgcaagcgtctgggtggacaaaaaaccgctcggagaagatattgagaacaccgtgagctacgcaacgctcgcggagatcgcccggcggattgtccgcagccaccacttcctcgttgaaaccgtggtggaggagatgatccgtgaaatccgggttctgcccggagtccgggcgggacgggttgactgccggaagacgcatgccgtgacaggcgctgacgcctccggtgttgaggagtttttcctaaatgagcaatgaatcagttattggaaccaccattccgatcacgccggccgaggctctgaacaagtccccggctcccgccgcggaggaaaccgcggagcagcctgccggagaaaaagaaaaggtaaagaagtccgttgccgcgaagaagctcgaaaagcggatcatgcgtctcacggggcaggcgatcgctgacttcaacatgatcgaggagggcgatcggatcggtgtcgcggtatcgggcggcaaggacagctatgtgctccttgagacccttctcaaactccagaagcgggcccccgttcatttcgaagtcatggccgtgaacatcgatatggagctgccggatttcccgcacgaccttcttccgaattatttcaagagcataggcgttccgttccacgtggaacgtcagaacgcctacgcgacgatcaagcgcatcattccgtccggacagcacatctgctcactctgctcgcgccttcgccgcggcattctctacaccacggcggataagctggggctcacgaaaatcgcgctcggtcaccagatggatgacatcgtgagcacgctgatgctcaacatgttctacggcggtcagatgaaaggcatgccgcccgttctccggagtgatgacgggcagcacgtaatcatccggccgctggcctacgtgcatgagtccgacacccgcaagtgggctcagatccagggctaccccattgttccgaagaatctctgcggctttgccgagaaccgctgccgccacgagatgaaggaactccttgcgcagtgggagaagattgacaagaaccggatgtacaacatcttcaagagcatgacccacgtggtgccttcccatctgctcgaccggtcgctctgggatttccacgagtttcacgccctcacgcagcccccgaagcccctgaaaccgcggcgtcagagcaaaaactgattcccgtttagaataggaagacggtcctgcccggatcccgccagggattccgggcgagtctatttcttttcttttttacagagcttattgactgctatgcgtgcacgttctatgaaggtgatcgacctcgcggtccgtcacgtcgaatgtatttccgccactacctcagtgactgactgcgcccttgcgatgcgtacccgtcatgtgggaagcctggtcgtagtggacggcggcaataagccgatcggcatgattacggatcgcgatcttacgatcgaagttcttgccaccggccgtgatatcgctgccacgaaggtcggagacgtgatgacgagcccggcggtcgtcgctcagggtgaagagaacatcgtggacgcgcttgcccgcatgcgtgagttcggcatccgccgtctcccggtggtggacgagaacggtctgcttgtcggtgtcgtcacgaattccaacatgctggaggaactctccaccatgctggacagccttgtgcgcaacatcaagtcctcgaagacccgcgaggcggcgcttcgcccctgagtcagagcaggattccgccgctcagaaaaaaagggagatctcatccgagacctcccttttcgcttttattcagccttgccctggcttctgagaacgctctgatagaccgtatcgcgcggcagtccggtcacccgagacacaagcgccgcggttttggatgctggcagctctttcgcgatttctctcacccaggcgagaacctcttcgcccatttcggactccttcttttccgcctcgtcgatcaggatcgcgtattcgccccggggctcatgcgcgtccgcccaggccgcgaggtcacctgccgcgagcggcgtaaaggattcaaagcgcttcgtgatttcgcgcgccacaaccacgcgacgccccggctcaagggccgagccaagatcacggaggagcgcctgaatgcggtgaggcgcctcatagagcacgaacgcgtcgccgcgggacgcgtagcgggagagtgtttcacggcgggccttggcctgcggaggcacaaagccgacaaaggtaaacgttttcgcggtgaggcccgaagcggagagcgctgtgatcacggcactcgcccccggcaccggaatcacccggaatccggcatccagcacaatcttcacgaccagagcgccggggtccgataccgccggcgttccggcgtccgtcacgagcgccactcgttccccgttcttcagccgctcgatgatcgtctgagcgccggtcacttcgttaaattcgcgcactgagatttcgtgcgtcgtgatgccgtagcgggacagaatcttctgcgtctgacgggtatcctctgcagccacacagtcggcgatcgcgagagtccagagtgcgcggatcgtgatatcggccgcgtttccgatcggcagacccacgatgtagagagcccccgcagggaactcctgctcgccgatccccgactcccgggcccatgccatctgcttccactgctccaaggcttcctgcatcgcgattccttctgtgtccgtccgttagtgaatgaagcctaacactttaacctgaggtgaacgaaaattgcacgggcatttgcacctacaattgaaaacctgtttttcctccggacacctctctctattcctatggccaatacgcttattacgttaaaaaacgcgagcctcgctttcggtgactacccgcttctcgacaacacggatttttcggttcaggagggtgagcgtatcggtctcatcggtcgcaacggcacaggcaagagctccatgcttcaggtgctcgcccgaaagtccgcgctggatgacggagagattcaggtgaaggacggtctgcgggttgtgcttctggaacaggaaccggtcttcccgccggctcccacgatccgtgagagcctgatcgcgcagtccggctttgatccgtcggatgacaaactctactggaaacagatcgcgaaactcgacgcctacctgcagcggctgaatgtccgcgcggacgcggatcccggaaccgcttccggcggcgagcggaagaaagccgccatcgcgctcgtactcgctcaggaaccggacctgctgctgctcgatgagccgacgaaccacctcgacatcaccacgatcgcgctcctcgaggatctgatccgggaaacgttcaagaacacccgggcgctcgtggtgatcacgcatgaccgagagttcctcgatgcggtttccacccggatcgtggaactcgaccgcggcattctccgctcctacccgggcaacttcgcggactacgagcaccacaagaattacgaactcgcgatcgaggaaaccgcgcgccgcaagttcgataaattctgggcccaggaagaggtctggatccgtaagggcattgaggcccgccgtaccagaaacgagggccgagtgcgccgtctggaacggctgcgccgggaacgcgaggcgaggcgcgaccgcatgggtcaggtgaacatgtcgattgacgcgggggaaaagagcggaaagctggtcgccgaactgaagaacgtctcgaagtccttcggtgataagaccgtgatccggaatctgaacttcacgctgatgcggggtgaccgcctcggcctgatcggaccgaacggcgcggggaagagcacactcatcaaggtgctactcggagaactccagcctgatgagggcacagtccgcctcggcacgaatctccatattgcgtatttcgatcagctccgcgcccagcttgacctcaagaagaccgtggcggataccatcgctccgggcagcgagtgggtggaaatcggcggtgtaaagaagcatatcaagagctatctgaatgatttcctcttttcgccccagcgggccgactctccggtcgaggcgctttcaggcggcgagcggaaccggctgctgcttgcccggctcttcgcgctgcccgccaacctccttgtgcttgacgagccgacgaacgatctcgatatcgattctctcgaactcctcgaacaggttctggaggactattccggcacgctgatcctcgtgtcgcatgaccgacggttcctcgataacactgtgacacaggtgctggcagcggaagggaacggtgagtggcatgagtatgtcggcggctattccgactgggtaaagtaccgccgtccgcaggccgcgccagccgcggcaccgaaggctgaaaagcctgctcagccgaagcccgcccgcgcgaagagtgtgaagctctcctataaggaagagcgtgaactcgagtcgctgccgaaggaaatcgacgcgcttgagaccgagcagcaggagctgcttgagaaaatggcaggtccctcctaccacgagcttcccggagctgaaatcaaagccgaccgcgaccggcttgaagcgatcccgcagattctcgaagaacgctacgaacggtggcaggaactcgagagtaagcgtgaaatcgccgaaaataagcattaatgagagctgttctgtggtctaaactaattgtgaccgcagaatgcgggttcagaactcaatatcagaacgctacagagtaaaaggcaaaagaaagtgagcgaaaccactgctgatcgcatcgccctgctgcgcaaggcaaaaacccttcctgatctgattgccaaccgggcgaagaccgccccggatgatgaagcgctccgccagtacgaccgttccaaaggcgaatgggtcagcacaacgttcggcgagctgcaggaaagaatccttgagtggcacaaagcctatgccgcgctgaagctggaacgcggctcccgcgtgggcattctgctgccgaacgggatcgacgctgtctgcgcggaccagggcgctctcgcgaacgcgctggtgccggttccgatgcacgcgatcgataccgcaggcgcctcagctttcatcctgattgactctcaggcaagcgtccttgtgacaaacaagctgtcccgctggcaggcgatcgccgacaccggcatcatccttccggatctgcggcacgtcattcttaccgaggaaacctcggttcccgcaccggaaggcgaaattgagcttcacacgctttctgactggctgaagatgggggagcccctcacggaggctgacctcacggaaaagcccgaaccggatgatctcggcgccatcgtctatacatccggcaccacgggaaagccgaagggcgtgatgctcacgcaccggaacttcctcacgaacgtctgcgacactccggactgcctcacgccgatcggaggcgatattttcctatcgttcctgccgctctcccacacgttcgaacggacgctcggctactacctcgcgctcggcatgggctgcaccgtggtttacaaccgctcgatcatgctcctcgcggaagacttcaagaccgtgcgtccgacggtcatcatttcggttccccggatttatgagcgcgtctacgcaaagctgaatgacgcgctggaaaagaagggcggcgccgcgaagaagatcttctcctgggcggtcgaagccggatggcgccgtttctgcaagagaaacaaacttccggtcgacaagtcgaaccgctctttcggcaacatgatcgccggtcccctctttgaaaagaaggtttcccagacgctgatggatcagttcggcggcaggctgcgcgcggccatttcaggcggcgccgcgatcaacccgaaagtcgcgaaggtattctgcgggcttggaatgccggtgatccagggttacggcatgactgagacgtcgcctgtcatcgccggcaaccgcctcgatgacaaccagcctcagactgtcggcctcccgttcacgcacgttgaagtacggctcggcgaggataacgagatccaggtccgcggcccaagcgtcatgaagggctactggaaacgccccaaagcaacggccgaagcctttaccgaagacggctggctgcatacgggtgacgtcggatcgctttccgaggacggccatctctcgatccggggccgtatcaaggaaatcatcgtcacatcgaccggcgaaaaagtgccgcccgcggatattgaatccgctctcgaaacggatccgcttttcgcccagacctttgtgctcggcgagaataagccctatatctccttcatcacggtgctgaatcccacggagtggaagaagctcgctgcctctctttcacttgaccctgagtctcctgagagtctcagcgcgcccgctgcccgccaggccgtgatcaagcgcgcgaaggaagccacgaaagacttcccccgctacgctctgccccgcgccgtaacactcgtcaccgagccctggacgattgaaaacggacttctcacgccgacgctcaagctgaagcgcggtccgctccgcaacaaattcgctgacgagatccagcagatgtacaaagcctagttcccggccccgcactccgctagaatccataatccttaaaaaggccttcctctccccccagagaaggagggctgcttcactgactgacttacagaaatccatggcaatcgatacaacgcttaatccttccgcacagcaggctcagcacctgatgcctaactggcaggttcacatgaccgacaagatcatgcagtactacatcgaccgcggtcttacagtggatccggtgattctcaaatcaccgccgcctccgcaggaagggcatcagtacctgctctacatgcatgtgccgttctgccatacgctgtgcacctactgcaccttccaccgcttcctcttcaaggaatacaaggcgcgcgaatacttcaagaatctgcgcgccgagatgcagatggcgaaggacctcggctacgacttccagtcagtctacgtgggcggcggcacgaccacgattctgcaggacgaactgatccagacgctcgaactcgcccggaagctcttcccgcatatccgcgaaatctcctgcgaaaccgatccgaaggaaatcgcctctcccctgttcaagaacctgcagggactggtggaccgcatgtcgatcggcgtgcagagctttgatgacagcattctgaagctcaccgaccgtacgaagttcggcaccggcgctgaggtctatgaccgcatcgcggcctgccaggacctcttcccgacctgcaacgtcgatatgatgttcggtttccgcggccagtcgctcgacatgatcgcgcgcgacatggaactcatccgccagctcaatccgaagcaggtcaccacgtacccgctgatggtgacgagcgagacccgcaagagcgtgaagggcatgatcgccgccgagggtcaggagctatccgagcagtacaacacgattctcggcacgctcggccagcactaccgtcagctcacctcgtggaccttcggccgcacgggtgacaatgaaggcatcgatgaatacgtgatcgaccatgacgaatatctcggcatcggctctggcgctttctccttcctcggcgactcgctctacgtgaacacgttcagtctcgcccgctatggccagcgcattcagtccggccagatgggtacggagcgccgccgtgagttcacgaagcaccagattctgcagtaccgactgatgctctccatcttcgccggccgtctcagccgcaagtacttccgcgaggtccagggagtcaacctcgacactgctctcctgaaggaaatgctcggcctccgtcttgccggtgccatccgccaggatccgaccgatcccgataagctcaccgtgaccaccgtcggcaagttcctcggtctcgtcatgatgaaggccttctactccggcatggataacgtccgcgcccagctgcgcgctccgctgaaggcctgcgatatgtaaggcttccgaggattcatccctcagaacgaataaagccgctgcagagaaatgcagcggctttattctttgccggatcagacgggaaacggtcagttgaacttctgacccatttcgcgggtcgtgaggaactgaacattctcccagtgcttctgggtcgtctgaaggttatagaccgaggttgccaggtagaccagattgccatccgcgtcagtcgcgagacggcttgcctgctctgcctcaaactcctcacgggtcttgcccttgtcatccgggaacacgagccagcgggccgtcgatacttcggtcgactcgtagatcgcgtccacccgatactcggtcgcaagacgctgagccacgatttcgaactgcagaatacccacggcaccgaggtaaatatgccccagatcgtccgtgaacacctgaatcgcgccttcttcgccaagctcctgcagaccctgacggagctgcttctccttgaacggattcttgcagcgcacagagcggaagagttccggagcgaagaacgggataccgacaaagccgagcttctcaccctcggtgagcgtgtcaccgatgtgaagctgcccgtggttatagataccgatgatgtcgcccgccacagcctcttccatgcgctttctttcctgcgccatgaaggtcagggcgttcgggatcttcatctccttcccctcgcggacgtggaacaccttcatgcccggctcatagcggccggagcacacgcgaaggaacgcgatacggtcgcggtggtgcggatccatgttcgcctggatcttgaagacgaaaccggtgaacggcgattcggtcggctgcacgatgcggacgccggcatcacgcggctgaggctgcggagcccagtcaacgagtgcctcaagcacatcctcaacaccgaagttgttgataccggaaccaaagaacacggggctctgctcgccggcgaggaacttctcgagcgagaagggttcgcccgcgccctgcacgagttcaatcgcctcgcgcaccgagtccatttccatcgggaacagctgatcgagttcgggattatccagccccttgatcgtttccgtatcgtggctcagacgctcttcacccgggcggaaccgcacgagctcattgttcttcagcgagaaaacaccgcggaaggttttgcccatgccgatcggccaggtgatcgggacgcagtgcagctgcagcacgtcttcgatttctccgagcacatcgagcgggtcgcgcacttcgcggtccatcttgttgatgaaggtgatgatcggggtattgcggaggcggcagatctcaagcagcttgatcgtctgggcttccacgcccttcgcggcgtcaatcaccatcacggcggcatccactgccgtcagcactcgataggtatcttccgagaagtcctgatggcccggggtgtcgagcaggttgatgatgcggtccttataggagaactgcatcaccgaactcgtgaccgaaataccacgctgcttctccacctccatccagtcagaagtcgcgtgccgggcggccttgcggcccttaacagctccggcgagctggattgcgccgccgaaaagcagcagtttttccgtcagcgtggttttacccgcgtccggatgtgaaatgattgcaaaggtgcgccggcgtgcaacgtcgttcaccaatgcgggattgggagaagtcattttgtttggattctttcctccgcttgagaggaagctgttgaacgttcaattgattcgaagtgcgtaattttatcaagccttactgtgatttgctgatatgaaccgtccgtcaagatgattaaaatgcctcagactcttttttcgccacttattaaaggcccccttccatgagttattttccaaaatggcaggtaaaaacatccggcgtcatcgcgcctgatgaaaccctgccggcgaaccagacgatcgcgctcggcattcagcacgttgtcgccatgttcggttccaccatcctcgccccgattctgatgggctttgaccccaacgttgccgtactgatgagcggcatcggcaccctcatcttcttcctgatggtgggcggccgtgtgccgagctacctcggttcttctttcgccttcatcggcgtcgtgatcgcggccacgggctatgcggccggttccggcctcaaccccaatatcgaggtcgcgctcggcggcatcatggcctgcggcatcgtgtacttccttgtgggtgtcatcgttacgctgaccggtgtcgcctggattgaaaagctgatgcctccggttgtgaccggcgcagtggtcgcggtgatcggtcttaacctcgccccgaccgcctgcaagagcgtcggcacctcttccttcaacgcctggatcacgattctttccgtgctttgtgtgggcggtgtcgcggtctacacccgcggcttcatccagaagcttctgattctcgtcggccttctcattgcctacgtgatctacgcgattcttacaaacggcctcggtctcggccagccgatcgatttctctctgatcagcaacgccgcctggttcggtctgccgcacttccatcaccccgaattccgggctgacgcgattctgctcatcgtgccggtcgtgatcattctgatcgcggaaaacctcggccacgtgaaggctgtgaccgccatgacgggccgcaaccttgacccctacatgggccgcgctttcatgggcgacggtctcgcgacgatcgtttcctcctccatgggcggcacgggcgtcacgacgtacggtgagaatatcggcgtgatggccgctacccgcgtctactccacgctgctcttcccggtggctgccgcgctcgcgatcctgctcggcttctcgcctaagttcggcgctctgattcagacgattccgcagccgattcttgccggtatgtcgattgttgtgttcggtctcatcgccgtgtccggcgcccgcatctgggttgagaaccacgtcgacttcagccagaaccgcaatctgatcgtcgccgctgtgacgctgattctcggcgccggcgacttctcgctctcgatcggcggtttcacgatcggcggcatcggcaccgcgactttcggcgccattctgctgaatgccctgatgacccccggtgaacgaatgggtcagaaaaagaactcttaatctgaaagagtctgcccggcattcctgatgcagcaaggccgatgaagagaaaaatcttcatcggccttttttcgtagcttgaacccggttcggattacttccggcgcggatttccggaggcgttctggaaggctgccgccatcgcgcctgagaagccgccgcccgttctttcagacttcatccggggcgcactctgtcggccaacgcggggttcgcttctaggcgccccttcacgacgcatggaaagcgcgatgcgcttccgcttttcatccacatcgagcacccggactttgacgatctgccccacccggacttcagcggagggatctttcacatagtggtctgccagctcggaaatatgaacgaggccatcctgatgcacgccgatatccacgaaggcaccaaacgccgtgacgttgctcaccacaccctcgagcttcatgccaggtttcagatccgagatctccgtcaccccctcaaggaagtgcgccatcacgaattccggacgcggatcgcggcccggtttctcgagttccgagaggatgtccttcacggtcgggagtccgaactgatccgtaacaaagtcagccggccggagacgcttcagcaccgattcattcccgatcagcttttcaatcggaagaccggttttttccgcaatcgcgttggcgactgaataggcctccggatgaaccgcggaggcatccagcggattctcgccattctgaatccgaaggaagcccgcagcctgctcaaacgtcttctgaccaaggcgcggaacgctgagcagctgggctctggaggcgaacgccccatgcgcctctcgccaccggaccaccgcttccgcgagacttgatgtcagccccgccacgcggcgaagcagcatggggcttgcggtattcagattcacaccgaccgaattcacgcagtcctccaccacagcatccagcttccgggcgagatccccctgatccacatcatgctgatactgaccgacgccgatcgccttggggtcgatcttcacgagttcggcaagcggatcctggagccgccgggcgatcgacaccgcgccgcggtagctcacatccatatccgggaattccttcgccgcgagttcgctcgcggagtagacgctggcacccgcctcgctcacaacagccttcgtaagcccgagttccggatggcgatgaatcaggtcatccacgagtttcactgtttcgcgggacgccgtcccgtttccgatactgaccagtgacggatggaaccggcgggcgagcgtcgcgagcgactcaatcgatccgtcccagtcgtttctcggcgggtgcggatagatgaccgcagtcgcctgaacagagcctgtttcagaaatcacggctaccttgacgcccgtacggattcccggatcaagaccgatcacgcccttgtggcccgcaggggccgcaagcagcagatccttcagattggagccgaacaccgtgatagcactccgctcagcatcctcacggagcttctggaagatctcggtttcaagcgacgtcaggcatttgacgcgccaggtccagcggcagacccgggcgtaccagctgctcgccggtgcgccggaaagccgcagaccttcatgctccgccaccatttcaatgcaggggtgcggtgtctgggtttcgagttcctcgggaagcgccactttgacggacagcacttcgtccgtgcgggcccggaaaatggcgagcacccgatgtgacgggattccgatcagcggttcactgaagtggaagtagtcctggtacttgcttccggcctcttcctgcccctcgatcacctcagactgcagaacacccgtcttccagaggaagtcgcggagtttcccgatcagctcagcgtctgtcgcgaaacgctccgccgcgatatcgcgggcaccgtcaagcgccgaggccggatccggataggcttcggaaaggaacgccttggcagtctcctcgggatccagcgacggattgccgagcagctgatccgcgagcggctcaagccccgcttcacgggccttttcagcccgggtgcggcgtttcggcttataggggaggtagagatcctcgagccgctgcttgctgtcagccgattcaatctcggctctgagcgcatccgtcagctttccctgcttttcaatggactccagaatggaggcgcggcggtcttcaagatccttcagatagatcagcttttcctcgagcgcgcgaagctgcgtgtcatcgagccctccggtcacttccttccggtaacgggcaataaagggcactgtcgccccttcttcaaggagattcacggcggccgccgcctgtgccggagtgcagtgaatgtcggcggcaatcgcccgggaaattttatccagtaaaagattcatagccgtgtccggagcggcagccggaactgccgcccccaaaagaaatcaatagggatggaagaagaaacgcgccggtttctctgccggcgcgctgcctcagtgctgagctgcccgctgacggatcaggtcaacgagcgcctgatccttattccggtaggcctcgttgcgaagcttatcgaagacaggattttcggaaggctgaggattttcctgctcgtaactgaaggtgaggagtaccttatccgcggcttcctcaagacggatgatctgccagctgcggggccaggtggggcctgctgcgacgtgaatttccgcccggctgtccgggatcagggcaacctgatcctcgatcaccagatcgccaaagcgctttgtgcgcttcagccaccgtccgccgtcacttgtttcggtgtcctgcacgctcgactcgtcgcagcccgcgagcacaagcttcggattccggagaagccactcgagctccctccagacgctttcccgattcagaccttccagctgcagcacatgctcaaaaatgatcacttcttttctctctcagagaccagagccggaattttcccgcccggtcttcatgcgtttttccagccactggctgtaagcggacatcataagggaagacgcaaagtagatggcgcccacaaagagatagccgactccgaagaactctctccactctggatctccgagcgcaagcctcaggcttccgagaagatcatacatagagacaaccgtgacaagcgacgtatccataaaggtggaaagaaggctgttcacaaaagccggaatgatcgcgacgagcgcctgcggcagcaacacgtgcacgtagcactgaaagcggctgaggccgagtgactccgcggccgacatctgagcggcaggaactgcctgaaggccgccgcggacggtttccgccatataggccgcctggaacagcacgatcgcggtcgccacgcgccagaacgtggaagtctcaaatcccatcggcagaaggatcgggaaaatgaaggccgccacgaaaagcaccgtgatcagcggcacgccgcggacgagttcgatataagccgtggaaagtgtccttacaagcggcagcttcgagcggcgcccgatcgcgagcagaatgccgagcgggctggagagcgtcatgccgatcagtgtgagaatcacggtgagaggaagtccgccccaggagtccgggtcgaccggagaaagcccgaaaacgccgccatacatcagcgagaagaacacggcaaaggcggccacccaggccgcacccagcacccgggctccgcgcctcgaccagaatttcggcaccgccgtgagcaccagcatcagcatgatcaccgctgtgccgaccgcaggcctccactgctcctcgtacgggaatcggccgaaaataatcatccgccacttttcagcgacgaatccccagcaggcgccgtcagacgcgtggcacgcttcgtaatcaggctgaaaaaccgcgttgatgacaccccagtcgataaagcgccagacgccccagagcagggcaatcagagcagcaaacgtaaacgctgccgaggcggctcctgccggtgtccgaagggcctcagggttcagggaaaaacgtttcatttctcctcctccccccgggagaaccgggcattgatgagattcatgatcacggacgtgacgagattcagcacgagatacacgagcatgatgaggcagatcatctcgagcgcctgccccgtcgtgttgatcgaggtattcccgatgcagacaacatccggatagccgaccacgacggcgagcgacgaattcttcgtgagattcatgaactggctcgcgagcggcggaaccgaaagcttcatcgcctgaggaaagaccacatagctcgctgtctgcacgggagagagccccagcgcctcgcccgcaagccactgtccctcgccgaccgagagaataccggcccggatcacctcagcgatcggagccgaggagaaaagcgtgagccccagccagagggcgaggaattcgggcgacagcgcgcctcccccttccaccacaaagccttcgagatggggatgcgcccagccaaaaaccgctcctgacagcagccacacggcaatcgctgtcacgcagaaaacgccgagcgcgatcccccaggcgacgaggaaggtggatttccgaagcgtcacccggcgtgcggcctctccggcaatcagccccacggcagccgccgcaagcagcgccatcccgttatgcagcggcaccgggaactgcagccccgccttatccagcatgacaagcgcgctcgaattcatcacggtctccatatccgggagcatttccgtgatggtgagataaatcgcgaggagcccgatgatgagcggaatattccggtagaactcgacatgggcccagcccagcgcgtgaagcacgggctgacgcgaaagcttcatgaacgcgatgacaatgccgagcagcagtgaggaaaaaatcgcgaggaccgaaaccttcagcgtattgagaataccgatcccaaatgcccgcagaagcgtgtctgaggactgaaaaggaatcatcgattcgccgatctcaaaaccggcggcattcatcagaaaggcgaagccatgctgaatgttccgtgacgcgagattctccgcgacattccgggagagaatccacagaaatccaaagaacagcacggcaacgagaagctgaatcatcagctcccggaatcgcctgctgcgctcacgcgcgagccaggcggcatcaccctgaggctgagcctttttcggtctgaaaaacatagacaccccaaaaaattcagacgcgaagccggccgcggcgctggcttaccccgagcggcggccggcaggagtccttgcttaaaaaagatgcatcagcggatcggaggcgagatcaggatgccgcccttcgtccagagccggttgagaccgcggctgaggccaagaggagtcttcggcccgagattcgcttcaaaggattcgccgtagttgccgacctgcttgatgatccggtaagaccactgtttatccagaccaatcatgcgcccgagatcctcttcaagcccaagaaggcggcggacattcggattcttgctggagcggagagaatccgcgtttttctgcgtgatacccagttcctcggcttccaccatcgtgtagaaggaccagcggacgatctggaaccagtcgtcgtcaccgcggcggattgccatgccgagaggttccttcgagatggtttcaggaagaatcacatagtcgttcgggttcttcgcgcggagtcttgctccagcgaggtccgagcggtccgtggtgtaggcctggcagcggccggaaatgaacgcgccctgggttgcctccgtggtgctgaagacaacgggcttgtacttgatgttattggcgcgggcaaagtcagcgaggttcttttcgcttgaagtgccggtctgaacgcagatcgtggcgccattcagctgcttcgcggaatggatcttgtacttcttcggcaccatgaagccctggccgtcgagatagtccatcgcgacgaaaacggagccctgtgaggcatcgcgggacattgaccaggttgtattgcgggcgaggatatcaatctgcccggactgcagggcggtgaagcgctgctcagaggagagcggcacgaatttcaccttattcgcgtccttcaggacggccgcggcaaccgcgcggcagatatcgacatcgagccccttccagtgcccgcggctgtcagctcccgagaatccgggcgcggcggtattcacaccgcagaccaccatgccgcggctcttcacggcattcagcgtccggcctgcctgagcgggaatggcccaggttgctgcaaccgcggcgagggccgccgcggcgatcaacttctgtttcctgttcatgcttctcccctttgcttttctggctaaagcctgtcaaacgggcagccggagccacccggtcatttttgttacagccttgaacaactctaccagaagagaaaggggttattgcacggaaaactgctgagctcccctgccgttggtcaaaaaaacgctcaggattcagaggttttcttcaccgtacgggtgcggcgcttcacgggagcggctttttcttccgctgccacggccgtctttctcacggccctcgtgcggctcttcgctccggcagccttcggctcacgctcctcgaactcaaagccgaccttgccgcccttctgcagtgcgaggtaagcggagaatttccggtgcgtcttattcgaaacgaaccccgtcaggagatccgtctttccggtctcaagcagcttcttgatctgctcaggcgccaccgtctgctgaaggatcaccttcccggtacggaacgtgcacttcttttccgtattctgggtgttctcacaggcgtaggccatcgggagctcaaacacgcggccgccgcataccgggcacttgccgatcggggtcagtgttgagaaatccaccggagcggcattttcgtcactctgggtcggattatcaaacacaaattccagcttgtaatcaggggctgccgtcaacttcagaacggccgagaacggccggcccattttgcttacgaacccctgcaggggaccgatctgcttcttctcgagcagctcctccacttcctcgggctcaaaggtgcggccgcccgggtgcttggtgatactgaagtcgcaggacggatttgtgcaggcgtagcggcggaagttttccaccacttcaccgccgcacttcgggcagcggtgcttcagatgaatcggattgctgagcggcacggattcaccttcgtactgcttcgccgcggccacgatcttttccgtcatatcgcggataccggccatgaattcctcgcgggaaagcgaccccttctcgatctgagcgagacggctctcccattcgccggtcagttccggttccgacagttcctcaatcttgagtcccttaaggagcgcaagcagctcaatgcccttcgcggtcggacgcagctcgcgtccttcgcggatcaggtacttctgcagaatcaggccttcaataatggccgcgcgggtagccggcgtgccgatgcctttgtcctgcatggcggagcgaagcgcgtcatcctcgaccatcttgcccgcgccttccatggcggagagcagcgtggcttccgtgtaacgcgccggaggctgcgtcaccttgtcgaggatatcgatgtcgccggtcttcaccgtttcattcggagtgacgggcggaagcgtattggccgtatcgccctgaccgccgtaaacctcgcgccagccggccttcgcgagcactttgccgcgggtccggaactgatcttcgcccaccgtcgtcacgcgggtcgtttcatccacttcggctgacggatagaacaccgccataaagcgcttcgcgatcaggtcatagaccttcgcctcgacgtccgaaagcttgctcgggaggtgatccggcagcggcaccagcgcgaagtggtcactgatcttctcggtattgaaaatacgggggttcggcttcacccagctgttctcaagcggcttacgcgcgatgctgctgaactgcggcagctggctgagcaggtcaagcgtctttttggcgtcatcgacgtaatcggtcggaagacatttcgcgtcggttctcgggtaggagagaaccttatgcttttcgtagagggactgggcgatggcaagcgtggtcttcgcggtaaaaccgaagcggttattcgcttcacgctgcagcgtggtgaggtcaaaaaggggcggcgcggcgtgcttcacgcgcttcgacacttcggtcaccgtgccctctttcccttcgcaacgggccttgacggcttcagcctcagccttatcccagatgcggtcagacttcttctcgccggtctcatccttctttgcctggggatcaaaccagacaccggtgtagctgccggaccgggcaccgaatgtcgcctcgacctgccagtaattcttcggcttgaaagcccggatctcagcctcgcggttcaccacgacggcgagcgtcggcgtctgcacgcggccgaccgtcgtaaggaagaaaccgccgttcttattattgaacgcggtgagcgcgcgggttccgttgatgccgaccagccagtcagcctcagagcggctcttggccgcctgggcgagcggctgcatttcctcatcgcttctcagatgcgcgaacgcttcccggatcgaccccggggtcatcgactgaagccacagtctctgaatcggctgcttcgcgtgggttgcctgcacgatgtagcggaagatcagctcaccttcgcgtcccgcatcgcatgcattgataagacccgttatgtccttacgcttgatcagcttagcgaggagcttcaggcgggaagccgtcttcgtgatcggcttcagctcgaactccggcggaatgaggggcagatgggcaaacgtccatttgccgcgcttcacatcgtatttctcaggaacagcaagctccagcagatgtccaacggcactcgccacaacgtactgatcaccctcgaaataatctccggcttcggtcttgatccgctccatgccgccgatcactttctgcaggtcggtcgcgacggagggtttttcagcgatgattagttttttgcccataaagcgctcagtaataaaaggtccttgcttttttcagcataacagttacagacacagctaggaacggagatcatccgagagcctcgggatccgctccgacagtccccggatctcgccagcgatgtcctgtacgctttcaactagcctcgccccgctgcggatcagccggttggggcccttggaaagcggcaggtgaatgttaccgggaaccgcgagagtgtccctcccgtaggatcccgcagtcttcgcgaccggaatcgccttggagtgagccgaggcttccatcagcagcacagcgtctgccatcccggcgagataccggtaccggagttcgagccgctccggggtcagggattcgccgatcggtgtcgcgctgagcaggagtccctgcttcgccgtcttcatcatgatgggcttaagggacgccgggtacacccggttcagaggcgaggcgcagagcaccacggcggcgcctgccggatccgcgagcgctccccggagacttgcggcctcaaccccctccatcatggaggagagaagcgtgagtcccactttttccagcgccgctccgaattcataagcgtcccgctctccctcggcggacgggtgacgcgtccccagaatggcaagcagccgtcttccgagcagcttccggtccccgagtccgtaaagcacgagaggcgagcatccggtttcaaagagcccgcggggaaaatcctcatccgcgatggaggttacgaaggaaccggaggtccgccgaagccagtcctccgtcttctcgatcacctcagcctgctcatcctcagggcctgacgcgatacggcgggcgagctcatcgggcaccgcatgccgaagctcactcaggcttgaatcgagaaccgctccgggtgacccgaagtcccccagcagccgtacggcatcctcaagccccatgtcgggtaccgtggaaaaggtgatccaggcgtgaatctcttcctctgtcatgacgctcccaggcgatgtatcccacgggatttctctcagccgcgcggcggcttatgatgaaataccgttacgttacaattgccatttatcttaaaggtgcgatgccgtgtggcacacaccatccagcattatttatcaggaggcctgtcttggccaaactccccattgttatttatccgaaccctgttctggccgtgaagtgcgatcccgtcacggtgtttgatgacaagctcgcgcagcttgcggccgacatggcggaaacgatgtacgccgccccgggggttgggcttgccgcaccgcaggtgggacatcccatccgcctgatcacgattgacgtttccgaagagaaggaccagctgctgacgctcgtcaatccggttatcacatcaaagtctgaagaagaagttgagtatgaagaaggatgcctgtcactgcccggcatctgggacaaagtggtccgcccgtcagaggtgaccgtgcgcgcccaggatctgaagggcaacttctttgagcgtcactgtgaagggcttctcgcggtctgtgtgcagcatgaaatcgatcatctggacggcatcgtctttattgatcatctgagccgtctgaagaaagagcgcgatcagaagaagctgcataagctgaagctcgccgcgaagaagaaggctgaagaggacgccgcgcggtcctgatcagtgtttcacggacgatgcccgggaaaaattctcgagcatcagacgtccgtatttcgcgccaagcgcggggggcagatcgtgcccgagccgcggaatcatctcaaggcgggccccggaaatgaggtccgccgtttctttgcccgcgcggggcggaaggagcttatcggagagaccgtgaaggacaagcgtcggcgcgcggattcccgagacctgagtgcgcctgtcgccgctctgtagcagcgcgagaagctgccgtctgaatccatccgggtccccggggttccgggccataagccgaacaagacgccgcttctcggcatcggttctctcgtaactcacggatcccatcgcccggatgaagcgatccagccgcttcacgccttccgactcactcgccagccgtgactgaggcctgatcgtggcccagatcgcggaaaacttgccgagccctgtccggggattgccggtcgcggaggacatcgatgtaaggctcagcaccgattccggataccgggccgcaagcacctgggcaatcatgccgcccatggatataccggccgcgtggaaggtccggataccaagccctgaagcgagtcccaccacgtcagacgccatctcttccagcccatagacacctgaaaccggccggcgcgtgagcgtccttccgatggaactgaacacccgtcccatggagacacggcccgaacagcgggatgaccgcccgcagtcgcggttatccatcaccacgacgcccgcgcctcctttcaccagagtctcaatcagcgtatcgggccacatccagtgctgcatcccgagcccggggatcagaaaaaccgtccccccgtccgagagtttcccgtacgcttcatagtagagagtgacgccattggtcgttattgccggcattttctacaatagaacctaagttaaccattccatgagcaggtaagcatcctggtctgacatgaaaattatttttgctggaacacctgaatttgccgcaacagcccttaagggactgattgaatctgaacacgacgtctgtctggttctcacacagccggaccgtgcgtcggggcgcggcatgaagctcacgccgagcgccgtcaaagcccttgctttagctcatgatattcctgttgccactcccgttacgctcagcctgaaaaaaggcggcgaagaggcacagaaggcacaggatctgattgcggcccagaaggctgacctgctggtcgtcgcggcctacgggcttatccttccgcagtcggttctcgatatgccggcgggcatcggtccggatcacgccatcaaggcggtcaacctgcacgcgagccttctcccccgctggagaggcgcggctccggtgacccgcgctattgaggcgggcgatcctcagaccggcgtcacgctgatgaaaatggaggccgggctcgatacgggaccgatgattgacacggtctacactgacatcgaggacaccgacaccaccacgacgctcaccgagcggctcgcttctctcggcaccgaactgctgctgaaagacctgaagacgcccgacgcgctcaccttcacgcctcagccggaggatggcgccaattacgccgaaaaagtgatgaagtccgaggcccacattgactgggaatctagttctggactcatctgccgccgcatccgggcgttcaatcccttcccgacgtccacctcagtcattcacgacacgacgatcaaattctgggaggccgaatccgtgaagcttgagacggatgacgccgctccggggtccatcgtgtcgattgacgacggcatcgttgttgccgccggcatcggcgcgatccgcgccacgatgctgcagaagccgggcaagggccgcatgaactggcgacagttcctgcagagttttcctttgaaagtgggggagacgtttaaatgagttctgcaaacttagcaacagttttcctgcattcgctcgatatccagcaggcgatgatggaggggcacagccttgaccacgcgcttgagcgggatctgaagaatgtggaagatcccgtgctgcgggctgccattcaggcggtctcctacgatacggtccgtcatctggcggcctcctggaaggtaatcgaacacttcgcgaaccgtcctcccgcgcagcccgtcacggcgctgctcgaaaccgcgattgcccgcatgatcgagcatccggataaggacttcgtcacggtggatcaggcggtcaaagccgcccgcgagaatccctcgacccgcccgagcgcaggcttcatcaacgcgattctccgccgcttcggccgtgagcgcgactccctgatggagtggctcggtgagcaggaatccgtccggttcaatattccggactggtggtacagccgctacaagaagtcgatggggaaagccgcgaaggatgtgcttgagctgcagcagtcaaaggctcccctgacgctccgcgtgaatgcccgaaagacgaacgcggacgcctatatcgccgaactgaagaaggccggaatcgaagcctatcgctccggcatgtacgccgtcacgctgaaggaagcgctcccggtccgcgagatcccgggtttcgccgaaggcgtggtctcggtgcaggatgccggcagccagctggcggttcagacgctcgacccgaaggacggggagattgtgctcgacgcctgcgcggcgcctggcggcaagtcgacccacatgctggaactcgctgatatcgaactcacggcagtggaaatcagcccgtcccgcactgaagcgatccacgagaacctgaagcgcctcggacttgaagcgacggtccggaacgccgacgccgcggatatccactcctggtgggaccgccggaagtttgacgcgattctgctcgacgccccctgcacggcgagcggtgtcgcgcggcgtcaccccgacatcccctggcagcatgtcgagcacgatgtctcccggatgtcgcgcacgcagaagcagctgctcgaaacgctctggcccctggtgaagaaggatggacgcctgctctactgcgtctgctctgtcttcccggaagaaggcaagctgcagatcgaaagcttcctgcgccgccaccccgaggcctactgccccgtgccgccccgcctcctcatgccgcacgaggatctgtcgggcgattggaccgaagaaccgctggtgcacgacggttatttcatcgcgctgatcaagtaccgcaacaactaagcaggccccaatggcaaacatcgcatcggttctgcagagattccttttcatcctcgcggccgcgctaaccgcagccgcgtggccgaccgcgtcccgcgcggttgaagcaggtattttctacacttcaggaaatctcacgaaggaggccccgggagaaactcccgggctctacctcaatgccaactttgccctgcatttgccgactcaggccgaagagtccctgaagcgcggcgtggcgctctacttcgtcaccgaattcgagctcacgaaaaagcgctggtactggacggataaggaagtggcctccgcctccacgacgaagcggctcacctacagccttctcacccgcaagtatcacctgggaggaaacggtctctcgctctccttctcttcgcttcaggatgctctgagtacactcgccgccatccggcactggaatgtcgctgggccgagaacgatttccggaagcttccaggactattcagcccgtctcaggttccggcttgaccggggccggctgccgcgtccgctccagctcggcgccgccgactgggatctcacctctgactgggtaagcattccgatttcgccgtcagtggtgtcgccatgaagacggatacttccagagtttccaaggcctaccgccagatcttctttgccgtcccgctcactgtcatagcgctggtggcgctgctcgtgatcgcgagtaccaattcgagtcttctggaccggtacttcctcgtgctcatggtgctgaacctcgtggcggcctctgtgctcgtcatcctgaccgcgtggctttgcatccggctcttcctgcagtggcgccgtcatcagttcggctctcagatgacgctccggctgacgatccagatcacgctgatcgcggttctcccctgtctgctgctctatgcggtgtcctcgcgcttcatcggccgctccatcgactcctggttcaatgtccgggtggaacacgcgctcgactcgggcgtcaatctgtcacgcacggcactcgcgaatctcagaaagcagaccgcggaacgcgtcaggatccttggctacgcgcttgctgaccagccgcagttcgagtggaaaatcgatctcccccggctccgcgaacgctacggcctcacgaacgtcatgatcgcgaacggcaagggggaaattctgacgaccgcgtttaccggtccgacgctgaaaatccagatgccggctgcggaatatctgtcggtcgcccggcttcgcggctcttactcatcgctgcttgaagagcagtccgaggacgcttccgtttctgacccgacaatccatatcctcgcgatcgcgcctatcgcgatccaggactccgcactgggcctcagctgggaacccgaggatcccgatgcgccgaaacgccacactcagaaaccggggctcacgcagctgaagccgaactcctactacctggtcgcgcaggagccgctccccgcggaacttgagaaaaatatctcctctgtcacgaatggctaccgtgactatcaggaactcgtgctgagccgcgacagccttcgctcgctcttcaaggcatcactcactgtcagcatgctgatggcgttcctcggggccttcattgccgcaatcgcctacgcccagatgatggtggatccgctgcggcagctcgcccgcggcacaagacgcgttgccggaggcaatctgagtccgattcatgaattttcaggcagcgatgagatcaacatgctcacgcagtcctttaatgacatgatcggacagctcgctgaggctcagaagaaagttcagacgagaaccgaacagctggagcagacgagccagtatctggaaagcgttctctcgaacctttcctcaggcgttgtcgtgattgaccgcgacatgaatatcgtcaccgcgaatgagggtgccgcccgtattctgggatctgacatcgcggcaaaagatgcctcgctcaagaccgtggcgccgcagatctgctcagtgatcgcgaacctcctcaccgagccctcgcacccgtctgaggagaccaaggattttcaccgtgaaattgaactcgcgcggatcggatcccagacccccattacgctttttgtccgggcctctcacctgcatctctcgcagcccgtgccgcttgacggactggtgctcgtgatcgacgatatgactcaggtgatctcgggccagcgcgccatggcctggggcgaagttgcgcggcgcctcgctcacgaaatcaagaacccgctcacgccgattcagcttgcggccgagcggctcgaaatgaagctctccggtaaactgaatgaggctgattccaagctgctgtcgaagagcatttcgaccatcgtgacgcaggtatccgccatgaagcagatggtggacgacttccgcaactacgcgaagctgccgcccgccgtgctgctgccgacagaccttaatgcgctgctggatgatgtcggtgatctctaccgtcaggccgggaaaccggtcactgtccgggtcgatccatcgattccccggatctacgcggatgaggcccagctgcggcaggttctgcacaatctggtcagcaattcgcttgatgccatgtccggccggacagacggcaaagtggtgatctcgactgaagctatgaaggacggcggcaggataaccggcgttcttctgcgggtggccgacaacgggaccgggttctcgcccaccattcttcacaagtccttcgagccgtacatcacaacgaaggcgaccggtacaggtctcggactgccgatggtgaagaaaatcgtggatgaacacaaggcggatatcaaaatcgccaatcgaaccgatcaggaaggccgtgtctgcggtgcactggtcactatcgcattcagggtcagtcaggacagctgacgcacggctttaaggagcaacagatggcaaaacttctggtagtggacgacgaggtcggcattcgggaactgctctcggagatcctggaggatgaggggcacgatgtgcttaccgcggaggatgccggtcaggcaagaaagctgattgaagagaatccgcttgacctgattctgctcgacatctggatgccggatatggatggcgtcacgctgctgcgcgaactttcctcccagcatctgatccactgcccggtcatcatgatgtccggacacgcaacgattgatacagccgtggaagcgacgaagttcggcgctttcgatttcctcgagaaaccgatttccatgcagcgcctgctgtcctcggtatcgaacgctctcgcgcaggagacgccggctgacacggaatcccggcagcaggatgctgagacgcagtctgagccgtcagaggccaaggccgtgatctacggccacaacggaaacgagctcgccacgattccctttacgctggagctccgggacgcgcgtgactcctttgaaaagctctatctgcaaagcgtactggaggaagagagttactccatgtcgaaggtggctgcccggacggggctcgagaggacacacctctaccgcaagctgaagcagctggagatcactctccccgcgaaggaaaagacggcctaaggcacgccccacatcaccatttcattttcctctaccgcggctttcagaagctgaagcagaggataggcacgcgccccaagcgggatatgggagcgctgcacacggtcctcctcctcgagtttctcctcttcatcaaaaagcgacgcgggatgcacagcctgcgtgcggaaggattccgctacacgcttcgcgcgggctttccgatcctcctcacgcttcttgtcgtcagccttctcgcggctgatggcgctctccagaatggcaatccactccttcgcttcctcaggagagatggcaccgcttgccgtgcagggacggcccagcaccttgaagacctgcttctgggtgtctggcatgaaaaagaaatctccacccgccttggaatgaaaccgaactaatgccatacactaacctctaattcaaaatacaagacatccaaaactgccggagcgcatcgatcttatgaaaaaaaataccgtacctgccctgagcgatgatgagttcgtcgagctggaggacctgctcgcaggcctgcctgaggactgcggggccatgtcatccgatgaagcggacggctacctcacaggactgcttctgagcccggaagagatcttacccgagcgctggatgccctggatcgtcagcgcggcaggaaaggagcctcagaatgtcgacgaggacactctctaccggctcgaatcgcttctctttacccgctataaggagattgaccatcgtctctccacccggaatccgatcgacccgatcatcctgatcgacgacgatgagccggatgcgggcgacagcctggcgcctttcgcggtcgggttccttcgctcgatggaactctttccggctctcggcgctgtccagaacaaggcggtcggcggcgcggtgctcggcgtcctgcgccaccttcccgcggaacttcagggtgacctcgcggaaaccattcaggggctcgacaccgactctccgctcagcacgccggaagagtctctcgacgacctcgtggcgtgcgtcgcggaaatcgcggaagtcacccgcggcttcacgatcaaggagtaggcggcttcccgctctcctcagcagagagcatgccggagcgcttcgcgagcaccacgagaaccgcgaccgggatgctgagcgccgccgtgaacatgaagaaccggttgtagcccattccctccaccatcaggccggagaagcccgcaatcgccttcggaagcagcagcatgaccgaggagagaagcgcgtactgcgtggcggaaaattccttgctggtgagtccggaaaggaacgccacgaacgcggcgctcgcaagccctcccgccagattgtcggcgctcacggtcacggtcagaaaggcgacactgtgaccgatcagggcgagcgcagaaaagaggagattcgtcgctgcggacagcaccacgccaaggaaaagcgcggtcatcacccccatccgcaggacaacaatgcccccgataaaggtgccggccagcgtcatgatgacaccgaacactttgatcaccacggcgacttcagccttcgtgaaccccatatccgcgtagaacgggttcgccatgattcccatcacgacatctgatacccggtaggtcgcgacgagcgcgagcagcacaaaagtccagacgccgaaacggcgatagaagtcataaagcggagcgaggaaaagctccttcaggagttcagccggggtccgtctccggcccttcgcggccgggatttctctcggggtctgcgcggggctttcaggcgacaggagcactgtcaccatgccgacgagaacagaggctgccatcgcgaaatacgccatctcccaggctctcgcgctgtaacccacggcatcgaccccggccaccgcggcggccaccccgagcgctcccgcgcctgcccagatcatggcgatgcggtagccgaactgataggacgccgcgagcacaccctggctccgcgcgtcggcgctttcaattcgataggcatcgagcgcgatatcctgcgtggcggaagcaaaggctgtgaagagcgccccggcgatgatccccgtgagattcctcgccgggtcaatcacagccatcaggcagaggccgatcaggaggcagatctgcgcgacgatgagccacgcccggcgccgtccgagatgcttcgtgagaaacggtatgggacagcgatcgacaaacggcgcccaggcccatttcatcgcgtagacgaggccgatccaggacataaagccaatggtggcgagtccgacacccgcctcgcgcagtctgaaggagagcgttccgagcacgagaagcagaggcagccccgaactgaatccgaggaaaaacatccggatgctgggccctgtcagatagacccgcagatcctccacgagcttcgcgaaacgcccgcccgtcatgccttcttccccgtgatttcagcgcggctgctgatccatttccactcgcccggcttcagatcctcaggaagcgtgagcgccccgaactggatacgggtgagtgtctcaacgcggtttccggccgcagccaccatccgcttcacctggtgatacttgccctgctccagcgtgagctcaatctcgtgctcacccgtgatccggcagtcagaggcggcgaccggcgtcctctcatccttcaggagcacgccgccgagcagctgcttcacgagagactcttccgccggatgcttcagcaccgcgcggtagatcttcgccacgtggtgcttcggatggatcagatagtgctgaaacgcgccgtcgtccgtcagaataaggagcccggtggtgtcttcatccagccttccgaccggctgaatattccggttgcggagcggtgcggggagcagcgtgagaacgctcggatggaaggacggcttcatcgagcactcgtagccctcaggcttattcatcgcgataatcgccttctcaaaaaaaggccaggtctcgcccttcaccacgaagctcttcccttcaggctccaccgtctcatacggatcctcaaccacggcgccgttccaggaaacgtcgcctgaaagaatcagatcgcggcagtcgcgtcgtgtgccgaaaccctgggaaaaaagcatctgttcaaaattcatggatatgtgtccgtacgctcgagcggttgaaaaaactgttggttatatcgtaaagcttttcaggccagactccccctgaatctcaccgaaaggcccggccccggcgctcttaatttggcaccgcggcggtttgttaagataggcgggaaattttttctacccgcggagaagaccctccgcgattcgatcggcaactccaagatgacgactctcgaacacgactttattgaatttgcactgaaggcccgcgtgcttcgctttggcgaatttaagaccaaggccggccgcctttcgccctacttcttcaacgccggactcttcaataccggctccctcctcgaccgcctgggcgccttctacgcgaaaaagattcttgagaagcgtgaatccggtgagcttcagttcgacatgcttttcggaccggcctacaagggcattcctctcgttgcctctatcgcgatcaatctttcccgtctcggtctcgatctcccctgggccttcaaccgcaaggaaaagaaggatcacggcgaaggcggcaccattattggttccccgctcacgggccgcgtgctgatcgtggatgacgtcatttcggccggcacctcgatccgcgagtcgatcgcgatcatccgcgacaacggcgcgatccccgccggtgtcgctatcgcgcttgaccgcatggagaagggcggcaacgctgaggaagtcactgagacctccgcggttcaggatgtggaaaagaccttctcgattcctgtcgtgtcgatcgcgaacctcacgaacctgctcgaattcctgaagagcggctctgacgcggcgcaggagttcacctcccacacggaagcggtcaccgcgtaccgcaaccgctacggcgcctgattagtttttcatcagaccaaaaaaaacggggcaacgccccgttttttttcggcttcagaaacctgacgctcagccgagcttcttatgcaggagctcgttcacgagagccggagaggcctttccgcgggcggccttcatgacctgccccacgagagcgttgaacgccttttccttgccggagcggtactgctccaccatggcggcattcttcgcgaggacttcgtccaccatcgcttcaatcgcgcccgtatcggaaatctgcttgagacccagcttgccgatcagagcgtcgacatcgggctgctcaccttcccagatcgcggtgaagactttcttcgcgcccttcaggttgatcgtaccgtcagccacacggcccatgatcgcggcgagcgtgtcaggggacaccggagcgttttcgatcgtaagaccttccgtctgattaagagcggcgctcacttcacccatcacccagttcgcggcagccttcttatccttcacctgatgcgcgagggagtcgtagtactgcgcgacgccgcggctcgacgtgagaatgccggcatcgtattccgaaagaccgtcttccttctggagacgctcgaacatctgctgcggcagctcggggagattcgccttgaggccggagatttcttccggggacagcacgcacggcagaagatccggatccgggaagtaccggtaatccatggagtcttccttcgaacgcatcggacgggtttcgttcttatccgggtcgtagagacgggtctgctgaaccacggtgccgccgtcctcgatcagctcaatctgacgctcaacttcgtagtcgatagccgcctgcaggaaccggaagctgttcaggttcttgatttcgcagcgggtgccgagcttctcctcacccttcgggcgcacggagacgttcgcgtcgcagcggaagttgccgttctgcatgttgccttccgtgatgccgagccacacgacgagcgcgtggagcgcgcgggcgtatgccaccgcttcatcagaagaccgcatcaccggttccgtcacgatttcgatcagcggcgtgccggcgcggttcaggtcaacgccggtctgccccggacggatgccgtgattgctcttgcctgcgtcctcttcgaggtgagcgcgcgtcagatccaccaccttcacgtagggatccttcttcttcggcgtgacgaggcacgagatcttgccgccgagcacgatcggcagttcgaactggctgatctgatagcccttcggcagatccgggtagaaataattcttgcggtcgaaaaccgaacgctcagccaccttcgcgccgatcgcgagaccgaactgagccgcgcggatcaccgcttcgcggttcaggaccggaagggcgccaggcagcgccatatcgatcgcgcaggcgtgcgaattcggttcaccgccgaagccgttgtcagccgcggagaaaatcttcgtatgggtcgagagctgaacgtgagtctcaagaccaatgaccacttcccattgcatgtttgcttactctccatccactgttagtaacccgccggaacccggaggtgccagtcggtttcgcgctgccaggcgtccgcgagctgcagcaggcgggcttcctggaagggagccgcagtgagctgcacgccgatcggacggccgttcgatgcgaagccgcagggaacgctcatgcaggggagacccgcgagagaagccggaaccgtgtaaaggtcgccgaggtaggcggacaccgggtcgctcttctcgccgaagttataggcgacgcccggggccaccggggagatgatcgcgtcaaccgacgcgaaagccgtacggaattcgtcagcaatcaggcggcggaccttctgggccttcaggtaataagcgtcgtagtagccatgcgacagcacataggtgccgatcatgatgcggcgcttcggctcagcgccgagaccttcgttgcggctgcggcggatgagttcatccatcgtcttgcagtccttcgcgcggtagccgtagcggataccgtcgtagcgcgagaggttggagctcgcttcagcgcaggccaccacgtagtaaaccggcacgccgagacgcgcggtcggaagatccatatccacaatcacggcgccgtggtcgcggtaaaacgcgatcaccttatcgatgctcgcgcggacttcttcattcagacggtcagagaaccaggagcgcggcacaccgatgcggagaccggcaagatccttgccgagaccgcgggtgaagtcttccgccggaagatcgacgctcgtcgaatccttcggatcgaacccgaccatcttggagaggacagaagcgatatcagaggcggccggagccatgaggcccgcggtatccaggctcgacgcgaaagcgatcatgccgagacgcgagggacggccgtaagtcggcttcagacccgtaacgcccgtgaaggcagccggctcacggattgagccgccggtatcggtagccgtcgcgatcggggcgagacgggccgccacagcgctcgcggagccgccggacgagccgcccggcaccgcctgaggatcccaggggttgaagcacttgccgtaggtggagttctcgttcgccgaacccatcgcgaattcgtcgcagttcagcttgccaaggcacaccatgccttcagacttcagcttggaaaccacggtggcgtcgaacgggctgcgatagccttcgagcatgcggctggccgcggtggaattccattcctgggtcacaaaaatatctttatgcgcgatcggcacgccggtcagcgggcccgcttcgcccttcgcaatgcgggcatcggcggcttctgcctgacggagcgtctcctcgggacggacgtcgaggaaggcgttcagatccttatgggcttcaatgcggtcaagatactgctgcgcaacctcaacggcagaaatctctttgttctgaagctttgccgccagttcggcgacagagcagtgcgtaacatccatcatcttgatctcacgactccacgtactgaggaacaaggaacatgctgtcgcatgtttcgggggcattcacaaacgctttttcacgaatatccgtttccgtgaccacgtcttcgcggagccgctcagcgccgtcatggggatgcagcatgggctcaacgccatccgtgttcacggcgcggatttcctcaatcattttgaaaatgtcattgagttcgccctgcatctgcagtatctgggattcagacagatcgatatgcgccagattggccacatgcaggacatcatccttcgaaagggacatgatgaaatattctcgttttatacagaaacactcggcccgctgtaaccgggggacggttactgaaatgaacaatttttaggaaaaaaatgtgtcgcgaacgggcaccaggccactgcttagtctatcattgatcagttgacggtagtccccttcatccgctaaatagaatccctctcaaatcccgtcactgatcaaacagtgcagcggatacaataggctacctttttttggctctctaatgagatttccagtatgttcggcatgagccttttccgcaattatttctccaatgacctcgccatcgaccttggcaccgccaatacgctcatttatatgagaggcaagggcattgttctcaatgagccttccgttgtcgcaatccggcaggagggcgggcccaacggcaaaaccacaattcacgccgtcggccactcggccaagcagatgctcggccgtgttccgggcaacattcaggccatccgtccgatgaaggacggtgttatcgccaacttcaccgtcaccgagcagatgctgaagcagttcatccgcatggtgaagcctaacaagctgttcgctcccaatccgcgcatcattatctgtgttccctgcggctccacgcaggttgaacgccgcgcgatcaaggagagcgctgaggccgcgggcgcttctgaagtcttcctgattgaggaaccgatggctgccgctatcggcgccggtcttccggtgtcggaggcggccggttctctcgtgattgacatcggcggcggcacgaccgaggtcggcgtgatctcgctcggcggcatggtgtactcgggcagtgtccgtgtgggcggagacaagtttgaccaggcgatcgtttcctacgtccgccgcaatttcggcatgctgatcggtgaaccgacggctgagctgatcaagatggaaatcggttccgccttcccgagctccgaagcgaaggagatcgaggtgaagggccgcaatctttccgaaggcgttccgcgcaccttcacgatccacagcaacgaggtccttgaagcgctgaccgagccgctgaaccagatcgtgggcgccgtgaagaccgctctcgaaaagacgcccccggaactcggcgccgatatcgctgaacgcggcatgatgctcacgggcggcggcgcgctgctgcgcgatctcgatcagctgctccaggagcagacgggtcttccggtccatatcgccgaagaacccctcaactgcgtcgtcaagggctgcggcatcgctcttgaaaacatcgaccggctccacaccgcctttacgtacggctagcagtcttccccgtgaagccggaatctccggcttcacacatctggggatccattccccttatcagttacatttcccatggataacggcacgccggccctcttcagacagggccttcccgcgggaatgcggctggccatctttgccagcctttccgtcgttctcatgctggtcgacggaaagatgcagaccctggaagcattcagagagagcatcgcatcctatgtgatccgtcccgcggaagcggtgacggaggggactgttgacgccctcgcgtccggcggaaaattcttcacgacggtcagttccctcactgaggagaacgagcagctgaagaagaagaacgcccagctcagctttgaccttctcgaattcaaccgcctgaaggccgaaaacgcccagcttcagtcgatggccggtgtccgcagctcggttcatatcagttctctggtcggcgtgattcagggggaaaccgctgacgccttcacgcatcacctcgatatcaatctgggaagcagcgataagatcgaacccggcatgccggtgtttgatgaaaacggtgttctcggacagatctcccgggtgagggcggatcagtctgaaatcactctgctctcggaccccgcgcttcagttcccagtgctgctgccccgctccggtatccgctgcgcgacagccgctaccggcaacgatcagatcgtcgagctgcagtacgtgccggccgcggctgatatccagaagggcgacgccgtgcagacttccggtctcgaccgggtcttcccgccgcatatgccggtcggcacggtggtcagtgttgaaaaagtgccgggcgacgcgttcgcgcacgtcacggtcaagctgagcgccgtaccttctgtcggacggtacgtgatggtcggtctcgtgaaggatccttacgcgggtgacacgccgaaacccgacgctccgcaaagcagcgcgccgaaggaggacgaaccgtgagtctctggaatacgctcttcccgtctccctctccgtccaccattgccacgcagccccgggagtacatcctgcagcctgcgaatccgctctgggtcggcgccaccattctggtgagcatcctgctcgacttcgtgctgcaccgcgcggcctgggtgcctgattttgtcgcgatcacactcttcttctggacactgcgccagccgaactgggtgggcatgctgatcgcgttcctctgcggcatcctgatcgacgtccagcagggatcgcttctcggacagcacgcgctcgcctacgtaattctttcctatatggcagtccggtcgcgcaagcgcctgtcctggttcagcccgctcgcgcaggcggtccacattctgcctctcttcctcgccacgcaggcgatcgtcttcatcatccgaagcatggccgtgagggcctggccgggctggagctggttcctcgggagcctgctcgcggcactcctctggccgctctggacatggattcttctgattccccagaggaaatcgaagaatgacgatacgagtccgctctaagcggcgcggcggcacactatgaaaatgaagaagcttttcagggaacggaggcgtcgccgctcttccggcacatctgaattcggcatggctgaattcagacggcgggggatttttgccgtcttctttttcggtctctgcttcctgatcctcgtcgggcgctttgtctggctgcaggtgatctgtcacgatcagtacaccacacaggcggaaagcaaccgcaccgtgagtatcccggtacaggcttcccgcggcctcatcatggaccggaacggcatcattctggcccggaattactggtcgtactcgcttgaaatcacaccgaccgaaaccgaggaaaaactgaacacgctgatcgagcgtctctccaaggtgatcccgatctcgcagaccgatatccggcgcttcaagcggctgctttccgagtcgaagcgcttcgaccccgtgccgatccgtcttgacctcactgaggacgagatggcgcggttcctcgtgcagaagtggcgcttcccgggtgttgagctcgcctcccgtgagttccgccagtacccgttcggtcagatcggagcccatctcctcggctatatgggccgtatttcggagagtgacgcgaagcggattgagaaggacggtcaggaagagctctaccgcggcgcctataacatcggcaaggtcggcattgaacgcacctacgaggacgcgctccgcggacagcctggcttctcagtgctcgaagtgacggccggcggccgtccggtccgctacctggaatcgaccccgtcggtgccgggcaaaaacctcacgctgtcgattgacctcaacctgcagaaggttgtggaaaaagcgttcggcgctgaggccggcgccatgatcgcgattgatccctcgaccggcgaaattctcgccttcgtgagcaagccgacctacgacccgaacctcttcctgaacggcatcgattacgacacctggaatcagctgaacacctcgccccggaagccgctccttaaccgcgcgatgcgcggcatctacccgatcggctcgacctacaagcccttcatggcgcttgccggtctccagtacggtgtcatcacgccctccacgacgatcaatgaccagggtgtctatgaactcggcggccataagttccgcgacgccgcgaaggttcataagggcattctcgatctgaggcgctccattacggtttcaagcgacatctattactacaagctcgcgcatgacctcggagccgaacggatccatgactttatggagccgtggggcttcgggcagctcaccggcatcgatctgctcggcgaacagcagggcatcctgccgaacgccgcctggaaggagaagcagtacaagaagccgtggcttgtcggcgacaccatttcgcttggcatcggtcagggttacaacgccttcacgctcctgcagctcgcgcacgccgtggcaacgcttgctgaccgaggtgtcgcgctccagccgcacctcgtgagatcgatctacgacccgaagacccacaagtcgacggaaatggagtcgacctaccggaaagaaatgccggtgtcgaagaaaaacattgaattcatcatcgacgccatgacgaccgtgacccagaacggcaccgctgcaggcgccttccgcggcgctccctacatcgcggcgggcaaaaccggcacggctcaggtggtgggtatcgcgcagggcgcgcgctataacgccgccgccatcgcgaagcagcaccgcgaccatggcctctttatttcctttgcgccggccgccaagccccgcatcgcgcttgctgttctcgtggagaacggcggcttcggtgccactgcggccgcgcctatcgcgcgcgccgcgctcgactactggctcctcgggaagaacagccttggccttcccccgccccagtacctgcgcgatcagtcaccgaaacccgccgcggaggcaaaaccatgaccggagatttccagaccgtccgcagactgtggatatcgttccttgagcggctttcaaggatgaatttcggactcgcgatcgtcgtcgccattctgacgctcacgggcttcatgacgctgttctccgcgggctacagctacccgtggcgagtcgcggaccaggcccggaacatcctgatcgctttcttcgtgctgattcttttcgcgaacgtacacccgcggtacctgatgaagctcgcggtgccgctttacgcgttcggtgtcttcctgcttctcgcgacgctggtgatcggcaccacgatcaaaggcgcgacccgctggctcaatatcggcatcacccagatccagccttcggaactgatgaaggtcgcgctcccgatgatgcttgcctggtacttccacagccgccaggatcagacctctcccaaggacttcgcgatcgcgttcctgatcatcggaatcccggtggcgctgatcatgaagcagcctgacctcggtactgccattctggtcgccgcggccggcctctcggtggtcttcttcgcggggctcccatggaagtggattctcatcatggtcggctccgggctcgcctcgctgcctctcatctggaacttcctcctccacgactatcagcgccagcgcgtgctgactctgattgatccgacgtctgacccgctcggcaaaggtttccacacccttcaggcgctgatcgcgatcggctcaggcggcgttttcggcaagggctggatggaaggcacacaggctcacctcgacttcattccggagcgtacgagtgacttcctcttcgcggttttctctgaggagttcggtctgatcgggaatctcttccttctcgtgatgtacttcaccctcatcgtgctttcgatgaagatcgccatcaacgcgtcgaatactttctcgaagcttctcgccggcgccatcaccgtcatcttcttcacgtacacttttgtgaacatgggcatggtgagcggcattctgccggtggtcggtgtgccgctgcccttcatgagctacggcggcacggcgcttatcactctcgccacctgcaccggaatgctgatggccatatcggcaaacaaaaa

SEQ ID NO: 1299 - DNA, 15237 bp, Unknown
  gut microbiota DNA sequence
ttgcagcctgctctaccacccacgccccgcagtcttcttccggaagcagcccgtcatcccgcggccctgagattcttccgccgtccgctcccggcacggcccccgccatcaccgagcagggttctgtgccccgggtcgagaaaccggcccgcggcgccaaccggccttacaccgtgctcggccgtcactatgtcccgatcaccggtgacaaaccgatgcgtgagcgcggcatcgcctcctggtacggcaagcagttccacggcaagaagacatcgaatggcgaagtcttcgacatgtattctgtctccgcagcccataagaccatggagcttccgagctacgcccgcgtcaccaatctggaaaacggccgctcgatgatcatccgcatcaatgaccggggcccgttctacggggaccgaattattgacctctcctacgaggcggcaaagcgcctggggtatgctgtcaaaggaacggcccgggtcgaagtggagcggatcacgatggcggaaatcgcggccggcacctggaaccgcacggatattgcttcgagcactatcccggtgacgcaggaaaccgctggcaccgaacgcgatcagcggatcacccgcgaccgcccgagcatgctctggtcggtgcaggtcggggctttctcgagtcctgacaatgcccgcgcctggtccgcccataccgaagcgatgctgtccgccgcaagcggcggacggactgccactacccgcatcgttcagtcttctgattcgctctaccgggttctcgtcggcgccaacctgacgcacgagcgcgccacggctgaggctcaccgcatcgccggcatcatcggcggtccggcctttgcgacccagcgctaatcctgtcattcaaggagcagatggcaactatggatatgaataaactccgggaggctgcctcccggatctggaacgcagaaacactgcctgcgctcaaaacctttgtttcccgtgaatccctctccacggattttgatccggagtgggagaagcacggcatcctcaatgaagtctgccgcgaggcggctgcctggggcacccggatgctgcctcgcggcacttacgatgtgcagcaggaacccggccgtacgccggctctcatcttctcggttcccggcaccggactttatgccggccgcgaagaggatacggttttcttctacggtcacctggataagcagccgcccgcgaccggctggagcgaagggctcggcccctttacgcctgtcgtccgcgacgggaagctctacggccgcggctgctcggacgacggctattcggtttacgcggcgctcaccgcgatccgcgccctggaggatgccggcattccgcaccccagagcggtcggcctgattgagacccgtgaggaatccggctcgaacgacctcgagcactatctgaagaagaacgccgcacgcttcggcagcccccgtcttgtctgcgtgctcgactccggtgccggaaactatgaacagctctggctcacatcctcgcttcgcggcgcctgcgcgatcgatctcaacgtccgggtgctccgccagggcatgcattccggcacggcgagcggcgtggtgccgagttcgttcgacgttctgaggattctccttgaccgcattcaggatccccgtacgggcgccattctggatccggccttcaatgttgaaatcccctcgaaccggatggacgatatgaagaaaacggctgaagtgctaggcgacggcttcatcagcgaattcccgtgggctgaaggcccgaatggttccgtgcagtcccggtgccgcggcacagaggaagccctgatcgcccgctgctggaaacccacgctttctgtcaccggcgcggccggtctcccgccgctcagcatggcgggcaactcactgcgctcggatacgacccttcgtctctccttccgtctgccgccaaccgcgaagacggaaaacattctccccgcgcttcagaagaagctgctcacggatcctccgttcaacgcggtagtttctatcgcgggcggtgacgcgctcccgggctggaatgcgccatccgaggcggactggttccgcagtgcctgtgacgagagctcaaaggcgctctggggaaagcccgccatgcggatcggcgaaggcggctccattccgattctgaatctctttgaggcgcagttcccgagagcccagttcgccgtaaccggcgtgcttggaccgggctccaacgctcataacgctgacgaaagtcttgacctcgcctataccgagaaattcattgccgcggtcggatacctcgccgcatctattccggaggaagcatgagacgcgacacggtaacccaggtcatcgtggactacggcgactttgaggaaaatttcgccactccctatgaggctcagcagttcatcacggcttatgaggacgagtacggtctgccccgcgcggcctggcttgaagacatgagcggacataaaaagtgggactacaaagtctttgaggatgattccgggaacattgtgctcgtggatgattaatcctctgtccggaagcaatgcctaaaaaaagagcagttcagtcatgaactgctcttttcttttcagtgaaaccggatctcagaggaacagcttatagaccgggttctgggactcatcgacatacgggtagcccagcttctcaaggaacttatggaagcgttcatcatcctctggcggcacctgaatacccaccagaacacggccgtagtcagagccgttattgcggtagtggaagagtgagatgttccagtccggattcatcgtcgtgaggaaccgcagcagagcgcccgggtattccgggaactcaaaccggaagagccgctcattcacggcgagcgggctcttgccgcccaccatgtgacggatatgcagtttcgtcagctcatcatgcgtgaggttcaggctcttaagcccggccttcgtgaagagggagagcaggttatccgcgtcacccgggctcttcgtctgaatgccgacgaaaatctgcgccacgtgcttatcggaaatgcggtaattgaactccgtcaccgcgcggtcaccgatcaggtggcagaacttgcggtacgaaccccgctcttccggaatcgtcaccgcgtacatcgcctctttctcttcacccatggcggcgcgttccgtcacgaagcgcagacgctcgaaattcatattcgcgccgctgttgatcgcgacaagcgtctttccggtgatgttgttgtggcgggcccaggccttggcgccggcgacaccgagcgcgcccgcgggttcaacgatcgagcgggtgtcatcaaaaatgtccttgatggccgcgcacacttcgtccgaatcgacgagaacgatgtcatccacatactcgctgcagacgcggaaggtctcatcgcccaccgccttcaccgcggtaccatccgagaagagaccgacctgtgaaagatccaccggatgtcccgcgtcgatcgacttcttcatcgcgcaggagtccttcgtctgcacaccgatcacctggatgccggggtaaagcgacttgatgtaggtcgcgatgccggaaatcagtccgccgccgccgatcgcgcagaagaccgcgtcgatctggtcaccgtcagaaggctggtactgatggaggatttccatcgcgatggtgccctgccccgcgatcacatctgggtcattgaaggggtgaacaaaaacaaggttccgctcgcgctgcaggcgcgccgcgcagtccgctgactctgtgaatgagcgcccttcctgcacgacctcaacatacttgccgccgaagcgcttcacggcttccactttgacggaaggagccgtgatcggcatgcagatcacggcgcggcacttcaggcggcttgccgcgagggccacaccctgagcgtggttgccggctgacgccgtgatcacgccgcgggccttttcctcagccgtcagatgcaccatgcggttataggccccccgcagcttgaaggaaaaaaccggctgcagatcctcgcgcttcagaagcaccttgttatcgagtttttcagacaggtgcacggcgtagtcgagaggcgtttcctgcgcgacgtcgtagacgcgggctttcaggattcgacgaagatattcttgagcgagcataaatttttccagtttgcggagatgtggaggaaagtgtaccgcaaatttaatcaaagttggaatgtatatacttttatacgttttacgacttccggctaacccacccgcgttgcaaaaactgctatgtttaaattgcagtgcgatataaagcgttcaaaaacagcacacgaaagacaggaactgatcttcctgccagagaaaaacaactgcagatcccgggcatatcttccgacggtccccgataccggcggtccgggactatttatctcgcgagaccctaataatgccagcagaaaattcgagcattcagctacagcgtcaaagagaaatcccctataactacacgtccttctctgacaaggaagtcgtgggaaagcttctgggctccgatgcctggaaaaagctctgtgaactgagaccgcagatccgcaccggaagaagctcccggatgctctacgaagtgctcggtgatatctgggtggtgatccgcaacccgtatcttgaagaggatctgctgcaggatccgcatcgccgccagcttctgatcgaagccatgcgtcaccgtctctccgaagtgaataagcgccgcgatctcacggataacgcgctgaacgaatctgtgggagagctgattgaactggcgtcagccgctgtggcgaggtttgaaaagcattttgttgatctcaagatcaagcgtgaggagatcgcgaagacgctctccaagtacacccgccgccgcaatatccgattcgacgcgtatgcccgctcggctcacgtcactgacgcgacggactggcgagtcgcctacccgatcgtggtgctttatccggatgaagagaaagagattccggggctcgtccgggcctgcgacagcctgggtctcacgctgatcggccgaggcggcggcaccggctacacgggcggcgccgtgccgctctctgagatgaccgccgtcatgaacatggaaaagttcacgacgatgtctcaggttgaaatgaagaccctgccgggcgttgctgaaccggtgccgacaatcttcacgggcgccggtgtcgtcacgaagcgtatcgccgagcgcgccgatgagaatcactgggtcttcgcggttgaccccgcttccgcccacagctcctgcgtaggcggcaacatcgcggaaaactccggcggcaagaaggccgtgctctggggcaccgcgattgataacctcgcctggtggcgcatggtgaacgcggacggcaactggcttgaagtcacccgcgtgaatcacaatctcggcaagatccaccgccaggagcacgtggtgtttgaggtcgtcgtgaaggacggccgcgaggatcccgataaggcgaaggtgctgagccgtgaaacgctgaatctctcgggtcccctgttccgcaaacccggtctcggcaaggacgtttcgaataagtacctgcagggactgcccggcgtgcagaaggaaggctgcgacggcattatcacgtccgcccgctggatcctgcaccgtctgccgaaattcggccgcacagtgtgtctcgaattctatggctccgcgagtgtcgcgggcgaagccattctcgcgatcaccacgctcctggatccccatccggaaggcgtcatgctcgcaggcctcgagcatctcgacgagcgttatctgaaggcggttgagtacccggtgaagagcctcacgggccgcaacccgaagatggtgatcgtgggcgacatcgtgtcggataacgaagaggcgctcgaccggctgacccagcaggtcgctgatatctgccgcagccgcgagggtgaagcctttatcgcgaagacgccggaaaagagaaagcagttctggaacgaacgcgcgagaaccgccgccatcagccgccacacgaacgccttcaagctgaatgaagacgtcgtgatcccgatgaagcggctcggcgaatacacgaacgcgtgcgaattcttcaacatccagcactcgatccgcaataagctcgacatggtgactgaggttcagaagtacctcaacgcgccgaacacgttccgcgaagcggctgaacgcatggagatgccgcttgaggaagtccggtcggactacctcggcaacatcaataagattctcgacaacgcgaagaccggctggacctggttgctcgataacttcgaaaccacggctgacaccgtgcgcgaggaagcggcctcgatcggcatcaatctgcccgaatcggagaccggtcacgaacagatccgtgacttcctgctggatcactcgctcgttgtgtcctggagccgcgaagtcaaggatgccctgcagaaactcctgatccgtgaagacttctccgatatccgcaaggcggttgatgacatccacaaccggatcctgaggaaacgcctcttcatcgcgcttcatatgcatgcgggcgacggcaacgtgcacaccaatattccggtgcattccgatgatcctgacatgatggccgaagcctataagggcgtcgatatggtgatgcgtgtcgcgaagagcctcggcggctcgatttcgggcgaacacggtatcggcatgacaaagatcgccttcatgtcggatgaagagctgaaacccttccacgagtacctcgacaaggtggacccgcacggcctcttcaaccgcggcaagctgcgccacagcgcgggactcgatatcgccttcacgccgagcttccatctgctgcgcgccgagtcgctcctcatgcagaagaacgatctgcaggatattgcggactccatcaagaactgcctgcgctgcggcaagtgcaagcacgcctgtacgacgcatcagccgaacgccaacctgctctattcgccgagaaacaagatcattgccacatcgcttctgatcgaggcctacctctacgaagagcagacccgccgcggtctctcgaagcgtcatatggatgagctcgcggaccttggcgatcactgcacggtctgcatgcggtgcctgccgccctgcccggtgaagatcaatttcggtgacgtgacgatcaagatccggaacttcctctcggcccagggctaccatcgcggcaacttcgcgaaaaaggccggcatggagttcctcaggctgcagaacccaacctccatcaagctcgcccgcacggtgctcgtggatctcggttttgtggcggaacgcctcgcctctgacgcggcacgcgctgccacggcgcattccatgaagaatccgacgccgaccacgggtttcccgaccaagaagcgcgagctcttcatgctcgtgaaccggaagctgccgaagccccgtgcccataacacgcttcgtcatatgctggacatcaccgactccaccacggtcccggtgatccgcaatccgaagacgacgagtgaggacgcggaagcggtcttctacttcccgggctgcggcaatgaccgcctgttcccggaaatcggtcttgcctgcctcagcctgctctggaacgccggtgtccagaccgtgcttccgccgcagttcatgtgctgcggctatccgatgcgcggaaacggcatgccgattgaaaacagccgcatcgtgacggataacaaggtgatcttccaccgtatggcgaacaccctgaactatctcgatgtgaagaccattctgatttcctgcggcacctgcatgaagcagctgaaggactatcacctggaggagatcttcccgggaagccgtctcgttgatatccacgagtacctcgcagagaaaggcttccatgtcggaggcgcccacggaacccggtacctgtaccacgctccgtgccacaacccgatgcccgtgaactccatgggaatcatctccaacctgctgaaacctgaggatgacagctcgatcctgctcacggaccgctgctgcggcgaatccggcacgttcgctgtcggacgcccggatatcgcgaatcaggtccggttcgggaaggaaaagagtatccgcgacgcccgtgatcaggtctgcggcgagaagggcggagacttccagggggatgtcaaggtgctcacgacctgcccgggctgcttccagggcctctcccgctacgagacccaggcaaagacccagaccgaattcctcgcggttgaactggcccgccaggcctacggtgacgactggtctcagaagttcctgaacgctgttcaggaaggcggtatcgaccgcgtgctgctctgatacctcctctgcttcctaaggaaaaacggcggcttcggataacgaagccgccgttctttttccgatgatccgctctgaaacgctttatcagagtccgggattcgcggtctgctgctgaggcgctgccggaagatttccggacggatgcacatcactcattctttccggaaccacttccttcacctcagtgccgagactcgcggggatagagctgatcacatgcacctgatacacgccgagaatgacgcttacagctaccagaataaaaaacaaaaccttcatatcgtcctcttagccttgttcctgagggaaacgaactgttccggcggcatagcaccggatgacatcccccacctgaagcatcagcgctccagactccgagatgccgcggtaaatacccgcctgaagctccccggcattgttatcgagaataatctcccgatccatcaggtaatcgtattctgtccattgctgccagtccggcattcttccggtccggaagtacgcctgaagcctcgagagaatggtgccgcacattccggcgagaagccgggttctcagttccctgcagaacctgtcagccgtatctgtgctgactgaatccgccgcgtaccggccggaggccacatcctctcctccccgcagattcagaccgatgccgatcacgaggtaattatctcctgaaggagtcttcgcgagttcacagagcacgccaccaagcttccctgactgcgtccagatgtcattcggccacttgataaagaccggcacaccttcgcgcctcagagcctcggcggacgagaaacccaccagcagcggaatcggcgccggcgtgacggcaggaagcggaagtccgatagaaaaaagaaggctttcccgggcgttttcccagcttctcccatgcgtgccccggcctccggtctggtgatgcgccacccggatctcagtcttatccgaagcctcgcctcgccgcgcccgcactaggagatcggtattcgtggagcctgtctcctccgggcacgtaagaaaaacgtcatgccccgcatcacgcagggatgaacaaacccgcgccggatcaataaagaaaggggcttcactcggcgtgaaactcgcctttttttcttggaccactacaatgacccccattgacaacaatttcttaagttttcagcttaatacagagagcaagccctatggcatccagtgacagtgaaaaactgctgaagttccccagtctctttccgatcaaggtggtcggtgtggcgcgggaaggctttacaagcgaaatccacgcctgtgttctcgatctggttccggactttgatcctgagtcgctcgaaaaccgtctttcttccaaaggcaactatcagtccgtcacggtcagggtcattgcgcagtcccaggagcatctcgatcagatttacctcgcgctgaacaagatcgacggcgtgaaattcatcctctgacagcctctgccaatgacgatcacagtccgccggcttggtatacagccttatgaaaccgtctggaatgccatgcgccggtttacgaaagaccgcggcagccagactgcggatgaaatctggattctgcagcatgaacccgtgctgacgcttggcacacaggctgacgcgtcaaacatctttcccggtaacacgcttcccgtcgtacagtcagaccggggcggagaagtgacgtaccacgcccccgggcagatagtcgcctacccccttctcgatctgagaagacgtcatcttctgatccggcctctggtgcgccggattgagcaggccatgatggatacactcatcgggttcgggatcccggcgcgccttcatgacaacgccccgggggtttacgtcccgagcgaaggcggtgccggtgaattccaggggattgccaaaatcggcgctctggggctcaaagtgagccgtggttgctcgtaccacggctgttcgcttaatgtttccatggatctcagccccttttcccggatcaacccctgcggataccccggcctcagaaccaccgacatggctcatgccggattcagaggcagctacgcggaggccgaggaaagcctcattcaacatctgataaaaaatatagaaaatgactgaaaagaccattcgtcccggttccattcaggcctggttcgcggctatccgcccgaagacatggggtgtcgcgctggcgccgattttcatcggtatttcaatggcactctcggaaaccggccacggccggctgctgctcggccttctgaccattgcggtcgcggttgccattcaggcgctgaccaatatggaaaatgacgtcggttacacaaagcggaaggctgagaaaggcaaccgaaaggggctcccccgggcgacaagcgaggggtggctcaccatccagcaggttgaccgggcaattctcctcaccgctatcgtggtggtggcgatcagcctcgcgctggtagtcatcggtggctgggtgatcttcgtgctgggggcgctgtctgtcgccgccgcttacctttacatgggcggcccgaaaccgattgcgtatacgccctggggtgaactgacggttttcatctttttcggactgattgccgtaaacggcacttactacctgcagaccggcacgatttcctttatttcggtggcgtcgagctgtgcctgcggctccattgcgtcgagtgttctcgtcgtcaacaactggcgcgacgccgtgcatgatgaatctgtcggcagacggactctcgcagtcgtccttgggcagcagcgattcccccggctttacctcgatctgcttctcctccccttcatcatcgtgctcctcatcgtgacggtgtaccctgagcacttcctttacctcatcagcctcttcgccatccgcaaggtgaagggcctgtatgaagacttccggacgctgaaagggctggaactcaaccagacgctttttaacaccgtgaagcttgaaatgcagttcgccattctgctcaccatcggcgctctgctcgacgcgctctggcactgggttctgtagcggcagaaaacgggccttacgaggattgatcatggagaagaacggaagcaaaacggaagagtccgggcaccggcatcttccttcgtggctccggatccgggtgaaatctggatccagcgactaccggaaaatgaaagaacggcttccgcttcccacggtctgtgaagaagcccgatgcccgaatatcagcgagtgcttcgcgtccggaaccgccacttttcttctgatgggcagtgtctgcacgcgaaactgcacctactgcaatatcggccacgggcggcctctgcctctgaatcccgcagagcccgcgctcctcgccgacaccatccggaagctgggactcagctatgcggtgctgaccagcgtgacgcgtgacgatgttccggacggcggggcaaggcatttcgctgcatgcatccgcagcatccggcaggtcaatcctcaatgccgggtagaaattctggttccggatttcaagaaaaatatggaggacgcagtgacggtgctttccgagaccgcgccggatgtcttcaaccacaatattgagaccgtttccagcctcttcagaacggtgcgccccggcggacgctatgaaggatcgctcgagcttctgaagcgctatcacgaggccatgccggagattccgctgaagagcggcattatggtgggactgggagaaactgaggatgagctttttcagaccttccgggatctcagaaatgccggggtcacgcttctctctgtagggcagtacctgtcaccgggaccgggacacgccccggtacgccgctttgtgacaccggaggaatttgaccggtaccgcagggaagctctgaatatgggatttatcggatgcgccgccggtcctttcgtccgctcaagctacagagcgtcagaactgagaaaactggccggcgggctttgatccggattaattggtgcttgttgaatcggtattcggagctttctggaaggaatccatacgggccttgatctcagcggccgactggtactcaaacaccttcacgacttccttcacaccatcggtcttcgccgcgatttcaccggcaatctgaccttcagtcggagtgacgaggcccatcagatagacaatgcctcgatcgcagatgatcttcatctggctgtagggggcgccctgggcggtgagcagacggcttctgacactggtcgcgatgccggaatccttcatccggcggccgacagacaccggttcctgaaccgccagctggttcacaacactgctgacatccaggctcttgcttgccacttcaccggcggttttcttttccagctcggttttcacttccccggtgagcagcactttgccgttgtagcttgtcaccgtaatgtgctgatcctcagggacgatcttctgcgagatttcccaggaaacgcggttctcaatcacgccgtcattgacctgggccccggtagagcggcggtcaaccgccacggatacgcctcctgccatggcgccgcccgccagaatcggcgcgcagccggtggaggcaagagccgcgatgcagcccagcagcggaatagtgaacttagcaattttcatgtgagtctccgtttcagtattagaaactgccctctgaagagcgttcccggatcagatgaatcgctgcagccagtaaaagtactcgcacagcttggttctccgcatcagggcatttctgtgaatcttcttcaggcttccttcgttctgccagtcttccactactttatcaatcagagaggtctcgcagccgatcacctgcccgatcagtttacgcggcgggaatgacggaagcgccagccagtctttcttttcatcccggagctcctcatcaatctgaagaccgctgcgggagcagtaggcgtaaataaaggaacccagcctctggtgaggatctccctcacgggtcaccatgagaccgatacggtcagcgagtgtcgtggccgcgttgtatcccgcgagctccttatgccaggaaggctcatgatccgcgagtttcagaagaatttccttgggaatcgtcagcacttcgcagttattgacggcccactggcgcctcatcacggaatctttggagtacagcgtctcaacgcagccgatcagactgccctgaagtgcgagcagaacgaagaatggggtgtcttcaaaccccggcataagaactgccctagcggcagtcccggactgaacatacatcagcctttcaaacatggagccggtctcatagagcacgtcacccttgctcttatcaacacggtgtccgaggttgcggacgatcgtattcagagcaggagagactttgggggcaaaccaaggaaccggcctactatccatgttcgcagagtcctaagctgatatgaaaaatattttattttgaatcagaagaaaggtctgataatattagccacccattatattccatgcttttccacagactatcaacacgtgaacggcacccaatcgtctgatttttcagtgttttgttcttttatcaccctctgtggaaaaataagccggaaattcatcaagttatccacagtttctgaatgaacaattctggtttttctgttgaaaactccagttatctttcggaagagccagttttattcttttctgtccacagggatgtccccggcatacatcaaaactatccacaaagtttttaacagcataactcattgaataaaaataaaaaagaagcatattcaacgagtttttctactgttattgttgttattattcttttaaaagataataaaaacaatataactacaattttctttctgttgaaaaaagataaaaaagaacggttatcagaaatcgataaccgtccgggtttttatctggttacttagaatttatcccaaaaggaataagaacactgggaatcgtgttttcctgcaggtgtttcagctgatcgtcgaagaagatatgcggttttaaaacattcagaatcggtttcttcggcatgccgtcgagaaggaaaagttctgccgcatacattccaaaacttttcaaagttgtgatcagacgctgctcgctcggagctccgcgtgaggtgacgatggcaatgcggattgccggctcatagtagggatcgtcttttcctctttcagcgtcgagtttctgaagctgggaaagtttggagaagagtgactgaagaggtcctgcctggagaggctgcatcttcttatcaatttcttcctgctgaaacgctttcatgccctcagactgaaatttcttttccgcttcatccccggcaaccacaccatcgaagtcaaaggcgatacggagccctgtgtccccttcctcgtcctggaatgaggtagggagcaccaggcccgcaggaagcccgatagaggtcgcctgacgcacgctgtcgatattggccgacaggaacaggctggcattgaaggctttcatgaagggaaaggtggattgccccgaggtaaaggccccggcctcaatcggcaggctgtaatgacggcaggaattgaaaaaccgctgtcccgtttccggactgttccgtgacagcacaaccacacggaccggagcctgatccttaaagatctcattcagtttgagaaggcggctgatgaatgggaaggcaacgccaggcttcagaggcacatcctgatgctccacctggtaggtccggtaggctgcgaacccctcccgttcaaacagacgatgttcttcttccagatcgaacagcgcccgggaggaaacggcaatcaccagtttttcgttttgagcgtttagagatgtggtcatggcatcttccttgttctgtcttcagtccggagcactccagacttttcctgctgctgaaaaaaaa

SEQ ID NO: 1300 - DNA, 122497 bp, Unknown
  gut microbiota DNA sequence
taaatatcgaggttggataccctgtgagcgttttcttcgatgtactgacggcgccgcgggacgtcatcacccatcaggcggtcaaacacttcatcggctcgggcagcgtcctgaatggacaccttcagcatgcggcggaccttgcgatccatcgtggtgtgcccaagttcatccgcgttcatttcacccagacccttgaagcgctgaagcgtgatgccttcataggcgagggaggtgagccagtcatacatctcaccgatgctctgcacagccttttcccgaaccttgccgttgatcgttttcacaatctttgtgttggggttgaaaagcgacttctgtgatttgccgttttccaccagctccgcatattccttcgtctgaaggaatttgcggtcaagctgggtatagtgcggagtcccatagaccttccgcgcgatcttaaggtgccaggaagcgtcttccgcatcctgggtggcctcgatggtcacgttggggtcatggagcgcgtctgagagcttctgagcgctttcacgggcttctgcttccgtatcaaggtgaacttccgtgccgttggagatggcacgcagcacttccgagtcaatgaagcgggaattcacgctgatcgcgtcgttcgcagcctggtaggcgagcagaaggttatcgaggcgggtgccgcggatgccattctcgggagcgctcacaacgccgtccgtgaagagcacagcgtcttccgtcgcgatatcgcgcaggaagtgcgcgagttccttatcgtccttcagatagcgttcatccgacttccgggactttctctgaaccttgtagagcggcggctgggcgatatagacgtgaccctgttcaatcagctgcggcatctgacggaagaagaacgtgagaagcagcgtgcagatatgggcaccgtcaacgtcagcatcggtcatgatgatgacacggccgtagcggaggttttcaatattgaaatcccggtcaatgccggttcccagagccatcacgaggttcttgatctgctcggaatcgaggagcttgtcggcagaggccttttccacgttcaggatcttgcctcggagcggcaggatggcctggaacttggagttgcggcccaccttggcggaaccgcctgcggagtcaccctccaccaggaacagctcgcactcagaggagggcgtgcccttggcgcagtctgcaagcttgcccgggagaccgccgccgttcagcgcgctcttacgcaccacattacgggctttgcgggctgcctctcgagcttttgccgcagcgacaatcttttcgcagagcttctgagcgatatccggattttcttccagataagccgtgagttcggagttgataacctcttcaacagccggacggacttcactcgacacgagcttatccttggtctgggagctgaacttcggctgaggcaccttcactgagagaacacaggtgaggccttcacgcatatccagagggtcaagctcaaccttcgccttcttatccattccggcggctgaaatatagtttttcagcacgcgggtcatcgcgttgcggagacccgtcacgtgagtgccgccgtcccgctgatggatgttatttgtataagcgtccagaacttcgttgtagccgttatgccactgcatggcgacttcaacagagaccggaacatcctggctgtataccgtcttgatagcgtggaacggctccgggttcaccggggtgcggtcagcctgctcattcagatacttcacgaatccgcggacaccgttttcgctcttcagatcagcttcccggcccgtgcgctcatcgatcaggatgatgtgagcgcccgagttcaggaacgacagttcgcggagtcggttgagcagcgtgtcgtagttgaaatgcagcacatttttgaagatctcgctgtccggaaggaactcgaccagcgtgccggacttatgatcgggggacgggccgatatcctccatcggggaaatcgtcacttcctcccctgaagggagcttcaccgtttcgatcttgcggttgacgaccttgcccttctcaaaattcaggcgataagcccggccgtcacggtagacagtgaggcgcagccacgtggacagggcgttcacgcaggacacaccgacgccatgcaggccgccggagatcttgtagctgttctcattgaatttgccgccggcatgcagttccgtcagagcgatctcagccgcgctgcgcttcggcttatgcttgtcgtcgaatttaacttcgttcggaatgccgcggccgtcatccagcaccgagatggactcatcattgtggatggtgatcacgacatccttcgcgaacccggcgaggacttcatcaatagagttgtctacaacttcgtagacaagctgatgcagccctgaaccgtcgtcagtgtccccaatgtacataccggggcgctttctaaccgcttcaagcccttccagaatctggatcgaactggcgttatagccgctatcttcagttggggtctgttttaattcttcagtcataacttcttcaaataaggtccagggcaaatacccaaaaaatcaagtttttcttgaatgcgatcagagacgcatcggcatcaagacatacttgaagtcgtcactctcgggcatcgtgatcagagcagaaccctgaggaccggacagagcgatctttaccttgtcgttcttcagattgctgagaacatcggaaaggaagtcgatgttgaagccgatatcgatcggatcaccctgataatcaacagcaatattgtcgttgccttcttcctgatcagagttggagctctgaatggaaagcagaccggggctgagcagccagcgcacccccttgaacttgtcggaagcgagaacagccgtacgctgcagagcctgcagcagagcttcacggctgatcaggaacaccttgtcgttattcgtcggaataacgcgttcgtaatccgggtacgttccttcgagcagcttagtcgtcacttcaacgccattgaaggtaaagcgggcctgattggcagcgaaatcaatcttgaccggaatttccttgtcgtcatcctcttcagggagaaggcgcttcagttcgaggaccgccttgcggggaatcgtgacgctcacgtcttccgacacaacgctgttcttgtccggagtgatttcacagaaggcaagacggcggccgtcagtcgccaccgcgcgcacctttccgtccttgataacaagacggacggcgttcaggtagaagcggatatcctggttcgccatggcgtagtgaaccatggagaggatgtacttcagctgcttggcgggaatcgtggcgctgctggtgaagtcagcatcagggaagctcggatatttgtcagcaggaatggtctgaagcgagaagcggctgttctctgtgctcacttccatcttctgagagacctgattgccgccttcggcactgatcgccttgcgggccgcgccaagggaaatggttacttccgtgggcgggaggctcttgatcagatcctgaatcttccgggaagaaacggtgaatgcgaccggatctccttcctgttcaagctccgcatgggtcttgatctgaatctcaagattgctgccggtgaagctgactttgcttccgtcagactggatcagaacgttgctgagaatcggaacggtctgatgagtttcaataatgccgctcacggtcgtgagaggcgtcagcagagattctctagatcctttcagtacttgcattcttgatttcccaattctgagtgtgttgtgtgatttttataatcagaaattctgaaggttctgctcgagcacatgcagctcgtgattcagttcttcattgattctgcggtcgctttctatcttcttgcaggcatgaagcacggtcgtgtgatccttgccgccgaacagttcgccgatttccggatagctcttctgtgtgagcttcttcgacagatacatggcgatctggcgggggtaggcaatcactctcggacggcgcttcgagtgcatgtccgcaacacggatcttgtaatagtccgcgaccttcttctggatatcctgaaccgtgatttcgttctggctgtgaatcaggtcatgaagcgcggtccgggcctgatcaatcgagatatcgatgccgttgaagcgggcatgagcgatcacctgctgcagcgcgccttccagctcacgcacgttgctcttcaggtggttcgcgatgaagaaggcgacatcctcaggcagattggttccgctctgttcagccttcttcatcagaatagcttctcgggtttcgagctcaggaggatcgatcggcaccgacatgccgcctgcgaaacggctcttcagccgttcatccacatccttcagctgcttcgcataggtatcgcttgtgagcacgatctgtttgccgtggggcaccagagcttcgaaggtggagaagaaggctgactgcgtgccttccttcgacccgagcatctgcacgtcatcgagcaggagcaggtccagagacttgaagcgctgatagaagctctggtcctttcgcgcgattcccttaaggaattcagcaatataggttgtggcgctgaggcagaggatcttcgccttgggattgcgcttcagtacggcgagaccaatggcatgcatcagatgcgttttgccgaggccgacgccgccgtagatataaagcgggttgaaggctttggttccagggttattagcgacataggtggccgcgccgagcgccactttgttgctcataccctgaacgaaattctcaaaggagagcgagctgagaagtccacaggattccgccagctgattgaaggaggttgaatcctgttccacgacgctgctgctgggggcaggggcttcgactttcggctctctcacaatccatttgacagtgaccgggctgtcgttattggcccgggtagcgtggaacgtgatgatgtcggagtaggtcgacctcgtcacgtcccgcttctgggcgctggccgctgagagaaccagttccccggactgggggtcccaggactccatctgcagcggggcaatccaggtatcgaacttgtcgctgctgattcgtgcatccagtcggagcagatcgcagcagttttgccaaaaatctttcatttacggttatttagcgtgtaccccatatatagggtactgctggagtgaaaactttttcttccgcttatattcccgtgggtaattttggggaaaaaacgaaagtacgggaaagttattctaccagttatccacaggtaatgtgtccgtcagaagcctaagaaattctgaaaaatcagttcttttttattccggcacaataagttcagtacaagaaatcaacaagaccactagagcttgtgggtttcatgaatgtgatcgcaaaaacggattttctacggataaactcttgttttttcagcttgacagtcagagctaatttgatgtgtaatatcaggatttcacgagtgtctccctgaaaaattgccgggagaccttcattccgttcatcctgccctcagttatcaggcagttttacatttttgaattgaagagtactgcctcaagggcactattcgtttcagcttagaaattttaaggattcatcatggctaccaagcgtacttatcagccctccaagatcaagcgtgcccgcactcacgggttcctggtgcgcagccgcacgagaggcggccgcaaggtgttggctgcccgccgtgctaagggccgtcataccctcgcactttaatcgtggcatcacggcagggctaagccgtggaagaatcgttgccaataagaagttcactaccccgtagaggcagattgataaagtctgcctcttatggggttgttttgtcttctcgcggaccaaaaacggtacgtttgtcgtcgcggtggctgactctgaccgcattgctcaaacctgaatccgaaacgggtgaaagactgagattcggtttcactgtcggcaaagccaatgcccacagaggcgtggaccgggtgcttgtcaaaagaatccttcgggaatcggcaagactctccaagcctgcattggcgcaatcgaatgtctgtgcggatgtcgtgcttcgcctgaagtgccgtctgcccaagctgggagaagatgtcgtcctcggaagtttcaagcaggaactgcgccaggattgcgatgagcttctgctcagatttggcgggatcgtaaaaaaagccgttcaggacgcctaatgaagtttctgctgattaaactgatacgcctttatcagttgtgcctttctccttggctaggcagacagtgtcggttcactccgtcatgctctcactacggtattcaggccatattgagattcggcgcactccgtggcagttatctgacggttatccgcattttcaaatgcaatcccctgggtccctggggatatgatcccgtacccgagaaattccactggaatttctggaaaaaacggtaaacggcctttatcaaccaacatttttttgttagcgagcgacctgttatgggaagtgatttcaaaagaactttactttgggttgtctttctgtcatccctattcatgctgtgggatagctggcaggtttacaacggccgtccgtctttcttcggtcctgcgcaggagcagagcgctgcggcttcgtccgctgcggcttccgccggatcgattcctgcctcggctcaggcttccgcgaatgctgtcaatgcgtccgcggacagtgccgagagcgtgaagccggtcaatgttcagacggatctgatgaagctcacgtttgacgaacagggcgctagcgttgttcgtgctgagcttctgaagatgaaggagcttcccaagtggaatgaagtcggtctcgttggcctcattctcggcaacaaggaagctgagcacaacaacgttgtgctgtttgatcactccaaggatcgcctctatgaagcccagagcggtgtgatcggcgttgctgacgctcccacacacaagacggttttcaagctgcaggacggtccgctcgtgatgaatccgggcgacaagacgctcagcgtgcgctttgaggctgaaagcggcggcgttaaggttctgaagacctataccttcacggctgaccactacggcatgcaggtcacccaggaagtggtgaacggtacggataagaccatcaatccgtccatctactaccagctggtgcgcgacagcaagccggccccgggttccaattccttctccagcagctatctgggtgccgccctttatacggcccaggataagttccagaagattaccttctcgaacatcgcggataacaagaaggactatccgtccaaggcgaataacggctgggtggccattattcagcagcacttcgtgtccgcctgggttccgaaggaaggtcttgagcgtcagttctatacccgtcagattgcaagcgatgaatacgccatcggctccattgttccgatgggagacatcgctccgggggcttccaagactgaacagtccacgctgtatgtcggtcctcaggctcagaagcgtctggctcagattgctccggggcttgatctggtcgttgactatggctggctcacgttcctcgccaagccgatctactggctcctttcctggctgcatggtctgaccggaaactggggctgggctattgtgctcctgacggtgatcgtcaaggcgatcctttatccggtgtcggctgctggctataagtcgatggcccgtatgaaggaccttgggccgcgcatgaaggaaatgcaggctcagtatggcaacgataagcaggcccttaaccaggccatgatgaagatgtaccgcgaggaaaagatcaacccgatgggcggatgcctgccgattgttcttcagattccggtgttccttgctctgtactgggtactcctcgcttctgtggagcttcgcggttccggctggattctgtggattaaggatctggcggctccggatccctggttcattctgccgctcatcatgatggcgacgatgttcatccaggtgaagctcaatccgaagcctgctgatccgacgcaggccaagatgatgctgatcatgccgctcgtcttcagcgtgatgttcttcatcttcgcttccggtctggtgctgtactggctgacgaataacattctgtccatcgcccagcagtggtgggtgaacaagcagattgatgaagaaagagcaaaacgcaaggctgcgaaagaagccaaaaagaaatcttcttaaatgattgattaaaagcgtttcgcagcaggtaaaagggggcattatctaatgtcccctttatttttttcggatcggactctcagaactatgagctctcaggaagaaggaatcattgctgtatcaacagcggttggccgaagcggcatcggtatagtcaggctttccggcagtgagaaactggctcgcttcatgctggaacggatgacggatatccggaatccgtcgccgcgctatgcccatttttcagccatccgtgatcaggcaggggaggtcattgaccgcggggttgtgatctggttcaaggctcctcactcctacacgggggaagatgtcgttgaatttcagacgcacgggaacccggttatccagaatcttctgatccgaagcgctctgctgatcggagccgaggccggtctccgtctggctgaaccgggggaattcacccgcagggcatttgaaaacgggcgcatcgatctcgcgcaggcggaatccgtgatggatctgatcaatgcgagttcagagagcgctgtgagagctgcggagaaatcactggtcggtgagttctcggaaaagtgccgggatatcgaggggaaactgattgatctccggacgcatgtggaagcgattctggattttccggaagaggatatcgactttatcaaagaaggcagaatccgcgagagagtcgacgatctgaatcagagggtcggtacgcttctggagcaggcgagccagggcaatatgctgcgggaaggcgtggtgatcgcactggtgggaagcccgaatgtcgggaaatccagtcttttgaacagtctttccgaaagggaagtcgctattgttacggatattcctggaacaacccgcgatattgtagaaaatacaattataatcaatggtttacaagtaaaccttgtcgacacggcgggtcttcgggaaacggctgatgtgatcgaacaggcgggaatcagaaaagccatgggagagctttcacgggcagatctgattcttcatctggaggctccggaaacactcgatagccaggccgagcttgataaaatcaaacaccatgttcagccagggaccaaagtcattacggtgacgaataaaatagatcttctccgtgatgttcccggcaatacggattctcatgtctatatctcagcgaaaacaggagaaggcattgagaagctgaaaacgatgatttttgacgcagtgggtttccggaattctgtccagggtgtttttattgcccagcgtcgtcatattgagtctcttcagaaaacaaaagagtctctggaaaaagtcagagagtatctttcccaggatcagtttttcctcgacatggtggctgaggagctgcgtcttgcgggggtttccatggggcagattcttggtgaatttacttccgatcagctgctcggaaaaattttcagcactttctgcatcgggaaatagttcaccgtacagatgcaatgtttcacgtgaaacaaaagacagggtctcagtttttgatctctgaaatgtttcacgtggaacaaaacgatttaacactgaattattcattcgatatgttccacgtggaacatattcatttttcaattttagagggaggggagaccggtcctgtttcacgtgaaacagtgccgcaggtcttctcatagaaaatggattttccaaaggtctacgacgtcatcgtggttggcggcgggcatgccggtatagaagccgcctttgcttcggctcgcatgggatgtcagacgctgcttcttacgcacaacattgaaactctcggagagatgtcctgcaatccctctatcggcggtatcggaaagggacatctggtccgtgaaattgacgccatgggcggagcgatgggaagtgctgctgatatgggcggcattcagatgcgcacgctgaatgactccaaggggcctgcggtccgatcaacacgcgcccagattgatcgcaatctttataagatcgcgatgcgcggcaaactggaaaatcagaaaaatctggatattttccaggaggccgcggatgatctgatcctggaggcagataccgtcaaaggtgtggtatctaaaacgggtgtcagattcttcagcacttcggttgttctctccgcggggactttcctccacggtcttatccatatcggtctgcagcactatcaggcaggacgcatgggcgatcctgcgtccatcagtctcgctgagaaactgattgaaatcggcatgccgatggggcgtctgaagaccggtacgcctccccgtatcgatggaaagacgatcaatttcgcggagtgcgagcgtcaggacggaatgggggataaggttccttatttctcctgggatcagtccgtggctcatcccgaacaggttccctgctggatcaccagaaccaatccccgcgttcatgagattattctggcaaacctggatcgctctccgatgtactcgggcgctattgtcggtgttggcccccgttactgcccttctattgaaacgaagattgttcgattcaaaggaaaagacagccatcagatattccttgagcctgaagggctgaataccaacgtttactatcccaacggcgtttccaccagtcttccgttcgatgtccagattgaaatggtccatgccatgaagggactggagaacgcttacctgatgcggccgggctatgcgatcgagtatgactattacgatccccgtgacctgaagcggtctttcgaaacgaagaagatcagcaacctcttctttgccggtcagatcaatggaacaaccggttacgaagaggccgcggctcagggcctttacgccggcatcaatgcagcgcttcgcgccaaggggctcgaaagctgggtgccgaggcgcgatgaagcctatatcggcgtcatgctggacgatctgacgaccaagggggtgtctgagccctatcgtatgttcacgtcccgcgctgaatatcgtctgagtctccgtgaggataatgcggatgtccgtctgaccccgaccgctcacgatcttgggctgatttccgacgctcagtggaagttcttctgcgagaaacaggaacacattgcaaaggaaagtgaacgcctgaagtcgacctggatacacccgactgatctgaaagaaggggaggctatccgtgtcttcggtgtgccgattgagcacgaatactctctgaagaatctgctttcccgtccgagtgtcacctaccagaaactcatgacactggagcttgctgatggcacccatgtgggggatgcgtctcccgcgatcactccggacgaagctgagcagattgaggttggcgtgaaatacgcaggctacatttcccggcagcagggggaaatcgagaagaatctccgcaacgaaacgaccaggattccgtctgacttagattatgattcggtacacggcctctcttttgaggtgcgggagaagctgaaggaataccggccggaaactatcggtcaggcaagccgaatttcaggagtcactcctgcggccatttctctgctcattatttttctttctaagagcaagcgtgaaagggaaggtgccaatgctgaatgagagcgcaaaaaacagtctgattcagggagcgaaagatcttggagtgtccttgaacgagcatcaatttaatcagcttgatgcttacttggagcttttgcttaaatggaacaaggtttttaatttaacctccatccgagatcctgaagagggggtgaaaaagcatcttctcgattgcctgggtatcattccggtattggagaagatgcagcggcagggactgccaatgcggtcactgatggatgtgggatccggcggcggtcttccggccgtagtgatcgcggtctgcttcccggaactcaaagtgctttctgtcgatgctgtcgccaagaagacgaccttcattactcaggcagcgcttgaactcggactgaagaatctgcgggcaaaacattcgcgggtcgagaatatcaaggaaaaatttgatgttgtcacctgccgggcattttcatcactgaaggattttgttagccttacagaatccaatattggtgaacccggaatgtggctcgccatgaagggacgcagacctgatgccgaactgcaggaactgccgtcttttgcagaggtcacggaagtgatcgaccttcatattcccggtcttggtgaagagcgttcggttgtgctgatgcgccatatttaatatagagcgtcatcagagatcctcaccggtcaatcgattcagatgagcggctgaaaaatggaagacgtcgtcaagtcttttctgtttgtgtttgcgacttttctcccgatcattgatccgttcgggggagccatgttctttctgtcgcttacgccaggcgcaagcgatgaaatccgggcgaagattacagaacggatggcgatctacagcctcattgttctgttggtgtcgctttttgccggccgtgtgattctgtcgttttttggaatctctgtcccggttctgcaggtaggcggcggccttgtgcttctgtcctccggatgggaggcgctgcatgcgccgacccttgcagaagctaagaataatgcgagtcaggtgagaaaaagtgatgaagctttgctctccatggctttttatccgcttaccctgccgctcgtgacaggacctggaaccattgcctctgcggcggctatcggttcgagtctttccggaagcatcggcagtatcgtcggaagtgtgcttgcttccgtagcgatgacagtgcttacgtggttctgcttccgctacagtgacaaaattcctaaggctcttggggccgccggcgctgacgcgctgtcccgtctcttcgcctttattttgatgtgtctcggcgtgggagttctctggcagggaatttccgggctgattatgtccttgcccaaatagtttatagaggaaagaatggcaaaggttttttgtgttgtgaatcagaagggtggagttggcaaaacaactacctgcacaaatctcgcggcagctctgtcgcttaaggggaagcgtgttcttctgattgatctggatcctcagggcaatgcgacaacgggcagcggcgtggataagaggagcctcgagcagtccgtttatcagctcattctcggcgaggcatcttttgatgatgtcgtggttcggtccaaggaaaaaggtttttatgacgtgcttcccgcgaaccgggatctggcaggcgctgaggttgagctggtcgacatggatgaaagagactatcgcctccgccatgcgctggagcctcagctgaaaaactatgatgtggtcctcattgactgctccccctcgatttcacttttaaccatcaacgcgctttgctgcgcccatggcgtgattattccgatgcagtgtgagtactacgcaatggaagggctgactgatctggttgatacggtgaagatggtgtaccagggcaagaatccggatctcacagcgatcggactcctgcgggtcatgttcgatgcccgaatttctcttcagcaggaagtgagtgagcagctgaaggagcatttcggaaatcgggtgttcaacactattattcctagaaatgtccgaatggccgaagcgccgagttacggcaagccgggtgttctgtatgatccttcatccaagggggccaaggcttacaaagcttttgctacagaaattctgtccaaactcaagtaagccggtaaaaaaggagggtatatcgtggcgataaagaaaaaaggactggggcgcggactgggggctctcggactggaaagcccgaaggaaatttttgagtctcagccttcccagaaggatcatggcgaagaggcgggtgcccgcctgacggaactgagtgttgagcagctccggccaggtaagtatcagccgagaacgcatatggatccggagtctattgcttctctgtcggcctcgatcaagtcccagggactgatgtctcctctcattgtgcgttctgtcggagaaggacagtgggagatcattgccggcgagcgacgcttccgggcggcaaaacttgccggcctgaccaaggtgccggtgatcatccgcgaggtgcctgataaaaaagcgctctccctctctctgattgagaatatccagcgcgaaggtcttaatcccatcgaagaagccaacggtatgagccgtctgatgcgtgagtttgatatgactcaggatcaggtggctgaggttctcggcaagagccgtcctgcggtggcgaatacgcttcgtctcctgaagctcacgcctgaggttcagaatctcctcatgtctgagaaaattgacatgggacatgcccgtgctcttctctcgctgaaagaagctgatcagatcgcgcttgctaacgaagtggtcgcaaagggatggtctgtacgcgaaaccgagcgtcaggttgccgctctcctttcggatgacaaaaagaagcccgcgaagacggttcacaagaagggccgtgatgtcattcgtatcgaagaatcgctctccgacacactgggggcggaggtgaagcttgcgtctgaaacccgggagaaaggccgaattgttatccgttacagcagtcttgatcagctggatgggttgctcgaaaaactgggttatacctcataattggtataaaaagtcaccaattgtatctatatcaaaaggctctttaatacttaaaaatgctagttgttgaaacaattgcgcacacttacaatatgctggttttatgaagagcttatggcgtgggcaccgccctgattttttggttcaggaactggtgatatatggggtgtctagcggaataacaagcattgtctgcctgttaatcgggggactcaatgcttttttgtcgtctctaatcgcttccgcgatttatattttgccttcctcagccttattactgattagcaaaaggctaatgcggaccagtcctctcgtcggagctcaaatatttcagattgggttgtttgcaagaacgttcctcactaccatcctgatggtcgttgtggcgcttgtttacaaagaactcaactggccggcttttctgttgtccctgtttatagtggttagcgctcctatggcaggtcagcttttactaaagagataaggatcgacatctatgtcagctgatggcgctctcaatgcgaccgggtacatacggcatcaccttgccaacctcgcgtcggcgcaccagagttcgattgttgatttttcagtcatcaattacgacactctgtttttctccatcgcaatcatgggactaaccctgtggctgctttacaaggcggctcacaaggctactgccggcgtccccggcaagttccagtgtgccatcgaaatgctggtggaatttgtgaatgatcaggccaagactctggttcatggcgatcgttcctatattgctcctctcgcgctgaccgtcttcatctgggtcacgctgatgaactgcatcgaccttctccctgtcgatctgatcccgatgatcgctggctggcttggttttgaacatatgcgtccgctggctaccgcggacctgaacggcacgctcggcatctctgtcggcgttctggttctgatgatttactacggcttcaaggcgcacggtgtcggcggcttcttcaaggggctggtgactgctccgttcggtgcgaatcctctgctctggccgttcaatctcgctctgaacattatcgaatatctcgccaagtgcgtttccctgggcatgcgactgttcggaaacatgtatgctggcgagttgctcttcttcctgattgcgcttcttggtggttatgccttcagcttcggtctgctgggcggcaccctgagcgtgtttgggcagattgtggccgggcttggctggtggctcttccacgttttgattgtgctgttgcaggcattcatcatgatgatgctgacgctggtttatctgggtcaggcgcatgatagccactaacagatctattttttctttatctttcttactctaaacaaccttcgtttttgaagatctcaaggagtttttttaaatgactaacgttgctatcgttgccctggcttgcggcattatcatcggtctgggtgctatgggtgcctccatcggtatcgccatcatgggctccaagtacctcgaagcctctgcccgtcagcctgagctgatcgatacccttcagaccaagatgttcattctcgccggtctgatcgatgctgcttacctgattggcgtcggtattgccatgatgttcgctttcgccaatcccttcgtcggctaataaaagtagttaccaaattacgttttagctgacttgttgaataggtgtggcatatcgcctcatcattcaactctacgggactcaataatgaacattaacgcctcacttttcgttcaattggtcgtgttccttcttggtgcttggatcaccatgaagtacatctggccgccgctgattagggcaattgaaaatcggcaaaagaagatcgctgagggactgagggctgcagatctgggacagagtgccctggtcgaagcctcgcagaagcagcaggctatcgaaactgaagcccgagctcaggctatgacgattgtggctgatggcgagaaacgtggtcagtctatcgttgagcaggctaagcagcaggctgaagttgaagccaatcgcattgttcagaccgcgaaggacgaagcggctcaggaaatgcagcgtgctaaagaagctctcagggatcaggttgctcagctggctatcgccggtgccgagcagattttgaagcgtgaagttaacgcagatatccataaggatatgcttgatcaactgaaggcgaagctttagtcatggcagagatttcgacaatagcgcggccttatgcaaaggggctgttccaggcgcttgaagatcgtcacgcatctatcgaggaatgcaaggctgttctgaagactctggagaatatctccaccgtcatcaagactcctgagttttctcagctgtttggagatcctcgcctgcttcccagtcagatgattgatctgattaagagcgctcttgcaggagaggaaattcagaaagaagtttctaatctccttaccgtcgttctcgataatggtcgaattgaagcttggtccgagatcgttaatgacttccgcacgctcattaacgacgcggagggtattgccgaagttcatatcgaaaccgctttcggtatgaccgacgatgaggtgcaaagcctccttaaggctcttgcccatcgcttccccaacaagaagcttgtgtctgatgtgaccgtcaaccctgagttgatcggtggcgtccgcatccgtgttggagaccaggtcttagatggttcgatcagtgctcgtctcgaagcgatgaagacggcccttaccgcataaattccggagctgaataatgcaactcaatcctagtgaaatcagtgatttgctgaagaagcggatcgaagaccttggggtctcggccgatcttcgtacgcaaggcaccgtgatttccgttaccgacggcattgtccgtattcatggtctttccgacgtgatgcagggcgaaatgctggagttcccgggcaatacctatggcctggcaatgaacctggagcgtgactccgtcggcgcggttattctcggtgaatacacccatatttctgaaggcgataccgtccgtacgacgggtcgtattcttcaggttcccgtcggccctgagctgattggccgtgtggtcaacgccctgggtcagccgattgacggcaagggcccgatcgatgcgaaggcctacgacgtggtcgaaaagatcgcccctggcgttattgaacgtcagtcggttgatcagccggttcagaccggtcttaagtccatcgacgccatggtgccgatcggccgcggtcagcgtgagctgatcattggcgaccgtcagaccggtaagacggctgtcgctctcgacacgatcatcaaccagaagggcaagaacctgatctgcgtttatgtcgctattggccagaaggcttccacggtcgcgaacgtcgtccgtcagctgactgagcatggcgccatggactacacgatcgtcgttgccgctacggcttccgatacggctgctctgcagtatatcgctccgtacgctggcgccacgatgggcgagtacttccgcgaccgcggccaggattccctgatcgtttatgacgatctgaccaagcaggcctgggcctatcgtcagatatccctgctgcttcgccgtccgccgggacgtgaagcctacccgggcgatgtgttctatctgcattcccgtctgctcgagcgcgctgctcgtgtgaacgccgaatacgtcgaacgcttcaccaagggcgaagtgaagggcaagaccggttccatgaccgctctcccgatcatcgaaacgcaggccggcgacgttaccgccttcgttccgacgaacgtgatttctattaccgacggccagatcttccttgagaccgacctgttcaacgccggtattcgccccgctatcaacccgggtatttccgtttcccgagtcggcggtgctgctcagactaaggtcatcaagaagctcggcggcggtgtccgtctggccctcgctcagtatcgtgaactcgcggctttcgctcagttcgcctctgaccttgatgaaaccacccgtaaagaactcgaacgcggtcgcgttgtgacggaactgatgaagcagccgcagtatcgcccgcttcaggtttgggaagaagcactggttctgttctccgtgaacatcggcttctatgacaacgttgctgtcaaggatgccctccgtgttgagcgtgctatgcgcgacttcatgcaggaacatcacgccgatctcgttggccgtatcgaagacaagaaggtcctcgataaggacgacgctgccgctctcgaagctgcagtgaatgagttcaagaagaacggtgctttttaaagcgtagtaagcgaccctagaggacccaatgcccagcacaaaagaaatacgcatgaagatcaagagcgtaaacaatacgcgcaagatcacgaacgcgatgcagatggtggcggcctcgaagatgcgcaaggcgcaggaccggatgtttgcggctcgtccgtatggctcaagaattcgtacgattatttcgcaccttgcagcctccaatacggactaccatcatccgttcctcgcttcgcacaatgacgccaaaaaaatcggtcttatcctgatcacgacggataagggcctggcgggtgctttgaataccaatattctccgtgatgtactggctaccattaaaaagtgggatgccgaggggaatgagcttttcgcttctgctattggtaataaaggcctcggttttctgcagcggttgggtacgccggtgcagagtcaggcggttgcgctgggcgatcagcccaacctcgaccgtctgattggtgccattcgagtccagattgatgcgttcgcaaagggtgaggtgtctgctgtttacctcgcctactcccgtttcatcaatgcgatgaagcaggaacccgttatcgagcagcttcttccgcttccgaagaaagcagttgatgcttctgaagacgaaactgccgacaagcagtactcctgggactacgagtatgagcctagcgctcctgcagtccttgatctgctgctgaatcgttacgttgaagctcttatttaccaggctgttgcagagaacatggcttctgagcagagtgcccgtatggtggctatgaaggccgctacggacaacgcgaagaaactctccaacgaactgcagcttgtcttcaataagacacgtcaggccgccatcacgaaggaaattactgaaatcgtgggtggtgcggctgctgtgtcttaacgctaggatttgaaactgaggattatccaataatgaatatcggacaaatcgttcaggtcatcggcgctgtggtggacgtgcagttcccgcgcgatcagatgccgaaggtctacgaggctctcgttcttgaaccggacgagaacaataagctcgccgagcagggtttgacttttgaagttgaacagcagcttggtgacggaatcgttcgctgcatcgccatgggttcttccgatggtctgcagcgtggcatgaaggtgcacgccactggcgcggaaatctccgttccggttggtgaaggcaccctcggccgcatcatgaacgttcttggcaagccgatcgatgagatgggcgagatcaagaccgatcgcaagatgccgattcaccgcgaagccccgaagttcgacgaactgagcccgtctgttgagctcctggaaaccggcatcaaggttattgaccttatctgcccgtttgccaagggcggcaaggtcggtctgttcggcggtgccggtgtgggcaagaccgtgaacatgatggagttcatcaacaacatcgctaaggcttacggcggctactccgtgtttgcaggcgtgggcgaacgtacccgtgagggcaacgacttctaccacgaaatgcagggcgcgaaggtgctcgataaggtggccatggtgttcggtcagatgaacgaacccccgggaaaccgtctccgtgtggctcttaccggtctgacgatggctgagtccttccgtgacgaaggcaaagacattctgctgttcatcgataacatttatcgttatacgctggccggtactgaagtgtccgctctgctcggccgtatgccgtccgccgtgggctaccagccgactctggctgaagaaatgggcaagcttcaggaacgtattgcttccacgaagactggctccattacttccgtccaggccgtgtacgtgcctgctgacgacttgactgacccgtctccggctacgaccttccagcacttggacgccacgatcgtgctgtcccgtgatattgcctctctcggtatttatccggccgtcgatccgctggactccacgtcccgtcaggttgaccccaacatcatcggcgaagagcactatcagacgacccgtcgcgttcaggaaaccctgcagcgctacaaggaactccgcgacattatcgccattctgggtatggacgaactggctcccgatgacaagctcacggttgcccgcgcccgtaagatccagcgctttatgtcccagccgttccacgtggccgaagtgtttaccggcaaccccggcaagtacgtgcccctgaaggaaacgattcgcggcttcaagatgattgtcgatggcgagtgtgatgaactgcccgaacaggcgttctacatggtcggtacgatcgacgaagccttcgagaaggccaagactctgaagtaatcaaactcgggctggatccgatggatccagcctgaaccaacagcggggctacttaatgaaaactttgaaagtagatgtcgtcaatgcggaaaagacggttttttccggtgacgcaaaattcgttgctctgcccggtgttgaaggcgaattgggtgttcttcccggtcatgtgccttttattactcagatcaagcctggctttgtcagagtaactcttccggaatcggatgaagtaaggcgcattttcgtggctggcggcattcttgaagtgcagccgaactccgtgaccgttctggccgacactgctgtccgcagtgaagatctggatgaagcgaaggccaagaaagctctcgaagatgccaaggcaaagcgtcagaatgcaactggttctctggaaattgctcgactcgaggccgaaatgctggcccttacggccgagctggcagagatcaagaagttgtctggcaagcgctgatcagtgctgatcaacagcgagcgaacggggcgaaagccccgtttttttttaccggatccggtttggcccttctggtaaagtatcttcacatttgaccattcggttatagaaatttcaggtgatctccccatgacagaacttattaatgacaatcttctcaaggcgttgcagaaggaacccgtgccctatacgccgatctggctgatgcgtcaggcaggacggttccttccggagtaccgggcaacgcgcgagaaggcggggagcttcctgaatctggcccattctcccgaatacgccacggaagtgacgctgcagccggtggatcgctttgatctggatgccgcgattctcttctccgacatcctgacagtgcccgatgcgatggggcttggactgaaatttgttccgggtgaggggccggttttcgaatctccggttcagagtgaggaagcggttgcgaagcttcacgttcccgatgtcggaacggatctgaagtatgtgacagacgcggtgtcgagcatccgcagcgcgctgcagggacgggtgccgcttttcggtttctccggcagccccttcacgcttgcctgctacatgattgaaggacgcggcagccgcaatttcttcaccgtgaagtcgatgatgtatcgccgtccggatctgttccagaaggttatttcagtgaatgagaaggcggtgactgagtatctgaatgcccagatcgaagccggcgcgcaggcgatccagatttttgatacctggggcggctgcctcgcggacgggctctatcagcagtattcactcgcgagtatccgcaacgtgatcgcgaatctgacgcgcgaacacgaaggccgccgcgtgccggtcgtggtcttcacgaagggcggctcagtgtggctgaaggatatcgcctcctgcggcgctgacgccgtgggactcgactggacgatgaaccttgcccgtgcccgcgaagaggtgaaggaccgggtcgcccttcagggcaatcttgatccggccgtgcttctctctgatgagaagacggtgcgcgaagaggctcgtctcgtgctcgatgcctatggtcctgtcggccagggcggtcatgtcttcaatctgggccacggtgttgatctcaatacaccggtggaactcgtccatgcactcgttgacgaagtgcatcactacagccgtcagtatcacatctgaaaacgatgaccgtttcggagcagttcgcaagagtcattgttgatgtgccgggtctgccggagctggactataaggtcccggcggaacagcttcttgcggtcggcgatatcgtcatggttcctgtcggacggcagcagaaggcgggaattgtgacggggctccggccctggaccgatatcgagaacaaaagactgcggtcagtgtccgcagttcgattcgggattccgcctctctcctccgaatggctgtcgctcacacgctttgcctcgcactattactgcaggacgtggggtgaggtcgctataccggcgctgcccaccttcttcagaaagaagcccggcgtccgttatcagtcgtctcttgaaaaaatccggacactgccggctccggaaaaaaatcctgccccggctccggcactggatctgaatcctgaacagaaagacgcgatagcagcgattctgacggcaaagggcttccagacctggctcctgttcggggtgacgggttccgggaagactgagatctaccttcaggtcatgcgccgggtgctcgagcagtcacctcagaatcaggtgcttctgctggttccggaaatcaatctgacgccgcagctcgaagagcgtgtccggagccatttcgcggatgaatctgtcgtcgtgctgaattccgatcttccggacgctcagcgggcgagatcctggctggcagtccatgaaggccgggctaggattctggtcggcacccggatggccgcgctcgcgagtttcaggcagcttgcgctcatcgtggtggatgaggagcatgacctttcctacaaaggcggggacggcgcgcggtattccgcgagggatctttctgtgaagcgcgcccagagtctcggtatcccggtcattctggggtctgccacgccgtcacttgaaagctggtcccgcgcgagaagcggaagctaccggcttctcacgctgtcccataaggcggtttccaaagcggagccgccgcggcttcgtcttgtcgatacaaggacgctgaaaaaaggagaggtgctttccgaagaggtgaaggaagcgatcggggcaacgctgcagaagcatgagcaggtgcttgtctatatcaaccgccggggattctctccggtgctgatgtgcccgtcctgcggctggaagtcggcgtgcccccactgctccgcttttatggtctttcataaagacacgcgaagcctggtctgccaccattgcggctatacgcagcgggttccggcgcgctgcccggggtgcggcgcagccgatatcctcccggtcggtatcggtacccagaggattgaagaggaaatcggaaaactctggccagacgcccggcgtctgagaattgaccgcgataatttcaagaccaagcgcagcaccgataaagcctttcaggatgtgcatgaggggaaggtcgatatcctgatcggaactcagatgatcgcgaaggggcacgacttcaaaaaggtaagcctcgtcgtcattctgaatattgacagtcagttgatttcgactgatgtcagagcccgggagagagcattcgcgacaatgatgcaggtgtcaggccgcgcgggccgtgccggcctgaagagcgaagtgctggtcgaaaccgcctttccggatgatgagatcttcactttcctcgcgcaccaggattatcagggctttgcggaccagatgctgaagatcagaaagagggacggggcgccgccttttgtgtatcaggcgcttcttacctctgagcagaaggagctgccccaggcgcttgagcttctccgtcacgcggtggagaccgggcttgaaattcagtcgaaactgccggacgggggcggcgtcgcgatttatgatcccgtgccgatgacgatcgttaaagtggctaaccgaaaccgggcccagcttctgatcgaaggaaggacccatcgggagctgctgcagttcctcagagcatgggttcaggtgatcggtccctgctcgggaggcgccctcacgcttgaggttgatccgcagcggtattaaaaaagaaattcgcaaaattctccaaatatccctataattaacttctctgtgcctccgtagtgaaacggatttcacgcagccctccgaaggctgaattgaaggttcgactccttccggaggcgccaggtcacctgaagtcgtctcttcaattttccccttgtttttcaatgtcttccatcagggatacggctgtatccggaatcttcgtacctgaaggatctgctcctgccggagcttggctgaaagggatccgtgaatttcgttagactctacgagcgtaattccgcatcaatgagaataaatttctgcaggccgcatgactgaaaaaatgccagatcaaaaaaatacgggaaagaaccagacagactttggcttcgccgaagtaaaagaaaccgacaaggaagagaaggtccgcgaagtctttgattccgtcgcgccgaagtacgatctgatgaatgacgtgctgtcatttggcatgcatcggctctggaagcatcacacgattgccaaagcgggtgttcagaagggatggaaagtgcttgatatcgcctccggcaccggggacctggcgctgaagtttgctcagaatgccggtccggaaggggaagtgtgggcgactgatatcaatcacgagatgctcaggctcggcgcacagcgtttccgccaggagggtgtcaactgccgcgtggcgctctgcgactgcgagcagctccctttcccggacaacacttttgatgttgtaacagtctctttcggtcttcgcaatatgacacacaaagaccgggcgttacgggaaatgtgccgggtgaccaaacccggcggacgcgcgatggtgcttgaattctcgcactgcgaccgctggcttgcacctttttacgatttttactcttttaaatttatgccttggctaggatctaagatagctggcgatcacgacagctatgagtacctggtcgagtctatccggcgctttccggcccaagccgaagtggctgagctcatgaagacggcaggattctccacggtcacgtgggaaaacctgacgttcggcatctgcgctctccatatcggcaggaaagcctgacgttgcaactcactggtttgggctcattttttcttaattaggaaaggatatgaagaagtttttcccccttgtggcagcaggaatcatggcgctggctctggtcaccaatgcagatgcggcgcggcgtttcggcggcggcgcgagcttcggccgtccggccccggcgcagatggccccggcgggtaccgctcagcttcctcgtagcactccgcagcctcaggctgctcctcagcagcagagacctgctcctgccgctgctccgacccctgcggctcagccgaagccggccagcccgatccgtaacatgctgatgggcgccgccgcggcgctcggcatcgcggctctggctcactacctgggtcttggatccggttttgccagcattctgatgctgatcctgatcgctgttgtggcgtttgccgtgctgcgcttcatttttgcccgccgtcagaccccggttcagcgttccgctgattcgaccggtacgctttccggcatgaattatcagcacgaggagccgccggcggctgcccccgcgcctgccgctgaaccggcgcccgctgccgctccggccgctttccagagcaatgcccgcccgggttctgtcctggatgagttctcccagaaggctgcccagagcacgattccggccgggtttgatgaaaccgctttcgtcgctgaatgcaagaagaacttcacccggcttcaggatgcctggagcaccggcaacgtgctgcagctgagcgagttctgcacggatgaagtcttcacggttctcacgcatcagctccgcgaccgtaagggtgaagagctgaagatcgcggttgagacgctcgacgccaagcttctcggcgtgatcacggaaggcagcgagtatgtggccgcggttcactttaccggccgactcaaggtctccggcggcaatacggatgagattgaaaacgtgaacgaagtctggtcgcttacccgcccggttgagaacggaaatcagggctggctcctcgctggaatccagcaggtcgaagcctgattttcagtacgtttttccgcaagaaacccggcagaaaaatctgccgggttttttcttttgaataagagtaaaaatatgctgaggaaacacagtgttctgcacgttttttgatcgctgccatcccctatttttttcactcatttcctaaagtttgatctcgatgaaactttgggacatttttcggggcatttggggcctcagcgggttcacatttttcgtgtgattcttaaaatccacgcacgcttttattaggaatattttttccggcaactcttcgtttttcacgggggatatggggcaatgtctctgattggttttgtaatgctctatatggccgtttccatcggaatcggtctctatgccgcaactcgcgttaaaacgacgcaggactacgctcttgctggtcgttcactgccgctagccatggtaattactgctacgttcgctacgtggttcggctctgaaacggtgctgggtcttcccggtcgttttattgagggcggaattgccggagtgatcgaggagccgttcggctccggtatggcacttattcttgtcggcgcgttctttgccggcaagctctacaagatgaaccttctcacgatcggcagcttctaccgccatcgctatgggaagggcgttgaactcgcgtgctcgattttcatcatcctctcttacctcggatgggtggcggctcaggtctccgctctcggcctcgtgctgaacctggtaacggaaggtgcgatttcggtgacgctcggcatggtgatcggtacgctggtcgtgctgctttacacgatgtacggcggcatgtggtccgttgcgctgactgacttcttccagatgattctgattgtcgtcggcctcgttgtgatcgctttcgtggcgggtgacatggcgggcggcgcggataaggtgattacctacgcgaataaccgtcatcttttccacgcgcttcctgaaatgtcggttcacggctggctcttctggatttccgctgccatgacgatgatgatcggttccattccgcagcaggacgtgttccagcgcgtgatgtccgcgaagtccgggaagatcgctgttgccggcccgattatcggcggcgtgttctacatcttcttcgcgatggtgccgatgttcattgtggtggcttcgatcctcgtgatgccggatgtgtccggccgcatgctcgctgaagatccgcagcagcttctgccgacgatgatccgcgattacatgccgatgtggctccgtgtcctcttcttcggcgctgtgctctcggctgtgatgtcgaccgcttccgcgacgatcctcgctccgtcgaccacctttgtggaaaacgtgctgaagaacttcacgcacatcagcgagaagaacgaaatccgcacgatgcgcgccacggttctggtgttcacgctgctcgtcctcgtgtatgccctctcggttgaaggcacggcgatttatgacatggtggccatggcttaccagttcccggtggtcggcgctttctggccgctcgtgatgggcctctactggaagaaggcgacccgcctcggcgcgatttcgtcgatcctccttggcggcgcgacctggatcatcctcacggtgaccccgcttggcgaagtcttcccgagcgtgcttggcggcttcatcgtggctggcatcggcatgatcggcggttccctgatcccggtgaagtccaaccgccgctatgttgccctctgggcccgcgaaagcaagcgcgtggagtaccgcgctgtgacggcccgctgagactgagggccggcctccggccccactgctctggcattgaaaggcgtctttccatggagaaaggcgcctttcttatttagaatgtttccgattgagtattccgttttggctagggcgaatcgctgagacagctgaaaccggagtcaagaggtccgcaggactgcggggttgttgaaccagaagaatgaaatcgggagcggcttccggccggtctcctgggaagaaaacaaatgaatatcgtgattttggcggcaggcaagggaaagcgcatgcattcggatctgccgaaggtgctccagcctgttgccggagagccgatggtttcccgcgttatccgtaccgcctccgcgctgaaccccgcccgcactgtcgtagtgatcggtcatggcggtgaaagtgtcagagcggttctcgctgaggtcccaggactccggttcgcggagcagaaggagcagctcggcacgggtgacgcgcttcgctgcgcgctttcggatctggatcccgcggaaaagcagacccttgtgcttctgggtgatgtgccgctgatccgcgctgagtcgctttcgaagttctgcgaagccactggaaacggcgtcggcattctgacggttgagctcgctgatcccacggggtacggccgcattgtgaagcagaacggccaggtgacccgaatcgtcgagcagaaggacgcgtcgcccgaagagctgtcgatccacgaaataaacaccggtatcatggctcttccgaccgagcgtctcagcggatggtgcggccgcctgacgagcaataacgcgcagcacgagttctaccttacggactttattgagttcgccgtgaaggatggcgttccggtgacgtccttcccggtgagcgacgaagcggaagtgatgggagtgaacagcaagcgtcatcttgcctgcgctgagcgtgccctgcagaagcgtctcgcggaggagctgcttgacgccggtgtcacgctgccggatccggcccggattgatatccgcggcaccctcaggtgcggacgcgatgtctttattgatgtcggctgtgttttcgagggggatgtggtgctcggtgaccgggttcatgtgggtccctactgcgtcatccgcaatacccgggtagaggctgacacggtgatccaggcgttcacacattctgacggcgctgtggtcggtgaggaagcgaaggtcggccccttcacccggctgcgtccgggggcagagcttggccgcgaaacccatattggcaacttctgcgaaatcaagaaatccacgatcggcacggcgagcaaggtgaatcacctctcttacatcggcgacacgacgatgggatccggtgtcaatatcggtgccggcacgattacctgcaattacgacggtgtgaataagttccggacggtgatcggtgatgacgccttcatcgggtccgatacgcagctcgtcgctccggtcgaagtggggaagggggcgacactcggcgccggcacaaccctgacccgaaatgctccggaaggtaaactaactctttcccgggcccgccaggtcacgatcgacggctggcatcgtcccgtaaagaaataaggaacaaagatatgtgcggtattgttgcggcttccagccgccggaatatcactccgatcctgcttgaaggcctgcggcggcttgagtaccgcggctatgactcctgcggcatcgcggtgattgagtccgacggcgcgtttcaccgggcccgtacggttcagcgcgttgcgagcctgatccgtcaggctgatgaggaaaagctttcaggcggtgtcggtattgcccacacccggtgggcaacgcatggagcgcctgaggtccggaacgcccatccgatgatttcgcacgacacgatcgcgctcgtccataacggcattattgaaaactatgccgaactgaaggcggagcttgtgtctgagggctacgagttcacgagccagacggataccgaggtgatcgcgcatctcgtctaccgttactttgaaggcaatctgcttgacgccgtggcgaaggccgtatcgcgtctccgcggcagtttcggtctggcggtctgctgcacgaagcagcccaacgtggtggtcggtgcccgccggggctccccgctcgtcatggggcttggggataaggaaaacttcctcgcgtctgacgtgctcgcgctcgcgggtgtgacggaacggtttattttccttgaggaaggcgatattgctgaaatcacgacggactctgcccggatcttccgcgcgacggaagacggccgcgcggttccggtggaccgtgaggtgaagatcgtctcggctcacgataacgacgtggcgcttggaccgtaccgtcactatatgcagaaggaaatcttcgagcagccgcgcgcgatcgctgacaccctggaaggggtggccggcatcacgccttcgattttcggcgccgacgctgagtcggtgttccggaaggtgcagagaatcctgattctgggctgcggcacgagcttctacgcaggcctcaccgcgaaatactggcttgaagcgattgccggcattccgtgtgatgtggagatcgcgagtgaataccgctaccgcgtgtcggttcctcatgaggatcagctggtggtctgcatttcccagtcgggagaaacatcagatacgctttccgcgctggaacacgcgaagtcgctcggcatgcatatgacgctcgcgatctgcaatgtcgcgacgtccgctctggttcacaacaccaagctgcattacatcacgcgcgccggtgccgagatcggagtggcctccacgaaagcctttacgacgcagctcgccgcactttacctgatgacgctcgtcttcgcgaagatgcgcggccgactgactccggaggacgaggtgacgcgtctcgcgagcctccgccatgtgccggcagccattcagtcagtgcttgcgctcgagcctcagatcatggggttcgctgatatcttcgcctcaaagcagaatgcgcttttccttggccgcggaatccactatccggtggcgcttgaaggcgctctgaagctgaaggaaatcagctacatccacgccgaggcctatccggccggggaactgaagcacggtccccttgcgctcgtagactcctcaatgccggttgttacggtggcgccgaatgaccgtctgcttgaaaagctgaaggccaacatggctgaagtaagcgcccgcgggggagagctctacgtcttcgcggacgcgggctcctcgatcgatccgagtgaccgtatgcatgtgatcaggcttcccgagaattacggcgatctctcgccgcttctttacgtcgtcgcgcttcagctccttgcctatcacaccgcaatcgtgagaggaacggacgtcgataaaccgagaaatctcgcgaaatccgtgacagtggaataactccagaccggatgccagactgaaaagccgtgtcccgaaaagaagggacacggcttttttatttttaagggttattacttacacttacagtctcagtcagaatttaaacctgcttacaatgctcaaagttataactgagcgttcgttcagcttttctcggcgcgcgggggcattgtaccctctgagatgctcccggtaagaaaactgattaattaaacgcttgaattcatttaataaacactactataaagagtcaaagtcgtggggatcatgcaaatgaaggtacgacagatatccaaatttacagcccttgccctttccgtcatcgccgcagtgtcgatgaccgctggctgcagcaagcagtccgcagggcctggagctggggccgccgccgcggccgcgcacgcggtgccggttaatgtcgtgacagttgagccgcatccggtacaggttcaggaacagatttcaggccgtacggtgtcctaccggatcgccgaagtccgtcctcaggtaaacggcgtgctgcagaagcggctgtttaccgaaggacagatggtgaaggccggtcagccgctttatcagattgacgcgtcggtctataacgcgaatgtgcagagcgccaaggcgtctctcgcccaggctgaggcagcgcttgcgctcgcccgcgccaacgcggcccgttccgctaccctggtgaaggagaacgcggtttcgaagcagtcggacgatacggctcaggcccaggtccgtactgatgaagctgccgtgaaggctgcccgcgcggccctcactaacgctcagatcaatgttcagtacacatacgtccgggctcctatttccggccgtgtatcgatttccgaagtgacgcctggcgccctgatgacggcttatcagtcgcagcgcatgacggtgattcatcagctcgatccgatctatgtggacgtccagcggacgactgccgagctcctgaagctgcgtgaggaactcgcctccggccgtctgaagaagctttccgacggctccacgccggtgaagatcatgcttgaggacggcacggtgtacccgatcacgggcaagctgacgttccagggcgtttcggtcggcacggataccggtacggttacgctccgcgccgaattcccgaatccgaagggcacgctccttcctggcatgtatgtccgcgcggttctcccgagcggcgatattccccaggccattacgctgaaccagcacgctgtgatgcgcgatatgcgcggcgatccgtatgtctttgtggtgaataaggacaacaaggttgagcagcgcgcgatcaagacgggcgaagcgatcggtgatcagtggatcgtgaattccggtcttaatgcgggcgaccgtgtgatcgttgaaggtatcggcaaggtccgccctggtgcgctcgtcgctccgtctgaaggctctgccgcggcttccgctcccgccgcctctgccccggcttcagctcctgcctcttccgcagccgctcagaccgcctcgcattaatcgacgggggaaatagaaatgtctcgtttctttattgaccggccgatttttgcatgggtcatcgcgctcgtgctgatgctggctggcgcgctgtcgatcttcaccatgccggtgtcgcagtatccgcagatcgcgccgcctcaggtgacggtggtcgcgaactacccgggcgcttcggctgaaacgctgcagaacaccgttactcaggtgattgagcagcagatggtcggtctcgacggcctgatctatatgagcaatgaatcgaacggcaccggccgtatgtcgatgacgctcacgtttgctccgggcacgaacgctgatatcgctcaggttcaggtgaataacaagctctctatggctgaagccatgctgccggaagcggtgacccgccttggcatccaggtgcagaagtccacggcgagcttcctcatggtggtgggcttcacctccgatgacggcagcctgaacgcgggtgaccttggcgactatctggtgaataccattcaggacccggtctcccgtattacgggggtcggtcagacgacggtgttcggcgcctcttacgccatgcgtgtctggcttgatccgcataagctctacgcctacggcctcacggcaactgacgtggtgacagcgattcaggctcagaacgctcaggtgacggccggccagcttggcggtctgcctcacccgaaggataagcctgtggagctgaacgcaaccatcacggcgcagtccctcctgaagacggttcctgagttccagcgtgtcatcgtgaagactgcctctgacggtaccgttgtccggctgagcgacgtggcccgcattgagctgggccgccagtcctacgatgtggttggttcctataacggtgtgccgtcctccggtatcgcgatttatctgtccgccggcgcaaacgctattcagacggctgacgcggtgaaagcgaagatcacggaactgagccgctacttcccgcagcacatgaaggtcgtttatccgtatgagacgacgcctttcgtgaaggccgccatgaaggaagtggtgaagacgctgatcgaggcaatcatcctcgtgatcatcgtgatgttcctcttcctgcagaactggcgcgcgacgctcattccgaccgtggccgtgccggtggtgttgctcggtacattcgccattctgaaggcaacaggctttacgctcaacatgctgacaatgttcggccttgtgctggcgatcggtctgctggtggacgatgccattgtggtggtggagaacgtcgagcgtgtgatgcgtgaagacggaaccgatgccagaacggcaacgatcaaatcgatgacgcagattaccggggcactggtcggtgtggccatggtgctgtctgctgtgttcatcccgatggcgttcttcggcggttcgaccggcgtgatttaccgtcagttctcaatcacgatcgtgtcagccatgctgctctcagtgctggtggcattgagtctgacaccggcgctctgcgcatcgattctgaagccgattgacaataatcacctgcataagggcggtttcttcggtgcctttaaccgcgggttcgaacgcgtgtcgacttgggtgcgtgatctcgtgctctggacgcatcaccacattgctctgacgtttgtcggctacgccgtcatctgggcctgcgtgatcttcggcttcatgaaactgccgggatcctttgttccggatgaggatcagggttcactgatgttcacggtgcagacacctgcaggcagcacgcaggagcatgtcacgaaggctgaagatgcgatccgcaattacttcctgaaaactcgtaaggatgtaacggattctgtcttccaggtggcgggcttctcgcttgccggcggcggtcagaatatgggtctcggcttcgtcaagctgaaggactgggctgaccgtacggcggcaggcacggatccgcagactgtcgcgctgaaggcgaatatcgcgctctcgcagtacaaggacgcgcagatcatcttcttcgctccgcctgctattccggaactcggtattgctgacggctttgatatgtatatcgaagaccgcggcggccagggccatcagaaactgatggaggtccgtaaccagttcctcggcatggctaaccaggatccgagactgcgtctcgtccgtccgaacggcatggaagatacgcctcagtacaagcttgaaatggaccgtgagaagcttcagtcctacggtatttcgctggatgcggcgaacacggtgctgagcaccgtctggggcggttcctacgtgaacctcttcattgaccgtgagcgtgtgaagcgcgtttacgtgcagggcgatccggactaccgcatggcggccgccgatctgtcccagtggtacgtgagaaacagctccggcgggcttgtgccgttctcggcattctcgaccggcagctggacctcaggttctccgcgtctggagcgcttcaacgcgaatccggccgtgaacattcagggtaacgcggctgtcggcgtttcctccggtacggctatgcaggcggttgaagagatcgcgagcaagctcccgagcgggttctcgatcgaatggaacggcgtttcctatcaggaaaagatggcgagccaggcggccgctccgctttacgcgctgtctctgctcgtcgtgttcctctgccttgccgcactgtatgaatcctggacgattccgatctccatcattctcgtggtgccgacaggcgtgctgggcgcgcttgcgatgacggcgctcctcgggggtcacaacgacgtgtacttccaggtgggcatgctgacaacaatcggcctggtgtctaagaacgccattctgattgtggaattcgcgaagatgctttacgacgcaggtgaagacctgataacagcgtcgctcgatgccgtgaagctgcgcttccgcccgattgtgatgacgtcactcgccttcggcctcggtgttgtgccgctcgtgctcgcgcacggtgccggcgccggcgctcagaacgcaatcggtatggctgtgctcggcggcattatcacgggcacgatcctctgcgtgggcttcgtcccgatgttctacgtggtggtgaatcgtctcttccgcacccgccgccgtcagctgccggaagatgttaaagagaatgttcaggagaagtaattcatgtctgaaaaagtttttgctccgcgtctcgcgcgtcggacgtttttagcggccagcgcggcctctgccgcgctcatgctgacaggctgcctgaaccttgctccgcgctatgagaagccggccgccccgactgaaaccagtcaggactgggcggtctcaccccgggatgccggggtgaaggaaggggagctcgtcacctgggataagttcttcctcgatgaacggctccgcaaggtgattgaacttgcgcttgcgaataatcgcgatctgcgtcagtcgatgctcgaagtggaacgcctgcgggcgctctaccgggtgtcgcgcgccgagctcttcccgacggtcggggctcaggcgtccgccacgcagtcgcgctcttcgattgacgcgatccagcctggctacccgcgtcactcgcacgtctatgcggcgaacctcgcgatgtcttcctatgagattgatttcttcgggaagatccgcaatatgaatgagcaggccctgcaggcgttcttcgctggcgaagacgcccgccgcagtgcccagaacacgctgatcgccgaagtggcgaccgagtggctctcgatcggcgcggaccaggccaatcttgaccttgcccgccgtacgctcgaaagccagacggcctcctacggtctcgtggaaaagagctacaacgccggtgcctcaaaccgcctcgaactgaaccaggcgaaggaaactgtggcaacggcgaagatcgccgttcagacggcgatcgcgagcctcgagcaggaccagaacgcgctgcgtctcctcgtgggagccgaagtgcctgccgatctccttccgaagaagatcgagctcggcgcgacgctgcccgccacgatgccggccggactcccctcgcaggtgctgctgcgccgtccggacatttcgtccgctgaacgcagcctccgctccgcgaacgccaatatcggtgttgcccgtgccgcgttcttcccgagcattacgctcacgagctcgatcggcacgctctccaccgatatgtcgaacctcttcaagggcggccgcggcacgtggtcctttgccccggcgatttcgctcccgatctttacgggcggcgcgaatgaagccaatcttgaagcggcgaagatctatcagaaggaacaggtcgccgcttacgagaaggctattcagacggcgttccgcgaagtgaatgacgcgctttccacggagagcacgatcacgaagcgcgtggaagcgcaggatgaaatggtgaaggccgctgaagctgcctacgatgtggcggatctccgctataagcacggcgtggataacttccttgcggtgctcgactcgcagcgcacgatgttctccgcgcagcaggctcagatttccacccgcctcgcccacgctgtcagcattgtgacgctctacaaggtgctgggcggcggtcaggaaatcgccccccagcctgaacagggaggcaagaagccgttatgagcacttcttccggaagatcgagagtctgcccaaaggcagcacagcgttgtgaagaaattctcgacgccgctatccgctgcttccgggagaagggcttccacgccgccagcatgagctccatcgcgaaggcgtttggaatgagcgcaggccacatctacaactacttcgacagcaaggaagacatcatcgaagcgattgtgaaccggtggcttgataactacattcacaccatccgaatccggtggaatccggatccggatatccatcgcgaagaggttcaggagagcatcggtcagcagatcgaggatcgcctgacctgcggagaccgcgccctgatgttcgaaattgcggccgaaagcttccgcaataaaaagatcgcggagtgcatccggagagcggaccgcgcggggcgtaaacacctgatggagcaggcggtggcctgttaccgtgagcacggtgttgagccgccggctgatctggaaaagcgccttgtggtggttggggccttcctcgacggactcgtgttttataccggcatggatccggagtttgagccgaagaccgtacttccgatcctaacggatatcctgctttatcttgagaagaatgacgggaaaccgtcagccaagggaaaagcggaaaaagaagcaaaaaaaaagcgccagttcattgaactggcgcttttcatttaccggtaccgatcagtcttcagacgaatccaggttaaccgggacatagatctgatcaccgcctctctgcacgaggatagcgatctgcttcttgccttcgatcgccttcgagagatcggagacggtcttcacaggctgcccgttcacggcgacgatcacgtcaccgctcgcgatgccggcggacgccgcggcacccgtggcattcccgacgaggaggcccgaagtgccggccttcttcgcttccttagcggtcagcgggcggacagaaacgccgagcttaccggccttcgcttcagccttcggcgtatcggattcttcgccggccttcagcgtattcgtcttgccgtcagccacacccacggtcaccggaaccgtgatttccttcttattgcggatcacggtgagcttcaccgtggaacccggcttcgcgaacgaaatctggcgcggaatatcgctgtagttcttcacgtgcgtgccatcgacacccacaatgatgtcgcccgactggaggccggccttcgcggccgggctgtccttatcggttctcgagacgagagcgcccttcgtgtcttcaggcagtccgaagccctttgcgagttcaggcgtgagcgactggatcatgacaccgatacggccgcgggtcaccttgccgttcttcaggatctggtccttcacctgggtcgcgatattgatcgggatcgcgaaggagaggcccatcgagccgccggaggtcgagaagatctgagagttgatgccgatcacttcgccgttcatgttgaagagcgggccgccggagttgccggggttgatggccacgtcagtctgaatgaacggaacgaggttttcgtccggcagattgcgggacttggcggacacaatgccggcggtcaccgagttcgtgagaccgaacgggctgccgatagcggccacccactcaccgaccttcacgttatcgctgttgccgaggcggacatagggcagatccttcgcgttgatcttcaccaccgcgatatcggtctgcgtgtcgaggccgagaaccttgccgcggaactcacggtcatcggtgaggcgcaccgtgatttcgtcagcgccgttcacaacgtgggcgttcgtcagaatgagaccgtcggagctgatgatgaagccggaaccggtgccgcgctcctcaggaacggtgcgctcaccgttgccaccgaagatcgggaaaccgaaacgcttcagaatttcagcttgatccggaggcagattgccgaacgggctgtccaccttttccttatgggccttcttcaccatcgagatattgacgaccgctttgccgtagtgatccacgagaacggtgaagtcaggcagcttcgactgattgacaatcggagcggccggagcgtcctggaccggggtgctcttggcataagccgtgtagacaccgccggcaagcgctgttgcaattgccgccgccaccagggccggcttgataaatttggaagaaatcacctgaaaatctcctaattggttgcctgggcgactcgaacagaccgcttcgaaccgcttctgaatggatagaagaaagatagtggaaaaaaagggaactgcgcttttcaggttgtgaaccgattcctgaatttgtaacaaagccaatcggttttaactgtctgaggggaaactgatttccatggttgtcccccgcccgtcaaggccgtcctttacatcgatatgtccatgatgtatttccgcaattcgctgcacgatggcaagcccgagaccgtttccggatacatgtgtgccaagcgcccggtagaagcgctcaaacacgcgggcacggtctttttccgggattcccgggccgttatcggacacccggacgaggatccgggagccgtcctgaagcgcggtgagctcgatccggccgccttcctgcgtgtacttgatcgcgttatcggtgaggtttgtcaccatcatgagaagcgcgtccttcatgccgcggatcgtgaggtcagaaggggccgcggtgatcgtgatcgatttttcgcccgcgatcggctcaagatcatgctgcacggtggagagaagctccccgatggagacccgctcgaaaggccgcctcgcggaatccgggtcgagcctcgcgatcgtgaggagctgctcaatcaggtgcgtggcgcgggaaatgccttcatcaagccgcgagaggttcttcgcgagcgcctcaggggttttcgcgcgcttcgcgagctgcgcctggagcttgatcgcggtgagcggcgtacggagctcatgcgccgcgtctgaggcgaaacggcgctgcgactcgaggctcgcggaaaggcgctccatgaggctgttgatggcgttcacgagcccccggagctcagcggggagcccttcggtgctgatcggtttcagggactcgggagaacggctcgcgacgcttcgcgctgtgcggtcgagcggcgcgagaccctgccctacgatcagccacacaatgatcgcggtgagcggcagaagaatgagaagcggctgcagaatttcaagcgacgcggacgcggcaaggctcacgcggacagactcaggctgtccgacttcaatgatttcggaaccggcggtcgtcgtgaagacgcgccaggcggctccctcatactgaatgtccgagaacccctcacgctcgagaatcgggaagggggaagtcttcgcggagagaaaaagagagttgctgcctgactcatagacctggacgagaatccggtgctccgggttgcttccgacgagggtgaggctcgaaggcggaatgttgccgcgcttagccagcgcggtcgccatctgtttcagctccgagtcaaggaactgatcgaactgcgactgcgcagtgtagaacgacgcccaggcggcgacgataccggccagaagctccgtaaagatcagggtgaagagcagctttcggcggatagaccccatgctcttcaggtctccagaatgtagcccatgccgcgcaccgtcttgatggcgtcctcagaaagcttcttgcggaggtgatggatatgcacctcaatcgcgtttgagcctacggtggagtcccagttgtagagcttgctttccagctggacgcgtgacagcacaagccccttccgttcagcgagcgcttccagaagggcgtactccttcgcggagagaatgactggcttcccgtcgaaggtcacctcccgggtggaaggattgatcgtgaggcggccccgtgtgatcaggggatccgcccggccggcagagcgcctgagcagcgcgcggatgcgggcagagagctcctcaaggtcaaagggtttgatcagatagtcatccgcgcctgaatcgagcccggcgatacggtcatccacggtgtcacgcgcggtcgtgatcagaaccggaatatggctttccttggagcggatttccttcagcacctcgagtccatcgcggcccggaagaccgagatccagaatgacgagagcaaagggcgttgtatgcagtgcgagcagcgcggagtcgccatcctgcagccagtcgacggcgtatccgtctccctgaagccactcggagacgctttcgccgatcatcgggtcatcttcaacaaggaggattctcattttcttttactctgcctcagcgcggtgatcttatccatttcgtataacaggataaaacgaataagaggaaaaatcataatcatcagaaggagaaagccggggaggcggttccagatggcggaacggcttccggcgacggcttctgtcgcagcccccataatgccgccgatcgcgagaatggcggaggcccagagcagagacccaatggcggcgaaaatcaggaaccggaccgaggtgagtgtcggggactgggccgcgagaagcgggaaccgggctttcttctgcggaaggaaacggtagaagagcaccgcgggaagcgtttcccgataaagcgggagccgcctctcaagcagtgtctgtgatacgaaaaaacgggctacaggagagtccgcacggttccggaacgcgaagtagaagatcacgtccgcggcaaaagccgcgagaaacgccgcggtgaaagactgcggcgcctgaaggatgccgatccagcagagaaatccggcaagcgccacgacggtttcgcttccgagaagcgtcagcgcggcgagaaaccagattccccagcgggcgacaagcaccggaaaatccggataggtcatcagatcgaaagaaggcatggacggatcacaaaaaaacaggatacggaagcaaatacacgggaatcaacgtggtaagctctcccccgcttattctggatgaatttttatggctctgggtgcttctatttataaagcggaactggatatctcaaatctggaccgcaattactacgcgaaccgtattctgacggtggcccgccatccctcggaaaccgagggacggatgatgcttcggctgctctgctactgcctctgggacagcgatacgatccgtttcgctgacggcctctccaaggaaggggagccggcgctcgcggatacggatgacacgggctggatcagcctctgggttgaactcggggtgcccactgtgaagcagctgcggaaggccgcgagccgaagctcccatgtggctgtcatgacttacggcgaagaccgtatcaaagcctggtgggaatcctgccgcggagacctggagaagatcgggaagctttctatttacagtgtgacagacgcggaatttgaagcactcgccgctctggcccggcgccatatgcgtatcgcggtcacggtccaggaccgcgtggtctgggtagcggacgcccagggtagcaatattgagattcatccggctgtgatgaaggaagcgacagagtaagcgcgtccccgctccggattccggcaaaaagaaaggcacccttgacgggtgcctttcttatttatcgatcagctgagacctcagtctttcttaatgaagtccttcgctacggaaacgacgatggagaggcagattgccagccccagaatagccatccagtaaaagtagctcatgttatgtccttttcagtggggaggcggctgaggattttcagcgcctcccggattcatcagtagaggctgtgagagttttccgagatgtactcgtgggtcaccttgcctctcatcacgtgataggcccagctcgtgtagatcacaacgagcgggaggaagatcagcgtgacgaagaacatgatttcaagcgtgagctgggagctcgtgcagtcccagagcgtaaggctggagaccgggtcgagcgaggacggcatcacgaacgggaacatggtgacaaacggcgtcagcacgataccgaggagcgccaccgaagaggcaacgatcgcggaaccccacttgccggccttgccgaagacgacgctcaggagggagccgagcaggccaagggcaggaagcagatagaagtaggggtgagcggagaggttgtcgaaccagctgccgccgatcgccacagacttcgcgagcgggttcgggaagccagccggatccaggcccgtggccgtatagcccggaatcgccatcgcaagccagatgccggcgagagcgaagaggacaaaagtcgcggccgagctcagggtggacacgcgggcggaacgcgcctgcaggtcaccttcagtcttcagggcgaggtagttggcgccgtgcatgatcaccatcgcgatgctgacaacgccgcagagcagagcgaacgggttgagcagcgcgaagaacgagccttcatagtagacacgcatcgtggtgtcgatccggaagggcacgccctgcagcaggttgccgaaagcgacgccgcagatgatcggcgggacggcagagccgaggaagaggagcgtatcccagagggtgcgccacttggtgctgtcaaccttgctgcggtagtcgaaggccaccgggcggaagatcagcatgaacagcacgatgagcagcgcccagtagaagcctgagaacgcggtcgcgtaagcgatcggccaggctgcgaacatggcgccggcaccggtaagaagccacacttcgttgccgtcccaatgcggggcgacggcgttgatcatgatgcggcgttcctcgttggtcttaccgaggtaggggaggagggttcccgcgcccatgtcctggccatccataatggcgaagccagtgagcaggacggcgatgaagagccaccagatcaatttcaggatttcatagtcaatcatggcattctccggttatctgtggttttcaaagaagtagcgaccggtgccgagcgaagagggcccgagacctgcgaacttcttcatcagccagacttccaccacgatcaggcaggagtacagcacgatgaaaccggcgagggagccgaacacggatccggcggtaagcgacgaaaccgagagatcgacaggaagcatgccgtagatggaccagggctggcggccgacttcggtcaccacccagccgagttcattcgcgatccagggcagaggcataccgatcatggcagccgtcagatagcaggacttcttgtccacagaacccttgaccgagtaaatgagacccgccaggaagagcacgatcatcagcagaccgctgaccaccatgccgcggaagctccagaagatcagaccgacagacggaatggtgtgagccgcggcttcctgaatcacttcaggcgtggcattggcaacatcattcgtgtacttacgcagcaggagaccatagccaaggtaaggctggacttccttgaacttcgcgaggagcgcaggatccttcggggaggcgcggagggcttcgagagccacgacggcttccttgccgcgggtgatgcggtcaacgttgcgttcaatcagctgattgatgccgggaaccggagtggagagagaacgcgtaccgatcaggccgagaatccacggaatcttcacctcagcgtgattcgtgcgggcctcagagtccggaatggcgaaaaccgtaatcggagccggggtggattccgtgttccagatcgcttccatggcggcgagcttctcaggctggtcacgggtcacgaggtaggcggattcgtcgccctgatggatcgtgaagagcgaggtcacgagaccgaacgcgcaggcgatcatgagggacttcttggcgaattcaacgtctctcttgcggagcaggtaccaggcggaaatagccatcacgaagacagcgcccgtcatgtagccggcgctcaccgtgtgggtgaacgtggcctgagcccattcgctcgagatgatggtccagaagctgtccatctccatacgcatcgtttcaacgttgaagacggagcccttcgggaactgcatccagccgttggcgatcagaatccacatggcggaaatgttcgtgccgagagccatgaggaacgtgcagacccagtgccccaggcggctcagacgcttccagccgaagaagaaaagaccggcgaaagtggattccatgaagaacgccaccagagcctcaatcgcgagcggggcgccgaaaatatcgcccacgtagtgcgagtagtaggcccagttcgtgccgaactggaattccatggtgataccggtagcaacacccatggcgaagttaatcgcgaagagcttgccccagaatcgggtcatgtctttatagatttctttccccgtgaccacataacagccttccatggccacgaggatcatggaaagaccgagagtgagcgggacgaagaggtagtggtaaagagccgtgacagcgaactgcaatcgcgacaggtctacaagttcaggtgtaatcatggtatgtctctgtgaaggctggactcagaagccgaagtctgagcatccgaaatcggccggtccaggatggcgttccccacggcagtcgcggacgtatcaggtctgtgactgggtgagaagaaaaccagccaaagaagaaaaatacagagaacctttacccctatcacgagccagaggtgaagggtcagatgcttttcctggtctttccgtgtgccttttttcatgggtattttttgtgaagggcgaacttgagaaaataatagcctaatgatgaaacttagtaaattatgaaagtagttgtttcatcttaaatagcacttaaaatcgattaacttcgctcaaagaaggcgaatcaggcaaaaaaaatcccccgaagatttttcgggggattttatacgggaaaacccgttttctgtgtactctttttactctttctgctcggtttcggcaggggcgaccgggatatgaatgatcgggggaggcaccgcggcggcctcggctttgatctgccagatcttcagaagctcgtcctggccgggaaccggctggttttcgcggagccgctcctggcgcgagacgacagattcacggatcaccttctcgacgacatcgagcggcagccggttgaggttgtcgaagaagatcgagcaggtttcggtgttgacgccgggaatcttgccttcgtagttctcgagcaccttcggttcagcgatatacagcgtcatgctggtttcgccaggctccagagcaaacagcggattcatctcatattcatagaacgccagaccgtagcgcatgctctcatgcacgccgcgcgcgttgcggcggataagactgcaaacccgtgccatagcgacgcgccgatcgggaggcagggtttgcagaaaaccgcctaccgtcgttgctgttggaaccattcagacacccccagaaaatagaccgaatttcaatagcgatagggatgaattttaacaaattatcagtttcccttcatgctattaaggtgatttcggcaggaaatagaagagaacgtaacgaagaaacgggagtctgatcccgtggtctctgcagcgcctaaatgatattgattctcaaatagaaattgttctatcgaagtatggcaatcaaaggtctttttctttagcattacaggcgataatgaaatggtataccaatatatgccgtaaatccgtcatacagcggaggtcgcacatttatgtttcagattcgtttgcacggccgcggagggcagggtgtcgtaactgccgcggaaatgctgtcgctggcagctttcatggaaggacatttcgcccaggccttcccgagtttcggttccgagcgcacgggcgcgccggtgaccgcttttgcccggttcagtgatcatgagattcggcttcatgagccgattgaggaaccggatgtcgtgctggtgcaggacagaacgctgattgactcggtggatgtgttcagcggtctgaaccccgaaggctatgttctcgtgaacagcgcctcgtccccggaagagatcgggcttggcgaactggtgaagcggctccccgcaggacacgtgaagacggttcccgcgacggaccttgcgctgaagttcatcggccgcccgctgccgggcgccgccatgctggcgggcttcgccgcgatgacgggcatgctgaagctggaaagcatcaactcggcctacggtcagaaatattccggtaaggtcgctcaggcgaacgcggatgtcgcgcgcggggcctgggactttatcaagaatggaggagaagaataatgctgaagcagctggaaggttcgcagggcgtcgcgcaggctgtggccctgtgccgccccaatatcgtctgcgcttatccgatttccccccagacccatatcgttgaggcgctcggccgcctggtgcgcgcgggaaagattgaggactgcgagtacctcaatgtggagagtgaattcggcgcgatgagcgtcgcgatcggcgcaagcgccgccggtgcccgtgcctacacggcgacggcttcccagggcctgctcttcatggctgaggcgatttataacgcctcgggtctcggtcttccgatcgtgatgacggtcgcgaaccgcgcgatcggcgccccgatcaacatctggaacgatcagtcggactctctctcccagcgcgacagcggctggctgcagctgttcgctgaagataaccaggaagcggtcgatctccatatccaggctttccgtatcgccgaagagctgtcgctccccgtgatggtctgcatggacggtttcgttctgacgcacgcgctcgaacgcatggatattccgtcccaggagcaggtggatcagttcctcccgccctatgagccgcgtcaggtgctcgatcctgaggatccggtgtcgatcggcgccatggtgggaccggaagcgtttaccgaagtccgttacctcgcgcagcaccgtttcaatacggcgcttgaagtcctgccccgcgtgcaggaagagtttgcaaagattttcggccgccgctccggcggtcttctctccacgtaccgtaccgaagacacggatatccgcgtgatcggcatgggttcctgcatcggcacgatcaaggattccgtggatgagctccgggatgagggcctcaacgtgggtgttgtcagcctgaagagcttccgtcccttcccgtatgacgcggtgagagaagcgctgaaaggcgcgtcccgcgtggtcgtgatcgaccgcacggtgaccccgggcagccgcggtgttctcggcatggaggtggaatccgcgctccgcggcacgggcaccgccgtgaatacggtgattgccggccttggcggccgcgcgattacgcgccacagcatcaaggcgacgctgaaggacgcggcggccgggaagctcccggatatcttcttcatggatctcgaccgtgaactcgttgaaaatcagctcgcgcgcgaggcgaagacccgccgttccggtcctgcagcagaagagatgctgaaggatgttggtcgcaggagcgcagcccaggctgcgtccaagtaggctttaggaggccagtatggaagagtcaagaatccatttttatcagaccggcacctttacggttggtaatcggcttctggatgagaagctgaagacactgcagagctcgaccaagcgcttcaatttgctggaatcgggacaccgcgcctgccagggctgcggcgaggccctcggcgcccgctacgcgctggacacggcgatggaagaaaccgacggccggatcgccgtgacgaatgccaccgggtgcctggaagtcttctcgacgccgtatccggaaagcgcctggagaatgccgtggctgcattcgctcttcggcaatgcggcggctgtcgcgaccggtatggctgcggcctatcgggtccgtgcgaagaaggacgggaagcccccggtccgcgtgatcgcccagggcggtgacggcggcaccaccgatatcggcatgggctgcctctccggcatgttcgaccgcaatgacgatgtgctctacatctgctacgacaatgaggcgtacatgaataccggcgtgcagcgcagctccgcgacgcccccgaccgcgcgtaccgcgacgacgatgccgcagccgggctacgaaggcaacaatttcggccagggcaagagcgtgccgctgatcgccatggcgcacggcattccgtacgtcgcgaccgctaccgtggcggacctccatgaccttgagcgcaaggtccgcaaggcgatgtccatgcacggtgcccgctatatccagattctcgttccgtgcccgctcggctggggcttcgcctccgataagaccgttgaagtggcgcgtcttgccgctgaaacgggcatcttcccggtattcgaggctgagaacggagaaatcacgggatcctataagattcgccgtcccacgccggttgaggcgtatctgaagctgcagaagcgcttcgcccatctgctcggcaagaagggagatccggaaacggtggcccgtctgcagcgcatggcgaaccgcaatatcgaaaagtttggtctgaccgaagaggccgaggagcatcctgagggactgttccgcagcctggtgagcccgaagggggatgcagaaagtgtctgaaaaaatcaatgatgaaacgccgtttgcgattacgctgaagccgctcacgtcgctcgagaaccatacgggcgcgtggcgtacgctgaagccggcctataacttccacgagccgccctgcagcgcgacgtgccccgccggggaacgctgccgcgactggctgttcctcgcggaggatggcggctacgaggccgcgtggcggaagatcatggaagataatcccttccccgccgtgatgggccgtgtctgttaccacacgtgcgaaaccgcctgtaaccgcggtcagctcgatgaatcggtcggcatcaactcggttgaacgcttcctcggtgacgaggctctcgagaagggctgggcgtcgcctgtgccggctcagccgagcggaaagaaggtgcttgtggtcggcgcgggtcctgccggactctccgctgcctatcatctgacgctcctcgggcatcaggtgacggtggtggattcggctcctgaagccggcggcatgatgcgctacggcattccgaagtaccgtctgccgcgtgatattctcgataaggaaatcgaccgcatcgtgaagctcggcgtgaagcttgagctgtcgcacgaagtgcaggatctcgaggccgaaatgaaggccggcggctatgacgccgtgttcctcggtgtcggcgcgaagctggcccgccgcgcttatattccagccggtgactcggctcacatccttgacgcggtttctgttctccgctcgatggaaggcgaagagaagccgatgctcgggcgccgcgttgtggtctacggcggcggcaacaccgcggtcgacgtggcccgtaccgtgaagcgtctcggtgcagagcctctgatggtctaccgccgtacccgccagaaggcgccggctcacagcttcgaaattgaggaagctatcgaggaaggcgtcacgatgaagtggctctccaccattgcggacgccgaaggcggcgaaatccgcattgagaagatggagcttgatgagaacggctccccgaagccgaccggcgaatttgaaacgatcactgcggattccgtcgtgctcgcgcttggccagcagacggacctctccttcattgaaggtctttcggaagtgaagacgaaggacggcagcatcgaggtcgacgacacgctgatgaccggcaaggccggagtcttcgctggcggcgacgcgattgaaggcgcccgcaacgtgacggtcgcgatcggacacggcaagaaagctgcccgcgcgatcaatgcctggctgcgcggcgagaagtacgctgaaccctatcgcggaaagcctgccgaattcagcaatctgaacacgtggtacttctcggacgctccgaagacggtccgcccgatgcttgatatggtccgccgtcagacgacctttgaggaagtgctgaagggcctcaccgaagagaacgcgctttacgaagcccgccgctgcatgagctgcgggaactgcttcgagtgcgacaactgctacggtgtctgcccggataacgtgatcgagaagctcggcccgggccgcggctacaagatcgattacgagttctgcaagggctgcggcatctgcgcgaacgagtgtccgtgcggcgcgatcgatatgaagaaggaagagatctgagaccggatcttctgatatcggtatagcgaagaggcaggttcctgacggaacctgcctcttttgcttgatggaaactgaatgtgaatcagcggaactgacgccgggcgaggagcgcgatcacgacactcagaagaaggagcgaagcggcgagatagtacgggatgccaggcggaatcagctcatctgttccctttgccgtgtagacaagaagcggcgtggagatcaccggggcgatggcaccggagaatgagttaagggaactgatggcgcccatcgcggagccctgcatggtgggagagacctgacgcgagaccgcgctctgaataatcggagaggcgattccaaggagcgaaaacgtccaggcgagaatcgcggcgacgatgccccaggtggtgaaaccgatccccgcaagcgcgaggcacccaatcgaaagcgcggcgatcacgaggtgtttctcagactgaacgcggatcagggcgggaaggagccacccttgagtgaacgcaatgcagaggccgagcacgaacatcgagagaccgatattcagcggtgtccaaccgtaccggaactctgtgtagagcgcccaggtgcactgcatgagtgactgcgagagatagatgagaccgatgatcagcaccatcggaatgatgggctttaccttcaggagcgcgatgatcccgatgaagggattaaagcggcggaaagtccagggacgcatatccggcgtcgtgagactttccggcagcacgaagaaaccgtagatgaagttcaggcagcagatggcgcccgcgaaggcgaaaggaatccgcggatctatctgcccgagaatgccgccgagcgccgggccgatcacgaaggcgagtccgtagaccgcaccgatcttcccaaaagcggcggagcgctgctgtttcggcgtgatgtccgcaatgtaggcctgggcgacgacgaggttcgcggacagcatgccgcccgcgatgcgggacgcgagcacaagcgggagcgacgacgtgaaggccggcacaaactgcatgatggagaggccgaagataccggtgagcagtacgggcttccggccgaaacggtctgaaagcgcgccgaggatcggcgaggagaggaactgcatgatgccgtagctcaccatgatcgcgccgtaccagtaggtctgcagatcgcgggtgcctgccagatcgccgatcagccggggcagtacaggaatgatcagcccgaagcccagggcatccataaagatgcaggcaaggacaaagcgggtggcgggtttaagactgctcatgcggtggtgccggaaacggtaggtacagaaatttgaacattatccctcagataggggatcggaggatgaccacaaaatacagagttaaataaaacaggtatgctaatgaatacgccctgcaaaaaattgttgcaaaaaggcgtatcccccctggtcctaagaaaaaaagtcaatatgcggaaattctcacgaatcctcgtgccgttcctggaggggtctcttgtcaaggagatcctgttcgcactagtgatcggcatcatcgttgccctggtagcgcctggcatcgccgtgcccctcggattcctcggcacgttcttcatctcggccttgaaggccgtggcccccgtgctggtcttcttcctggttgccgcgtccatcgcgaaccagagcgttgacacccggacgtccatgaagccgatcatcgtgctgtatgctatcggcacgcttgcgtcctccatcgttgccgttgtggcgtctttcctctggccgaccacgattcacctcgtggctgccgctgaggcgactgccccggccggtattgccgaagtgctgaagaacctcgttctcaacatcgtcgataaccccgtgaaggccctcgcgaacgcgaactacatcggcattctctcctgggctattgctctcggcttcatcctccgcaatgcgaacgacacgacccgcgaaatcattcaggacttctcggaagctgtgaccacggtcgtccgtatcgtgatccgtatcgctccgttcggtattttcggtctggtcgcgaacacggtcgctacggtcggtctcggcgccttcgtgggttacggcaagctgcttctcctcctcgtgggcagcatgttcttcatcgccctcgtggtcttcccgatcatggtctggttctgcatccgcaagaatccgtatccgctcgtgatccagtgcctgcgcgtgtccggtatctgcgctttcttcacccgttcgtctgccgcgaacatcccggtgaacctcgacctctgccgcaagctgaagcttgacgaaggcacctactcgatttcgatcccgctcggtgccacggtcaacatgggcggcgctgccatcacgatcacgattctgacgcttgctgccgcgaattcgctgggtgttcaggttgacttctggactgccatcctgctctgcttcgtgtctgcgatctgcgccggcggcgcctccggtgttccgggcggctccctgatgctgatcccgctcgcctgcggtctcttcggtattgataactcgaccgccatgcaggtggtggccgtgggcttcatcatcggcgtgatccaggactcctgcgaaacggctctgaactcttcgagcgacgtgatgtttacggcggcggcctgcctccgtcaggaacgtctcgatgccgaaaaggccaagtaagcctgaaaatccggctgtttaagcagttctgaaaacccttcctcctgatagaaacgggaggaagggtttatattatctgcctgctccatcctcacactttcccctccctccaggaattcatgcggcgtttccattcagcaaaagaagcactgacccaggtattcggctttgccgatttccggccgcatcaggaggaaatcatcgaagccgtgatcgaggggcgggatgcgctggtgctgatgccgacaggcggcgggaagagcctctgctaccagatccccgcactcgtccgcgagggaaccgcggtgatcgtgtcgcctcttatcgcgctcatgcaggatcagatcaccgcgattcagaaccgggggctcgaggcggcctgcctcagttccgcgaactctctggaagagaaccgggagattgagagtcagttcctctcggggacactcgactttctctacgtcacccctgagcggcttgtgaacgagtggacaatctcgatgctgcagagagcgagggtctcgcttttcgcggttgacgaagcgcactgcgttgtgacctgggggcacgatttccgcccggaatacggcgcgctcggccttctgaaagagcgtttcccgtccgttccccggatcgcgctgaccgctacggctgatgcctcggcgcagcaggaaatcgcggaacggcttctgattgatccgaagattttcattacgagctttgaccgcccgaatattcactatcgggtgacattcggcgccggggaagtcaagcggaagcttcttgccttcatcacgcagcgtcacccagggcagaccggcatcatttactgcatctcgcgccgtcaggtggatacgatctctgacttcctccgcggtatggggatccccgcgcttccctatcacgcgggactcgacgcctcgctccgggaagagaaccagcgggagttcatcgcgggccgcggggtcgtcatggtggcgactgtggcgttcgggatggggattgataagccggatgtccggtttgtcgtccatatcggccttccgaagagcattgaggcgtacttccaggaaacgggccgcgcgggccgcgacgggaaaccgtcagaagcctggcttatctggggatggcgcgacgtgatgatccagcagcagtttatcgagagcggggacggcagcccggaattcaagcagcagtcgcttgagaagctggatgccatggtggggtacgccgaaaccggtgagtgccggaggcattatctccttgcctgtctcggtgaggagtcttcgacccactgcggctgctgcgacaactgcgacaggccgcctgagatggcggaccggacggtagatgctcagaaattcgtgagctgcgtgatccgatgcgagagagcctcagggtgctgcttcggcatgacgcatgtcatcaacgtgctccggggcgaaaggacgagccttgtggcggggtacgggcacgagaaactctccacctggggaatcggaaaggatctgagtgaggaagagtggcgggaactcgcccgggttctcatcgcgaagcggattctgaacgcggactggaagagcgaaggggtgctgcgacccggacgcgcgaaagcgcttctgaagggcgaggaaacaattctggtgcgggtcagtgcgccctcgcgcccggatctgaagcaggggcgcgtcagaaagccgatcgaggtccgggaggattatcggccgcttgcggacgcgctccgcgcctggcgccgtgaaaccgcggaggcacaggggattccggcctatcgcatcatgactgatgtgagcctctctgaagtcgcctcgatccacccgcagtcgttcgaagccctcagccacgtgaacggaatcggcccgaagaagcttgacgcatacgggaccgagattctccatattgtgcgggacttcatgcgaaagaaaaaaggcaccgaagtctgacttcgatgccttatgcgggcgagtcccggagcctccggatcagactccgagctccttcgcgcggggcttctgcttgcggcccttcagaatacggtcgaacaggcagttcggcgcgatcttcatcagttttgcgagcagtcccatctgccacgggatcaccgtgtaggtcttatgcgcgtcaatcgcgcggacagcgcgtctcgcgaactcatccggctcaaggatgaagggcatcgggtaggggttcttcgacgtgagcggggtcttgacgaaccccgggcacacagtgagaacctcaacgccgtgcttcatcatttcgatgcggaggctttcgcagtagttgataacggcagccttgctggagcagtaggcttccgaccccggaaggccgcggatgccggcaacagaaccaatgccgaccagcgttccggcgtgtctctcgatcatcgccggaaggaagccatggaaggtgttcgccatgccgataacgttgatccgatagacccggtccatgacggccagatcctcgtagtactgcgtcttcacgccgattgaaacaccggcgttcgcaatcacgacgtcggcggggcccacttccttctcgaagcggtgggctgtttcaatgatgccgtcccgatcggtcacgtcggcgacatagcccttgtgaccggtgccggggagcgaggcgatcagacggtcgagcgcatcctgatgatgggccacaagaccgagagtagcgcccttcgcggcgtaaaccctggcgagaccggaaccaatgccgccggttgcgccagtgatgaaaacgttaagtgacatgcagaactccgaaaccagttagaggcgagcctttctcgcgcgctgggcgagggtctcaacgacgaccagatcgctctcgcgggtcggcgtcatatgcgggcccgtgacgtacttgccgtcaatgccgatcatcggcgtcgcgtcaatgccgtaggactgccagagacgggaagcggcgcgggtcttgttggcaacgccgaaagaattgtaagcgctgttccactgcttggcgttcacgccggccttcaccatgaagtcagcgatatcggcagccgggttctcgtacttatgcgtctggtaaatgacggactcgaagaacttcatgtggagcttcggcagcaggccgagagactcgagcgcgtagtaggtcttcacaaacgggtccaggcgggagtcccaggcaaccggattcagcttgaagtcgatccaggaggggagcttcttcgaccagggttcgatgatcggatcaaagcggaagcagtgcgggcaggtataggagaagaagtacaccacttcaatcttcttacccttcatcggcacaacaggacgaaccatcgtgtattccttgccttccaccggtgcggtaggagtagcaaacgcagacagcggaagcgaggcaagcgaggcggccgagaaagtcagaaggtttctgcgagaaatcatttgagaacgtttcctaaaaatcagtgaatgatctggccaggaatgtcattggcgcggagcgtgctctgtgccttgcgggcatccccttcagagtggaagggtccaatacggacgcgataacgtccatcattgccgtgagaaacactggaatcaagtccggagaacgcaattttggctctaattgtttcagcctcgtcaggcgtcttgtaggcgccgacgagaacaaagaagtcaggcgtctggggctgaaccgtcgtgggagcagccgcgttgttgtccgcgagctgcttatcggcggcctgatcatcctgagccgggcggctcggggcaggggccttggcggaagccgcgggggacgaagcctgagcggaagcgggcttgggagtcgttccgggagcgtaaagcctctcattcggatcggaggaccggcccttaagcgcgtcctgaacatattccgtcgacgaggactgaaccttactcatgaacggaaccggagactccgttacgaacagggcgccgccagcggcgacaagaagggcgacgacagcgccgcagagaaagccggttagaaactgcttcatgaacaactcctttttccagaaaagggaattttcaaaaagttacatcctctccggggcactgaccccgaggagagcaagaccgttgccaagaacctggcgcacagcggcgagcagtgcgagacggctgttgcggacggcttcatcctcaaccagcacgtgctcttcgttatagaaggcgtggaagcttgcggcgagatcgcgcaggtagaagcagagcgtatggggcgtcagggcttcggaggcagcggacagcgtggcggaatagtctgccagatggttcatcaggctgatttccttttcggaattcagctgcgaaagatccatggcaagcatctcttccgtgctcggaatcttaaagcccttttcggtggcctggcggaagaccgagcagatgcgcgcatgagcgtactgcagatagtagaccgggttctcgtcactcttcgacacagcgaggtttacgtcgaaaacgaactcggcgtcagccttgcgggagacgaggaagtaacgggcggcgtcgcggccgacccagtcaaccaggtcacgcagcgtgatataggagccggagcgcttgctcatcttcacttcctgaccgtccttcatcacgaggagcatcttgtgcagaagccactcggggaagaccttcggcacatcgaggccgagaaccttcgcggcggcctgaatgccggcgcggaggcgggcgcgggtgccgtggtggtcagagccctggatgttgatggcgcgcgagaagccgcggcggaacttcgtgaggtgataggcgacatccggcacgaaatacgtgtagaagccgtcctgcttcttcatcacgcggtccttgtcgtcgatcaggccgccgaggtcttccttcgtgaagtccgtcgtacggagccagagcgcgttgtccttctcataggtgtggccggagcggatcatcgcgttcacggcttcctcgacgtagccgtccgagtagagcgagctttcgaggtagtagttatcaaaggaaacgccgagggcccggaggtcttcgtcctgttcgttgcgcagataggcgacggcgtacttgcggacgagggcgctgttattcagatcgccgtccggggtgatcgtttcgccggagctcgtcacagggcgcttcgcgatgtagtccttcgcgatatcggtgatgtattcgccgtggtagccgttttccgggaacgtgatctgctcgccaaggagttccttgccgcggagcgtgacggagacggtcagattgttgatctgagcgccggcgtcgttgtagtagtactcacgcgtgaccgcccagccctgagtggcgaggatcttcgagagcacgtcgccgagtgcgccctggcgggcgtggccgagatgcagcgggccggtcgggttggcggacacgtactccacgatgacggactggccggccttcgactgattggtgccgaacgcgtcgccctgacggagaacagtcttcacgatttcctgctgagccgatttggcaaggcgcagattgatgaagcccggcccggcgatttccgcggaggagagcagggtgctgaattccggatccgccttcatgacggacacgagctgctcggcgatttggcggggagccttatgaagaatcttggcggactgcagagcgaccgtacaggcaacatcgccgtgttcggcgagtttcgggcgctccagcgtaacgggaagggaacctgcgccgatagcggtaagggcacgggtgaagaggccaatcagggcctgtttttgttgatcgagcatttttgcaggaaaacggactgttctaagtaatccctctattttcgcagagtgcgcagagggcgggtaaaacgtgcggggttttttgcgggatccggccgcccgcctggggcgtgccggataaccgcgagcgcgagtctcggcgtcagactgcggaggtgcgccggtcgtgggtgatcagcgcataggcggaatgattgtggatggattcgaagttttccacctggagctcgtacgagacgatacgggcgtccttattgagatcagtcgcgacgtcgcggatgatgtcctcaacgaacttggcgtggtcgtaagcgtattccgtgacgaacttttcgtcctcgcgcttcagaagagaccagagctcgcaggagccgttcttttcggagtagcggatgagatcttcgaacggaagagcttccgagcagagcgcatcgatcgtgatatgggagcgctgattatgcgcgccgtaccgggagatttccttgctgcaggggcagaggctcgtcaccggggtgagaacacgctcacggaccgtggtttcaccgttctcgcacgtcaccgtaaagccggcttcgtagctcatcaggctcgactgcttggagatcggggccgatttgcgcacgaagaaggggaagtcgaactcaatctgaccggagacggcgtcaagcgtcttcagcatccgggccatcaggtcttcgagaacgggcttgcagagcggctcgcgggtttcgtcaagcagacggaagaagcgggacatatgggtgcctttctgcccggcagggagagacacgtacatattgactgttgcaaccgtgtggagcgggccgtcgacagaggcgacgacaacgggcacgcgaaccgacttgacgccaacacgctgaatcgggatatgacggccgtcagcgctcgactggacgtcgggcagcgcgcaattaagagaattatctgcgttcataaatagatgttctgccaatgaagagtaaggagggcagatgcgggcttgaagactccatcgtttctgtttcgatttgtagtcctgatcggcttggctgaggggagttaatgccgtcggaagtcgatcccgccgaagctctcaaaggtttcttgagtactctcgttgtgcgaaagattagacattgtaaccaaaacaagggaaaaaacagagacagcctctttatttcctaaagaaatgtcgcagaataaatgaaatggcaaagattcagaaaggaaagaaagaatgagcggtcgcttttattactatggcggtggcgggaactctccgtacggctgggtagcctgggtgatcggtctggcggtcttcgtcggactgggcattctgctgctcccgatagttggagccattgttctgatcctcgccgcggtggctgtcgcaggcttcctattccgtgtggtggcgggtcttctgtctccagggagccgtgaagggaacgatattcccggagatatgccggggagcgccgaaccccctcagtcccgtcagccgaatcctgcgtcccccgaaccgattgcctgcgatccgactcttgaagtgaaggacgcggtggtgattgaagagattgacagggaaaatcgcagcgataacaacaggaaaaactcctgattagggaaaacgattatttgtcagaaagaagaaatttaactctgacgcttgactttttgtcctgttattcgcataatcctattctcgcttccccggaggggtgcctgagtggctaaaaggggcagactgtaaatctgttggcgtacgcctacgatggttcgaatccatccccctccaccaatttttcggtaagggaagaatccagtttgtatgggcgggaggtaaacctcgcgtctgttgggcgggtgtagctcaatggtagagcagaagccttccaagcttacgacgagggttcgattcccttcacccgctccaagatttatgcccgtgtggctcagtggtagagcactcccttggtaagggagaggtcatgcgtccgatccgcatcacgggcaccatttttctattggctgatgttcatcagccgcatctaccaagtccgggagctgttcaccatggcagaaaaagagaagtatgtacgtagcaagccccacgtgaacgtgggcacgattggtcacgttgaccacggcaagaccaccctgacggccgctctgacgaccgtcctcgcccagaagttcggcggcgcggctctcgcctatgatcagatcgacgcagctcctgaagaaaaggctcgtggtattacgattaactccgctcacgttgagtacgagaccgaaaagcgtcactacgctcacgttgactgcccggggcacgctgactatgtgaagaacatgatcacgggcgccgctcagatggacggtgccatcctggtggtggctgcttccgacggcccgatgccccagacccgtgagcacatcctgctcgcccgtcaggtcggcgtgccgaacatcatcgtttacctgaacaagtgcgacctggtcgacgatcccgaactgctcgagctcgttgagatggaagttcgtgaactgctgtccgagtacaagttcccgggcgatgacatccccgtcatccgcggttccgccaagctcgccctcgaaggcgatcagtccgagtacggcgttccgtccgtcctcaagctggccgagacgatggattcctacttcccggaacccgtccgtgaactcgacaagccgttcctgatgccgatcgaagacgtgttctccatctctggccgcggcaccgtggtgaccggccgtgtggaacgcggcatcatccacgtcggcgatgaaatcgaaatcgtcggtatcaagccgacccagaagacgacctgcacgggcgttgaaatgttccgcaagctcctcgacgaaggcgaggctggcgacaacatcggctgcctgctgcgtggtacgaagcgtgaagacgtcgagcgcggccaggttgtggccaagcccggcacgatcaccccgcacaccaagttcgctgctcaggtgtacgttctgaagaaggaagaaggcggccgtcataccccgttcttcaagggctatcgtccgcagttctacttccgtacgacggacgtgaccggcacgatcgagctcgaagagggcaccgaaatggtgatgccgggcgacaacaccacgatgactgtgacgctgatcgctccgatcgctatggaagaaggtctgcgcttcgctattcgtgaaggtggtcacacggtgggtgctggcgtcgttgccaagatcatcgagtaatacttttacgaaagaatcagttagctgatctaaatcagttgacatgatgcacaggatcgggatatactcccgatcctgttgttctttttatgttcttttttgcaggatatactagaaaatgcagtcccagcgcatccgtattcgcctgaaggcctacgattacaaacttatcgaccagtccgctcaggaaatcgttgataccgccaaacgtactggcgccgtcgttcgcggcccggttccccttcccacccgcttccagcgtttcgatattctccgttcgccgcacgtcaacaagacgagccgtgatcagttcgagatccgtacgcaccagcgtctgatggacatcattgatccgacggataagaccgttgatgccctgatgaagcttgatcttcccgcgggcgtggatgtcaagatcaaggttgagtaatcagctttgaaccagcccggttgcaggaaattctgtatcgggttaaaatcgcacctcttttttgccgccaaggctctattggtggtgttttttagtaacggtcccggccaatcgtagccggggtggagaaaataatgagtgataagcttggccttgttggtcgcaaggtcggcatgacgcgcattttcacggaggaaggtgtttccgttcccgtgacggtgctcgatgtgtcgaacaaccgagtcacagctgttaagacggaagctaccgatggttacaacgcgatccaggtcgcgtttggtacccgccgtcccagccgcgtgacgaaggctcttgcgggccagttcgccaaagccggcgttgaagccggttcttctcttaaagaatttcacgttgatgctgataaggtcgccgaattcaaggctggccagactctgagcgtcgaaatcttcacggtcggtgaaaaggtcgatgtgaccgctcacacgattggtaagggcttcgccggcgtcatcaagcgtcaccacttcaagtccggtcgcgctacgcacggtaactcggttacgacgaactctcccggttctaccggtaatcgtcaggacccgggccgcgtgttccccggcaagcgtatggctggtcatctcggcgatgtgcagcgcaccacccagaatctggttgtggcccgcgttgatgccgcccgtggcctgcttctcgtccgcggcgcagtgcctggtgccaagaatggccaggtcattgttcgtcccgctgtcaaggcttaaggagcgaccgaatggaactgaatgttattaatgaacagggccaggaaaccgcgaaggttgcggcttctgacgccgtgtttggtcgtgagtacaacgaagccctgattcatcagatcgtcgtcgcttacatggccaatgcccgccagggcacccgcgctcagctgactcgtgctgaagtgcatcattccaccaagaagccgttcaagcagaagggcaccggccgcgctcgcgctggtatgacctcttctccgctgtggcgtaagggtggccgtgctttcccgaatctgcctgaagaaaacttcagccagaagatcaacaagaagatgtaccgcgccgcgatcgcctcgattctgtcgaagctcgttgctgacggccgcctcgtcgtggttgattctctcgatgtggataccccgaagaccaaggcgtttgctgccaaggccaaggctctgggtgttgccgattctgcactgtttattgccaacgatgtcagcgacaatctttaccttgcttcccgcaatctgaagaacgtttctgtcgtcacgccgcgttacgctgatccgctgtccctgattcactacaagaaggttgtggttgaaaaggctgcggtcgctaagctcgaggagatgctgggatgagccaggaacgtcttaacagggtgctggttggcccgatcgtctctgaaaagagcacgatgctcgccgacaagaataaccagatcgccttccgcgtcgtgaaagacgcgaccaagaaggaagtgaaggacgccgtcgaactgctgttcaaggtgcaggtcgaatccgtccaggtcatcaacctgaagggcaagcagaagcgctttggccgctttgagggtcgtcgctccgacgtccgcaaggcttatgtgtgcctcaagcctggtcaggacattaacttcgcgcaggaggtgaagtaatggctctcgtcagcatgaagccgacgtccgctggacgtcgccacatggtcaaggtcgttcacccggaactccataagggcaagccgttcgctgctctgaccgaaaagaagaaccgcattgacggccgtgacaactacggtcacatcaccactcgtcataagggtggcggccacaagcgtgcttatcgtatcgtcgacttcgttcgtaacaaggacggcattcccgcccgcgtcgagcgtctcgaatacgatccgaaccgtaccgctcatatcgctctcgtgctgttcgctgacggcgaacgccgctacatcatcgccccgaagggcctgaaggctggcgacaagctggtgaacggttccgaagctgagatcaaggttggcaactgcctgccgctccgcaatattccggttggtacgacgatttgctgcgtcgaactcttcccgggtaagggcgctcagcttgctcgtgctgctggttcctacgctcagctgatcgcccgtgaaggcgagtatgctcaggtgcgtctgcgttccggtgaagtccgccgcatcggcattgaatgccgcgcgacgatcggcacggtttccaacgacgaccacaacctgcgtgaactcggcaaggccggtgcgaagcgttggcgtggtatccgcccgacggtccgtggtgttgcgatgaacccggttgaccatccgcacggcggtggtgaaggcaagaccggtaccggtcgcgcgcctgtgactccttggggtcagcttacccgtggctatcgcactcgtaacaacaagcgcacggacaacatgattgtccagcgtcgttatcggaaataagggggcgtaaatgtctcgttcgctgaaaaagggaccgtttgtagacgcttccctgatgaaaaaggttaccaaggcccaggagagccgcgataagcgcccgctcaagacttggtcccgtcgttctaccatcgttccggaaatgattggtctgacgatcgccgttcacaacggccgtcagcacgttccggtgtacatcaatgagaacatggttggtcataagctgggcgaatttgctatgactcgtaccttccatggtcacactgccgctgcagataagaagtaaggggaaatgatggaaactactgctattgttcgcggtgtgcgcctgtcggcccagcgtggccgtctggttgcagacctcgtccgcgggaagcccgtggataaggctctgaacatcctgaacttcacccagaagaaagctgcagtcatcatcaagaaggctctggaatctgccattgccaacgccgagcacaattttggtgccgacatcgatgagctgtatgtctccaagatttacgtcgagaaggcttcgacgctgcgtcgtttccaggcgcgcgccaagggccgcggttgccggatcggcaagcagaccgctcacgtcttcgtgacggtcagtgacgcgaaagctaagtaaaggtgaattatgggtcagaaaattaatcccaacggcttccgtcttccggtgacgcgcaactggacgtctcactggtatgcggttggccgcaacttctcccgcacgctgggtgaagatctgaaggttcgcagcttcctggaaaagaagctgaagaacgcctctgttggccgtatcctcatcgagcgtccggctaacaacgcccgcatcacgatctacacggcccgtccgggcattgtgatcggcaagcagggtgctgatatcgaggtcctgaaggctgaagttcagaagatgatgggcgtgcctgttcacgtcgacatcgaagaaatccgccgtcctgatctgtgcgccaagctcgttgctgagtccatcacccagcagctcgagaagcgcattatgttccgccgcgccatgaagcgcgctatgcagaacgcgatgcgtctcggtgccaagggcatcaagatcatgtcctctggtcgtctgaatggcgctgaaatcgcccgtaccgaatggtaccgcgaaggccgtgtgccgcttcagacccttcgtgccaacattgactacggctttgccgaagcccacaccacctacggtgtggtgggtgtcaaggtttggatctacaagggtgacgattttggtgtcgatgccgcgatggaaccggctcctgaacgcgaaggtcgtcgtggccgtcgcaacaacggcgatcgtccggcccgtacgggtgctcgccgcggctctgcgcgtcgtaacaatgaggctgaagctgcggctccggccaaagacggagaataagcaatgctgcaacccaaccgcactaagtaccgcaaggaccagaagggccgtaatcccggcctggccacgcgcggcgcgaatgttgcattcggcgacttcggcctgaaggcgctcgaacgcggtcgcatcacggcccgtcagattgaggcggcccgtcgtgcgattacccgccacattaagcgtggtggtcgtgtatggatccgcatcttcccggacaagcccatttccaccaagcccgctgaagttcgtatgggcaacggtaagggcaatcctgaatactgggtcgcccagattcagccgggtcgtgtgctctatgaaatggacggcgtggatgagtccgtggctcgtgaagcctttgccctggctgctgccaagctgccggtgaagaccacgttcgttgttcgccagatcggcatgtaaggagagacggcaatggacgttaaagaactgaaagagctcgacgtagctggacttaagaaagagctgaacgaacagggcgaagcccttttcaagctccgcctgcagaaggccacgcagcagcttcataacaccaaccagattcgcaatacgcgtcacgaaatcgcgcgtatcaagacgattctcgctcagaaggtggctaaataatgaccgaagaaaaagttgaaaagactctcggccacaccctcacgggcgtggtggtgagcgacaagatggacaagacgatcaccgtcctggttgagcgtcgcgtcaagcatccgctgtatggcaagtatgtcacgaagaccaacaaggtccacgtgcatgacgaagccaattccgcagcggaaggcgatacggttgaaatcgcggctacccgcccgatttccaagacggttcactggaacctcgtccgcatcgtgcacaaggctgttaagatctaatacctgcctcggcagatattgaatctggaagcgccggtcagaagaaattctgccggcgcttttaatttgcctggagagtcctgggaaaaatggaaaggggagctgaaaattcctttcagctcaaaaaagtacgctttcctcgttgcaacacttgggaagatcaactatactgctcgattcttgcagtcccgaaatcagtctgagagagttttcttttctctgaagtccctcaaaaggctgtgaaagactgcagaaaccgaggtagcagtcgtcttcctaactggttgaccctgttatcaaatcggtcccgatgaaactggcggcctcgagttgcaaacattgaaaatttagggcataatcctagactctacttttcaagaatgctttttgaaaagtcagctcacagttgggatggccgatgtttcctacattgaactgttccagctttctcccgtacgggaccaatactgtccgcattttgcggcataagttgggtatttgtagccatgattcagatgcaaaccaatctggacgtcgccgacaacaccggcgctcgttcagtaatgtgtatcaaggtgcttggcggctcaaagcgtcgctatgccaccgttggtgacattatcaaagtgacggttaaggacgctgccccccgcggccgtgtcaagaagggcgaagtctatgacgcagtcgtagttcgcaccgccgccgccatccgccgtccggacggctcctgcattcgcttcgacaagaatgcggccgttctgcttgacaataagaaggagcctatcggcacccgtatcttcggaccggtcacgcgcgaactgcgtaccgagaagttcatgaagatcgtgtcgcttgctcctgaagtgatctaaggagcgtaacgatgcagcgtatccgtaaaggtgacgaagtcatcgttaccactggtaagtacaagggcaccaagggcacggtaactgcccgcgttgatgaacgtcaaatcctcgttgaaggcgtgaacgtcgttaagaaggctgtccgcccgaacccgatgatcaatcagcctggcggcattgttgacaagaccatgccgatcgaccagagcaatgtcatgctgttcaacccggcttccaagaagggtgaacgcgtgtcctttaagatcgttgatggcaagaaagtccgtgtgttcaaggacggttctgtcgtcggcgccaaggcgtaaggagtcaagatgtctcgttttcatactctgtactccgaaaagattgttcccgaactgaccaagaagttcggctacaagtccattatggaagtgccccgcatcaccaagatcaccctgaacatgggtgttggcgaagcggtgaatgataagaaggtcgtcgacaacgccgttggcgatatgaccaagatcgctggccagaagccggttatcacgtacacccgcaaggccatcgcgaacttcaagatccgcgaaggcatgccgatcggctgcatggtcacgctgcgcggcgagcgtatgtatgacttcctggaccgcctcgtgacgatcgccttcccgcgcgttcgtgacttccgtggcgtttccggccgtgcttttgacggccgcggcaactacaacatcggtctccgtgaacagatcatcttcccggaaatcgagtacgacaagatcgatgctgtccgcggtatgaacatcagtattactactacggcgaagaccgacgaagagtccaaggctctgctcgccgggttcaacttcccgttccgcaattgaggcaggtaacaaatggctaaactcgcacttattaatcgcgaaaagaagcgtgaagcaactgtcgctaagttcgctgccaagcgtgccgccctcaaggcgattatcaatgacgctacccgctctatggaagagcgcatggaagcacgtgcccagctgcaggctctgccccgcgatacctccccggttcgcctgcgcaaccgctgcaccctgacgggccgtccgcgtggaaacttccgcaagttcggactttcccgttccatgattcgtgatgccgctatgcgcggtgacattcccggcctgatcaaggctagctggtaagcgaggagatacgcaatgagcatgagtgatccgatcgccgatatgctgacccgcattcgcaatggtcagattgtcgacaagacggaagtggcgatgccctcctccaagctgaaggtggctattgcccaggttttgaaagacgaaggctatatcgacggtttttctgttgtcgctaacgacggcaaggctgaactgcacattggcctgaagtactatgccggtcgcccggtgattgagcgcattgagcgcgtctctcgccctggcctccgtatttacaagaaccatcaggacatcccccaggtcatgaacggccttggcgttgcgatcgtctccaccccgaagggtgttatgactgaccgtgctgctcgcgctgctggcgtgggtggtgaagtcctgtgctacgtcgcttaatcgggagataaagaatgtcgcgaattgcaagaattccggtcgtccttgcttccggtgtcgactgcaagattactgccgatagcgttaccctcaagggtaaggtcggcgaagtttcgactcacatcctcccgcttgttgaaatcaagcaggacggcaacacccttcacttctctgcgaaggatgagtcccgtgaatcgaaccagaactccggcacgatgacggctctcgtccgctcgatgaacaccggtgtttctgttggctttaccaagactctgacgctggttggcgtgggctatcgtgcccaggctcagggtcagaagcttaacctttctctcggcttctcccaccccgtcgtgcatgaaatgcccgaaggcgtgactgtgaagaccccgacgccgacctccatcgtgctgttcggtgccgataagcagaaagttggccagactgcagctgtcattcgcagctaccgtaagccggaaccctataagggcaagggcattcggtacgagaacgaagttgtgatcctgaaagaaactaagaagaaataagcgagacggatatgattaacaaagagaaaagccgtcagcgtcgcgcgcgtgctacgcgtgcccgcatcaagctgcagaaggtgaatcgtctttcgatccatcgtaccaacctgcacatctacgcgagcatcatcagcgccgacggcggccgcgtgctcgtttctgcctccacggttgagcgtgaagttcgcgaccagctggctgctgctaagagcaacggcggcaacgtgaatgcagccaagatcattggcacccgcatcgctgaaaaggcgaaggcggctggcattgaatcctgcgctttcgaccgttccggataccgttatcacggccgcgttgctgcgctggccgaggccgcgcgcgaagccggtctcaagttctaaggactgagcacaatggctaagtttcaaggtaagaatgcggctgctgctgatgacggcttccgcgagaagatgattgcggttaaccgcgtcaccaaggtcgtcaagggcggccgtatcctggcgttcgccgctctcacggttgtgggtgatggcgaaggccgtgttggcatgggcaagggcaagtcccgtgaagtccccgctgccgttcagaaggccatggatcgtgcccgtcacgacatgaagaagttcccgcttaaccacgggaccgtcttccacaccgtcgaaggccatcacggcgcttcccgcgtgatgctccgcccggcccctgaaggtaccggtatcatcgccggcggcccgatgcgtgctgtctgcgacgcgatcggtatcaccgacgtgtacgccaagtgctacggttcctcgaatccctacaacatggttcgtgcgacctttgatgctctgaacaacatgcggtctccggctgaaattgctgccaagcgcggcaagacggtcgaagagattgttggctaattcaggagatattggaaatggctgacaagaagactgtaaaggttaccctggtccgcagcccgatcggctgcaaggccgatcaccgcgctacggtgctgggcctgggactcaagaagatccgtcagactcgcgagctggaagacacgcccgcggtccgtggcatgatcaacaaggtttcgtaccttgtccgtgctgaatgatccgaggataaaaaatgcgtttgaataccattaagcccgctgaaggctccaaggcttcgatccgccgtgtcggtcgtggcgttggttccggcatgggcaagaccgcgacccgtggtcacaaaggtcagaagtcccgtgctggcggcttccacaaggttggttttgaaggcggccagatgccgctgtatcgtcgtctgccgaagcgtggctttacttcccttacccatcggttcgtggaagaagtccgcctgagcgacctcgaagccctgcctgttgaagagattgatctgctcgttctgaagaacgcgaacgtcgtgtctccgcttaccgctgaagcccgcgtgatcctgtccggtgccatcacccgcaaggttacgatccgtggcctcaaggtgacgaagggtgccaaggctgccatcgaggctgccggcggcacggtgatcgcagagtaatttcttcactaggggcagaacgtggcgtacagccgtaaaactaaggagcagagcaaggggaagtacacggacctgaaacagcgtctcgtgttcctcgcgcttgcgctcgtcgtataccggatcggtgctcacataccggttccgggaattgatcctgatatgctccagcagctgttcaatcagcagcagggcggcattctcgggctgttcaacatgttctccggtggcgctctctcgcggttctcgcttttcgcgctgggtatcatgccgtacatttctgcagccattattctgcagatgctgtcctacgtgatgccctcgctcgaagctctccgcaaagagggagagtccggacgaagaaagatcactcagtacacgcgttacacgacgctcttcctgggtctgttccaggctttcggtatttccgcggcccttcagacccagcctggcctggtaatcaatccgggtttcgtgttccagttcacctgcgtcgtttccctcgtcacgggaaccatgttcctgatgtggcttggtgagcagattacggaacgcggtcttggcaacggtatctccatcatcatcttcgcaggtattgtggcgggtcttcccaacgcagttaccggcctgatgcagctggtgagcaccggcgctatcaacccgctcgcggcgatcttcgtgatcgctgtcgtgctggctgtgaccgccttcgtggtgtttatggaacgcggacagcgccgtattacggtgaattacgcgcgtcggcaggttggccgtcggattatgggaggccagtctacgtacctgcctctcaagatcaatatggcgaacgtgattccgccgattttcgcttcctccctgattctgttcccggctacggtcgcgggctggatgacggccagtgattccaatcgctggctccgtgacctggctgcgtccctcgctccgggacagccgatctacacgctgctttacgcaacgctgatcgtgttctttgcttatttctatacggctctggttttcaatccgaaagaaacggcagataacctgaagaagggtggggcgttcgtccccggcattcgtcctggcgaccagaccgccaagtacattgatcgtgtgcttcagcgtctgaccctgagtggtgcaatttacctggtgttcgtctgcttggttcctgaattcctcaatctgaagttcaatgtgcctttctacttcggcggcacttccctgctgatcgttgtggtggttgcgatggactttatgagccaggttcaggcctatctgatgtcccaccagtatgaaagtttgctgaggaagactaacttccaaggttttggccgggggatgtgatcccggcgtaataaaggatgcaggcggtttctgcaaaccgctgatctggcgaaacggggagcacccatccagtaggaattgcacctaaagagttgaaaaggatgcactacatccaattttcagcttgtgcaaaaccgaaaaatggtttatgctctctcgtttctgtcagaatgcatcagatcccatgcccgtgagggtatggatggagatgaaaatgaaggtagcagcttcggttaaacgcatgtgccgtaactgcaagatcgttaagcgcaagggtgttgtgcgcgtgatctgcagcgacccgcgtcacaagcagcgtcaaggctaaagaggtaaagtaaaaaatggctcgtatcgccggtattaatattccgccgaatcagcatgccgtgatcggtctgaccgccatctatggtatcggtctcacccgtgctcgcgacatctgtgatgcttgcggaatcccgcagtccaagttggtcaaggacctcaatgatgaagaactcgaaaagatccgtgatgcggtctcgaagttcgtcgtcgagggtgacctccgtcgtgaaattcagctttcgatcaagcgtctgatcgacctcggtacttatcgtggcatgcggcatcgtcgcggtctgccctgccgtggtcagcgtacccgcaccaatgcccgtacccgcaagggcccgcgcaaggttggtgtcacgcttaagaagtaatttagaggattagcatggctggcaacactaataaaaattccgcagcttcggctcgcggtcgtaagaaggttcgcaaggttgtgacggaaggcgtcgctcacgtccacgcgtccttcaacaacactatcatcacgatcactgatcgccagggcaacgtcattgcggcgtcctcctccggtgctcagggtttcaagggctcccgtaagtccacgtctttcgctgcacaggttgctagcgaaaaggctggccgtacggctcttgaatatggtcttaagaacgttgacgttcaggttttcgggcccggcccgggacgtgaaagcagcatccgcgctctgaatgccctcggcatccgcgttacctccatccaggatgtgaccccggttccgcacaatggcgttcgtccgtcgaagcgccgtcgcgtttaatttcttttaatttttccgtgtcctttctccacaaccgggagaaaagactgaatgcggttttatccgcaggataagagaggctaattttaaatggcacgttatctcggtcccaagctcaagctttcgcgtcgcgaagggggcgatcttaaccttaagagcgcccgccgtcccttcgaagacaaagtgaaggatgctaatactaagccgggccagcacggcaaagtttccggcactcgcatgtcggactacggcaaccagcttcgcgaaaagcagaaggtcaagcgtatttacggtctgctcgagcgtcagttccgccgttatttcaagaacgccgaagcgatgcgcggcaacactggtaccaacctgctgctgctcctcgagagccgtcttgacaacgtggtttaccgtatgggctttgcatccacccgtgcagaagctcgtcagcttgtgagccacggcgcgatcgctgtcaatggcaatcgcgtgaatattccttccgcctcggttaagcccggggatgttgtctccatccgcgaaaaggcccgtaagcaggcccgtatcgctgaggctcttgaactcgccgccggctctatgcccagctgggttgccgtcgacgccaagaagtttgaaggcaccttcaagaacctgcctgagcgtcaggaattcgatcctgatgtgaacgaacagctcgtcgtcgaactgtactctcgttaatcaggcccctgatggtccggatcgtagtgcgatccggtccgtcaagtgcaggaaaagcgcggatagtccttttggggcactgtccgcgtttctttacttttaagcccctgacctccatcagccttatcggtgtaacgagccgagggtattgaataggaacgtcgatttatgtttaatgcagaactgctcaagccgaacaacattgatgtcgcgcttgatgagaagaatccgaaccgtgccgtgatcacgctcgaaccgttcgagcgcggctatggtcacaccctgggcaatgcgctccgccgcattctcctcgcctccatggtgggctatgccccgaccgaggctgagatcacgggtatcgtgcacgaatactcccagattgaaggcgtgatggaagatgccgtcgacgtcctcctcaatctgaagggcgtgatcttcaagcttgaaggccgtgaggaagtttctctggttctccgcaagaagggcaataccgttgtgacggcggccgacttcgacctgcctcatgacgtcgtggtgctgaatcccgatcatgtgatcgcacacctcactggcggccgtcttgagctgaaggtgaaggttgagaagggccgcggctatcagccgggcaacgtgcgtgctttcgctgacgatcattcccgtcagcagattggtcatctcctgatggatgcttccttcagcccgatcgtccgtgtcgcctatcaggtgagcccggcccgtgtcggtcagagaactgaccttgataagctcgcgctcgagatcgtgacgaacggcgttatcacgccggaagaagctctccgcgaatccgtccgcatcctccaggatcagctgtcgatcttcggctccatcaagaccgctgctgctgacaaggctgaacccgaggaagaaagctccgtcaacaatccgccgccgcttgatccggttcttatgcgtccgattgatgacctcgaactcacggttcgctccgcgaactgcctgaaggccgagagcatctcctacatcggcgatctgatccagcgcaccgagaacgaactcctgaagaccccgaatctgggccgcaagtccctgaacgagatcaaggaagtcctcgctgcccacggtcttacgctcggcatgaagcttgagaactggccgccccagggtcttgagcgttaatttgtaattgcagttgcgcaaagccggcgtttggtgtaatctccgcctgctttgcgcttcgcaaaacattgctttacccgtccgcctcctggtttctctcgaggatagaagagtcgggattcttctgcctttgccggcagatctcaaaactaataggaatttacaaaatgcgtcatcgtttaggtcttcgtaagcttaaccgcaccagcgcccatcgtctggccatgttccgcaacatgtccgtctccctgcttcgtcacgaagccatcaagacgaccctgccgaaggcgaaggaactccgccgcgtggttgagcccctgatcacccttgccaagaacccgaccctggccaaccgccgcctcgcgttcaaccgcctccgtgatcgcgagatcgttcagaagctgttcgatgaaatcggaccgcgcttcgccaaccgcaacggcggctacacccgcatcctcaagatgggcttccgcccgggcgacaacgctccgatcgcctacatggaactgaccgaaaaggctgctccgaaggctgagccggttgaagaagaaaacaagtaatttctgattcagcttaaagccgccggcagtctccggaccgccggcagtttgaatcgaacgggtcttttcctgcaaaggggaagatccgttttttcttgcggggaacgccgtggatcagtctgaaaattcaactgtcagaatcgataagtggctctgggccgcccgtttcttcaagacgcggagcctcgcccaggaagcgcttgagctcggacgcgtgcgtgagaacggtgaccggatcaagccgtcccggcagctgcacaccggggagcttctttcagtcactcgcggcgaggacacgatggaagtcctcgtcacggggctgagtgacaagcggggatcggcgacagacgccgcgaagctctatgaggaaaccgagtcgagcaaggcgctgaggcgctcaaggaaggatattctgaagcttgccgcagagcccgcgggaagcatccggggagggcgccccacgaagcgtgagggacggaagctccggaacttcaggaacagcttttgagaaggcagcaaaaaaaacctggctcgcgccaggtttttctttaccggaaagtgagtgtccggatcagtactcgtagccttccttcagccagcgggcgacatcgagcgagcagtacgtgaggatgccgtcagcgccggcgcgcttcgcgcagatcatcgtttccatcgtgatcttcttctcatcgattgcgcccgcggcagccgcgaacttcagcatggcgtattcgccggacacatggtagaggaaggtcggagccttgaattcttccttcacgcgccacagcacgtcaaggtacggaatgccaggcttcaccatgaccatatccgcgccttcctgcaggtcatagccgacttcccagagggcttcgttgccgtttgccggatcctgctggtagacgttcttgttcgagcggccgaggttcgaggaggaacccacggcgtcgcggaacgggccgtagtacgaggaggcgtacttcgcggagtaagccatgatccgggtgtagatcaggttctctttctcaaaggcgcggcggatcgtgccgatacggccgtccatcatgtcagacggggcaatcacgtcagcgcccgcgcgggcctggcagagggactgcagcacgagctgctccacggtctcatcattcatgatgaagcccgtgtcgtcgatcaggccgtcctggccgtgcgtcgtgtaggggtcgagcgcgacgtcagtcatgatgccgagctcagggaacttctccttcaccgccttgatcgtgcggggaatgagaccgtccgggttgtgggcttcgcgaccgtccggcgtcttcagttcctgttcaatatgcgggaagagcgcgatcatcggcacgccgagatcaacgcactcctggcagacttcgagcagttcatcgatcgaaagacgggaaacgcccggcatcgtcgggatggggtcgcggcggtgttcgccctcctggacaaaaaccggcaggatcagatcgttcggagaaagcgtcgtttcacggacgagtctgcgggaaaagctgtcatgacggttgcggcgcatgcgcaccataggaaactgaccaagagtctgcatcgaattgcctcaaaggtattaaaacaagagcgtccgggggcgggctgtgccgcgatggacgcgtctattgggattagccggaaggatcagaggccgagccacccgtcgagggttgcccggagctcttccacaccggtcttcttcagcccggagaagtactgcacggagaccggattcacgcaggtttccgcgcgcttcttcacggccgctattacatcacgccgttctgaaaccgtccttaactgatcctccttattgatgagccagaccatcttcgcagtggggcggtttctcatgaactcaatcacccattcgtcggagggcatgaacggacggcgggcatccatgatgagcacgacgccaagcagcgcgctgcgctccgagatgtagccgccgacgaggtcagaccaggaggaacggatgttcgccgtggtcttcgcgtagccgtagcccggaaggtcgacgagatacgcgacgggatgccgttcgtgggtcaccttgtccttggtcgcgagctcaaagaagttaatgagctgggtgcggccgggggtcttcgaagcgaaggcaagctttccctgacgggtgagcgtgttgatcgcggtggacttgccggcgttggaacggccggcaaaggcgatctccggcacgctcgccggcggaaggttgtcgagcttgctcgaggaaacagtgaagacagcgctttcgtagatgctcacgacggatcctatcgggtatgtatgaggttgaatgttcagctgaagattatcgcattaacggcaatcaggatttgccgaacacctcgttcagctgctgcgtcacgcgcacgaacgtcgtacggagcgtgagctccttcagacggcgggcgcctacataggtgcaggccgagcgcaggccgccgaggatctcctggacggtgccggcaaccgggccgcgggacggcaggaacacttccttgccttcggaggcgcggtacttggcgacgccgccggaccacttctccatcgcctgctcggagctcatgccgtagaactgcttcattgtcttgccgtccttcgtgatcgtctttccggcgcattcatcgtgagccgcgaacatgccgccaagcatcacaaagtcagcgccgccgccgaaggccttagcgatatcgcccggggtcgtgcagccgccgtcagcgcagatgcggccgccaaggccgtgggcggcgtccgcgcattcaatgacggcggagagctgcgggtagccgacaccggtcatcttgcgggtgaggcagacggagcccggtccgatgccgatcttcacgatatcggcgccggagagcaggagctcttcggtcatgtcgcccgtcacgacgttgcccgccatgatgacgagatccggatacgtgtcgcggaccttcttgatgaagttcacgaatcgttccgtgtagccgttcgcgacgtcaatgcagacatactgcacggcgcccggggccttgcggttcacgctctggaatttctcccagtcatcgtctccgatgccgagcgtatagaaagcggtggccttgcgttcgagctccgtgaagaacttcacgagctcatcctcgctgtagtgcttgtcgagcgcggccgacagcatgaaggggtcgagcgccttcgccatttcaaaggttcccgtcgtgtccatgttggccgcgatgaccgggatgccgtgataggcaacaggcgcatgcaggaatttgaagtcgcgcgtgatatctacttccgagcgggaaataagggtggagcgcttcggacggatcagtacgtccttgaagtcgagccgcagggtgttgtcaatatgcattaaaaaaatctcctaaccaaaatcttgcgcgcgcaaaaaacgccggctcctttcacggaaccggcgttaacctagtgtaccttgaattaaggcgcggtgggaagcttttttagagcgtcgggagatgctcgccgcgccagagatcttccggcttctcgcgctcgcggatcacctgcgaggtgctgccgctcacgagcacttcagccgcgcgggggcgggagttgtagttggagctcatcgccatgccgtaggcgccgcaggacgtgatcgcgaggacgtcacccggctcaatgcagagctcacggtcacggccaagccagtcgccgctttcgcagatcggaccgacgacatcataggtgcgggtggcgccatcccggggcacggccggcacgatacccatccaggcctcgtagaacatcgggcggcccatatcgttcatggcggcgtcgacgatcgcaaagttcttcgtttcaccggtcttatcgcggatcacgcgggtgatcaggatgcccgcgttcgcgatgatggagcggcccggctcgagcgtcacggcgaggtgcttatagccgcgggcttcaaggtgatcgaggatcagacgcacgaattcgcgcttggagggcggcacttcgtccttgtagcagacgccgagaccgccgccgaagtcgatgtgttcgagcggaatgccttcggccgccagctgatcgacgatatcgagaatcttttcctcagcgtccgcgaaaggcgaaagctccgtgatctggcttccgatatggcagtcaatgccgaccacgcggatggagggcatcgcggcggcttgcttatagagttccacggtcttctcgtaggcgacgccgaacttattgttcttgaggccggtcgagatgtaggggtgggtcttcgcgtccacgttcggattcacgcggaccgcgatcggggccacctttccgagggaagcggccacgcgcgcgatgtcattcagctccggaacgctttcgatattgaagcagtggatgcccttttcgagcgcgagagcgatttccttatcggtcttgccgacgccggaataaacgaccttcgacaggtcgccgcccgcggcctccacgcgcagcagttcgccgcccgacacgatgtcgaacccggaaccgagcttcgcgagcaggctgatgatgccgatattcgagcacgccttcacggagtaaagaatgtggtgcggatgagagccaaacgcgccgtcgtagtcgcggaaggcggtctcaatggccttgcggctgtagatgaaggacggggtgccatacttgtcggcgagttccgtcacgggaacgtcctcacagaagagcgcgccgttccgataggaaaagcccgtttcatcggggagccagaaggaagtcatgatgttttttcctgatgtaagtaagtgcggcggtgcagggggaatcagcgcttcggcgagggagcctcggctgcctggctgccgccgggcgtgagagtaattctggtttcagtagaatcggaagcgttcgaagcagatccgccgtccgtgtctttcttctcgatcggtgtattcagaacgggaatactgtcccccgccccgtttggaacggatctcttcttcgggagataaagcggccccttcagtccgcagcccgtcagcaagagcggggatgcaagacctaagagcagggcagtacgtataaaggttcttttctggatcatgaatcagactcttttcattgaaaaagcggaggcgctccttcggaaagttgaagattccgacgcgctttccatggctgacgcggatcgctccggcaatgttctcactatcgaattcgacagtggtgaacaaattgtaatcaacattcagacaccgactgagcaggtgtggcttgcgtcgagggtgacgggaggctttcacttctcctgggacggcgaagcatggaaggattcagacggtgaggatttctggagtgtgctcggccgggcagcttctcagctgtccggcgagactgtgacgtttgagtaacggggctagaagagtttcaggagggagttgagcggatcgcttgactcactcttttccccgctcggggaggcgctgtcatgcgacacctctctcgattcggagtagacccattcaccgtcgctctgcctgactccaggcgggggcaggcggttgaagatcggctgcccgcgggtagcggtcttcatgaagtcaatccagaccggctgcacgagcgtgccgcccgtggccctcgatccgagggaatgcatctggtcataacccatccagccgaccgcgacgaggttgccggcaaagcccgcgaaccacgcgtcgttcgagtcatttgacgtaccggtcttcgcgccgacatccgggcggccaagagcggaacccgcgcgggccgcggtgccgcggcgcgcgacgtcattcagaagtgtcgacatcacaaaggcattgcgggccggaatcgcgcggattgtctcatcgcccgactcgcggttcgcctgcgtcatgatgacgcggccgctttcatccacgatcttgtcaatcaggtagggctgcacgcggtagccgccgttcgcgaagattgagtaggcttcgcacatctgccagatcgtcaccgtgccggaaccgagcgcggtggagagggtcgggctgtggcgcgaggcggggaagccgaagcgcgtaatgaattcctgcgcatacttcgggccgatcgcgtccatcacacggacaaccgggatgttttccgacttttcaagcgcggtatgaaggggcatcggaccctcgaaccggccgtcgtagttcttcggcgaccaggccgtaccgcccgcctgacgggcatccacggtgaacggcgtgtcctgcagaatcgtgttcggcgtgaagcccttttcaagggaggccgagtaaacgaacggcttgaagctcgaacccggctgacgccaggcctgcgtcacgtggttaaacatgttgaggtcgtagtcgaagccgccgacgagcgcgcgcgtcgcgccgttccggaagtcagtcgccatgaagccggtctgaacctgcggcacctgggcgagcgtccagccgctgttcgtgtggctcacgcggatcaccgcgcccggacggatccggagcgcttcaggagcgctcgacttcaggtaggcggcgccgaaagagttcgaggcgcggtcgagcgtgatggtctttccggaggcgaaaaccgccttgatctggggtgaagtgctgagcaccacagccggaagcaggttcgggctcgaaatcaccttgcggagcgcttccttcacagccttttcctgatccgcggggttcgcgggcagcgtcatctgggcctcggcgccgcggtagccgtgagcgcggtcaaacgaaatgatgttcgcgcggaccgcgttgtaggccgctttctgatcattcgaattgatcgtgaggtagacattgagaccgcgcgtgtaggcgtcatccttgaagatgtcgtacaccagctggcgcgcgagttccgtcgcgtactcagcgtggagctgcaccgagtggcgtccggcgatcgcctcagcaatcgcgtccttcacgtagacgggctttgcctgttcctgctggctcgtctgttcgctgatgaagccgagcgtagccatacggccgagcacgtaattgcggcgcatcgtggcgcggcggttattcacgaccgggttataggcagacggcgcgaccggcagacccgcgagcgtcgcagcctcaccgaccgagaggtccttcaggggctttccgaagtaggtctgcgaggcggagccgaaaccgtaggcgcgctgaccgaggtatatctgattcacatagatttcgagaatctgatccttcgtgagctcatgctcgagcttcgttgcgatcgcgatttcgtagagcttacgcatgtagctcttctcggacgagaggaagcagttacgcgccacctgcatggtgatcgtggaaccgccctggcccttgcgtccagtgatgatgttcgtgacgagcgcgcggccgatgccggagagatcaacgcccgagtgctcatagaagtcagagtcttcagccgcgagaatggcgagtttcacctggcgcgggagctcctgaatcgggacatagtcccggcgttcctcaccgtattccgcgagcagctgaccgtccgcggaccagatcttcagcggcagcttcggctgataggtacggagggacgtcatgtcaggcagctgggcgtagacgatggcgaagaggaaagtgaaaaggagcaggccgcaggcgacacaggccgtgatcatcccgccgagccatacgagggtgcgggacagactgcgcttcttctttggtgtgttgtccagattattcacggaagcagaaatgccggccgggatatcacgcaatcaggcgttttatcgcatccggtttgcaaaggaaccatgggaagcttcattataagagggaaaaagtttctcccactctcaggtatttaccaaggtgtgagaaatcatgaacgttgaaaaagatatccgttaccggggagaaggcggacggcatgaagcaggtgatctacatgatcggcatgatgggtgccggaaagaccacagtggggcggacgctcgcgcagcggatcggctgggacttcattgatatggaccgggagatcgagcgtgagcagggaaagcggatctcagagatcttcagctcagagggggagcccgcgttccgcgcgatggagactgatctcctgaaacgcctcgccggccgccggagaacggtgatcgcgacaggcgggggcgccgcgctttcacctgaaaaccagcggcttcttgcgcagagcggactcgtgatttaccttcgggtgtcgcctgacgatgtcctcgcccgcacacagggagacgccacgcgcccgaacctgatggctgacgataagcgcgcccggattgagtcgctcctcgaaatccgttccccgatttactgcgccaccgccgatatcagtttccggagttccggcgcctcatccggttctcttgtcgccaaaatactgaagcaccccaagctgaagaagctgattgaggatgccgataagaatctatagggagtagcagatggttgaaataacagtcgaactcggaagccggagctatccgatcgagatcgggccggggcttctcgcgacgatcggtgagcgggtgaagacccttcgccccacccggatcgtgatcgtgacgaacaccacggtagcgccgctatacctcgccgcggttgaaacttcctgccagagcgtggctcctgtgtcgagtgtcgtgcttccggacggcgagagctataagacgtttaccgccgtgcagcaggtgctggacggcctggtggccgcgggggctgaccggaagtctctcatcatcgcgctcggaggcggggtggtcggagacatttccgggttcgccgcgtcaatctggatgcgcgggatccgtttcgtgcaggtgccgacaacgctcctcgctcaggtggacagttcggtgggcggaaagaccggtgtcaatctcccggccgggaaaaacctgatcggctgcttccatcagccctccgcggttttcgcggatacggaaacgcttgagacactccccgcgcgcgagatttcggccgggctcggtgaaatcgtgaagcacgggctcctcggggacgctgcttactttgatgaggtggagcgccggatgaaggatctccgctcgctcgatcacgaggcgctcgcctctgtgatcgcgggctcctgccgcctgaaagcgtctgtcgtcgcccgggacgaaacagaggaggggatccgcgccacactgaacctcggtcacaccttcggacacgcgattgagaagctcgcggggttcggcacgtggctgcacggtgaggcggtcggctgcgggcttgtgctcgctgcggatctttcgcgtcgcctcgggtacctgacagacgccgatgtctcgcggattgagtctgtcgtctcggcagccggccttccggtccggattccggggctgccgcttgaggccgccattcagtcgatgcggggcgataagaagagtttcgggggccatatccgctttattgttctgaagaaaatcggggaaagcgccattcaggaggtgcctgacacgattctgcgggaaacgctgcttcagggcggctacgttccctgagcgggaatcctgctatggcgagactcgcgaggctcacgattccgggtctcccgcaccatatcctgcagtccggggccggggtgccggtcttccggagcgatgacgactgtctcttctatattgagtgcctgcagcgctgcgcccgggagtccggcgtggcgctgtacgcctatctgctccttccggaaagcgtgcggctgatcgcgtcgccgcggtcagtttcctctctcagcatctttatgcggcggctttcccgccgctacgcggtctggtataaccgggtgcactcgcatacgggccctgtctggcaggggcggtttcactcgtcggtgcttgagccggcgtcgcttcagaagctcactctatatatggaggggctgccggtgcgagaggggtttgtgaagcggcctgaacagtatgtctggtcaagctacgcgcatcacgccggattcagaacagatccgtttctgaccgagccggactcgggggatgaatcccgcgcgccgcgggacgcggcgtgcagggcttaccaggaactctttaatatggagtctcttcagccgttcggcgaggaggcggagtggaagacaagacgcgggtggccgatcggatcggcgccgtttgttgactcgcttccggtgagtgaagaaagaaaaagagcagcgcggggccggggccggccgcggcgggaaggaatcaaggcagatggcaatcgcaatttatgagaagaagatcgtggtcacggaggcttcgatcgatatccttggtcacgtgaataaccgcgagtatctgcggtggatggaagaagtggcgatcgaacactcggcggcgctgggctggccgcaggaacgctatatggcggagcagcatgtgtgggtcgcgcgcgagcactggattgaatacctccgcccggcgcttctcggggatcacctctcggtttacacgtggcttcaggaaacggcggggccgatctgcctccgccgctacgcggttgtccgcggccgcaccgtgctcacgcgcgccgcgaccgagtgggcgcatatcgacttcaaaacaaagcgcgccgtgatgccgcccgataaccttatcaatgacttcccggtggtgccggccgattccccggaactgaaagcgctcggtcttgcccgtccggtgagatggcttcctgtgagcctgtcagagcgcgccgggaattaaaagacccccaaatccggcatttacagtcctgagaagcctgcttttctgtgcgataatcctcacaagctatacctgaacgatcgttcaggcagaaacaataataaggttcgggcggccctgggccgctggacagaaggctgatgcaagaatttctcaaaattgatcatatgaccttcgggttcggatcccgcatgatcctggacgatgtgtcactctccttcgggaagggacaggtcgttgcggtgatgggcggttcaggcatgggcaaaaccacgattctgaagctgatcggcggactcctgaagccctggagcggtcatatttatatggcgggcgaagatgtccacgcgctgagccgggagaagctcttcgggcttcgccgccgcatgggtatgctctttcagttcggagcgctcttcacggatctctccgtgttcgagaacgtggcgttcccgatgcgcgagcagacgtcgctcgacgaagaggcgatccgcgatctcgtgctcctgaaactcaatacggtcggactccgaggagcggctcacctgatgccgtccgaggtgtcaggcggcatggcgcgccgcgtggcgctcgcccgcacgatcgcgctcgacccggagctgctcctttatgacgagcctttcaccggtcttgacccgatttcgatgggtgtcacggcaaggcttatcaagaatctcaactcggcccttcacgcgacgagcgtcgttgtgacgcatgacgtgaagaccacgtttgagatcgctgattacgtttatatgatttccaataagaaggttgcggctcaggggacgccggatgaactgatgaagtcggacgatccgtacgtccgtcagttcctcggcggcctgcctgacggtccggtggcgttccactatccggcgccgccccttgctgaggatctgggggtgacgcgatgaattggctgacagagcagatcagcgcggtgggtgcctgggtcctgaatcagattgtccacacgggacgcttcgggcgcttctcctggcaggtgatccggaagttcccagcgagcctgaagcgtttctcgattgtcgtgcagcagatgatgttcctcgggaaccactcgctgctcattatcgcggtgtcgggtttcttcatcggcgcggtgctggggcttcagggctatgacattctcgtcacttacggcagcgaagaggcgctcggcgttcttgtcgcgctcgcgctgatccgcgagctcggccccgtggtgacagcgcttctttttgccggacgtgccggcacatcgctcaccgcggagatcgggctcatgcggtccggcgagcagctttccgccatggagatgatgggcgttgacccgatgcagcgcgtgatcgcgccgcggttcgccgccacgatgatttcgcttccgatcctcacgatgatcttcaacgcggtcggcattatcggcggctacgtggtcggcgtgtggctgatcgggtctgacagcggcgcgtactggtctcatatacaggcctcggtcgatgtcttctctgatatcggcaacggcgtcatcaagagcattgttttcggcatgatcgtgggtctggtggcgctcttccagggctacacctcgcgcgccacgccggagggagtctcgcgggcgactacccgtacggtggttgtttcctcgctcctcatcctcgcatttgatttcattatgacggcgatgatgttcgcttcataaagagaaacggtataaaaaaatggaacagaaaaaaacggattttctcgtcggcttattcgtgatcctcggagtggtcgcgcttctctttatggctctgaaggccggcaacatgctgtcgctgaatatcgggcagaagacctatgaagtcaccgcggtcttcgcgaacgccggcggcctgaagccccgtgcggcggtgagcagcgcgggggtcaccgtgggacgcgtgaagtcgatcgagcttgatccgaagaccttccaggccgtggtgacgctggatatttacagccagtaccagttcccggcggacagccaggcacgcatcctgacggccgggctgcttggcgaaaagtatattggtcttgaggctggcagcgatgacgccaacctgaagaatggcggccgcatcgaacagacgcagtccgccattgtgctggagaatctggtgagccagttccttttcaacactgctgaaaagaagggaacggcgccggaaaaggcggaataagatgcgaacgatgaagagaacagctctgattgcgtcgcttgccgcggcgatgctcgcgggatgcgcaagcgttccgccgaattcgggagaaaacaaagcggacccgtgggagacgatgaaccgccagacgtacgccttcaacaccacggtggatcactatgtgttccgtccggtggcaaagggctacaaggcggtgacaccgaagcccgtgcgtacctgcgtgagcaacatgatggataacctcaccgaaccccggaacgccgtgaataacgtgctgcaggggaaggggaacggcgccttcgtgtctttcatgcgctttattgtgaattcgacgttcggcgtcttcggctgttttgacgtcgcgagcatgggagatctcacgccgcactcagaggacttcggccagacgctcggtacctggggtgtcgggaacggtccgtacctcgtgctgccgttcctcggtccttccactgtccgcgatacggtggggctcggcgggaactatgtaacgtcgattcagagctggatcgatcctgactgggtcggctggacaatctggggcgttgatatgctcgacacgaggacaaggctccttgacctcgatgaggcgattgactccgcgattgacccgtacgcccagatgcgtaacggttacctgcagtaccgcgcgacgctcgtgaacgacggcgtgccgcccgataatacgttcctcgaggatccgggtgacagcccggcgcctgatgaacccgcggcttccgcgaagactcaggcgaaagctgccgaaccggctcctgccgcagcggcccccgctcccgcggcgaaacaaaactgactgaattttgaataaggaaaagaattaaaaatgctgacccgtcgtagttttattgccggcgccgcgctcggcgccgccgctatgctgtcgcccgccgcgtttgccgcgtccgcgactgacaaggatccgtctgcctggatcgtcgagctgatgaacgacacgctgaatgacatccgcaaggatccggcgctcgtgaaggcggatccgacgaaggttcacactttcgtgaataaccgcatcatgccggttgtcgacttcgcgaagatgacccgcacggccgtcggcccccagtggcgtcaggccaccgcctcccagcgccagcagctgcaggatggattccgcagcctgctgacgcgcgtctactcgggcgctttcagctccgtgaaggactacaaggctgagctcgtgccgagccgcgccgccgcttcctccacgccgatcattcagacccgcatggtttcgaagaccgataagccgatttcggttgagtaccgcatgcagcgcgagggcaacacctggaagatcatcgacgtgaatgtcggtggtgtctggatggtgcagaactatcactcccagttcgcgggtgttctcgcgaacggcggcattcctgccctgatccgctccatgaacgacaagacttcgtccctcaaccagaaggcgaagaagtaagaggcggaaatgaagattccaggctctgagatcacgatgaataacgctcccgaggtcatgaatctcggagcgaaggccgtgtcagaaggtgacggggtctttgattttgaggggatttcgcacgcggactcctctgccgtcgcggcgctgctgcgatggaagcggctctgcgagaaaggccatgtcgcctttgagatccgcaatatgccatccggtcttcgcgatctctgtctgctgtacggtgtcacggatatactgggatcggacgctcccggaagcacacgggatcccgcttgatcccggccgaggtccgtcccgggttatgatttacggaaactgccccaagcaataagggcggtttccgttttttatttttcagctggtcaaatttttttctatggaaaagctcaggattatcggcggcaatcgcctctccggatctgtcaggatctccggagccaaaaacgcagtactccccatcttggccgcaagccttctgacggcggacgagctggtgctgcataacgtgccgcatctcgcggacgtgaagacgatgctgagcctgctcgaaggcatgggcgtcacctgccatcaggacggggaaaccgtccggctgtgcgccgcgaatgtgacgagcaccgtcgccccttatgagctcgtgaaaaccatgcgggcatcgattctcgtgctctgcccgctcgccacgcggttcggctcggcccgggtgtcgctccccggcggctgcacgatcggcgcccgtccggtcgatcagcacattcaggcgctcctcaagatgggagccgacgtgcagattgatcacggattcgtggatctgaagagcggccggctgcaggggacgaagatcgtgaccgatatggtgacggtcaccggaaccgaaaacatcatgatggcggcagtcctcgccgaaggccgcacggtgattgaaaacgccgcgcgtgagcctgaagtggtggatctcgcgaactgcctgcgcgcgatgggcgcgaagattgagggtgacggcacgtcgaccattgtgattgacggctgcgattcgcttcacggcgcggaacactccgtgatccccgaccgcattgaggcgggtaccttcatggcggccgcggccgcgacgaagggtgatgtgacgctcaccaatgtcgctcctgacacgctttccgttgtgatcgacaagatccgcgaggcgggggctgagattgaaacgggtccggactggatccatgtaacgatgaacagccgcccgaagtcggtgtcgatccgcacggagccgcaccccggcttccccaccgatatgcaggcccagatcatggcgcttgactgcgtggcggatggcacggctcagattaccgagacgatttttgaaaaccgcttcatgcatgtgcctgagctccagagactcggtgccgatatccaggtggaagggcacaccgcggtggtgcgcggcgtggagcagctgcagggcgcgcgcctcatggcgactgaccttcgggcctcagcgtcgcttgtgatcgccgcgcttgccgccgaaggcgaatcgatcgtcgaccgtatttatcaccttgaccgcggctacgaccgcatggagctgaagcttcaggccctcggcgcggatatcaggagattctcagaatgatcaccatggccctcgccaaagggcggatttatcaggaaacgcttcccttcctcgccgcggctgggatttacccggttgaggatcccgaaaagagccgcaagctcatgattgcgacgaaccgcgatgatcttcgcatcgtcgtgatccgcgcgaccgatgttccgacctatgtgcagtacggagccgccgacatcggtgtctgcggctgggatacgctttatgagcacggcggcaacggccttttcattccggtggatctgcagatcgcgaagtgccggatgagtgtcgcggcgccgaacggcctcgactacgacggactcgtgagacgcggcggacgcatccgcatcgccacaaagttcatgaagtgggcaagagattatttcgcacagcagggtgtgcatgtcgatctgatcaagctctacggatcgatggagctcgcgccgatcgcaggacttgccgacgcgattgtcgatattgtggctacaggcgccaccctgaaagcgaataatatgagagaagtgcggcagatcgccccgatcagctcgcgcctgattgtcaatcagatttcaatggggcttaagcgtgttgagctgagcccgattatcgagaacatcagaaaggcaagcaataaaaatgattaaacagttatccacccttgatcaggattttgagcctcagtttgagaagctcgtggcccgggacgcttcggttgacccggaaatcacgcggcgcgcggaagcgatcgtgcaggacgtcgcggcccgcggtgatgaagccgtgattgaatatacgaaccgcttcgatcatctgaatctgaagacgatggaagacgccatcgttacgcgtgaggagatgctgcaggctctcgaaacgctgcccgcggaccagaagcaggcgcttgagaccgcggcgaagcgtatccgtgagttccacgagcaccagcttgagaagggctggaccatcaccgactcctatggcagcgtgctcggccagcgcatcacggcgatcgactcggtcggtctctacgtgccgggcggcaaggccgcttacccgtcctccgtactgatgaacgcgatgccggctcacgtggcgggcgtcccgagaattgagatggtgttcccgaccccgggcggtgagcgtaaccagctcgtgctcgcggcggcggctctcgcgggtgtctcccgcgccttcacgatcggcggcgctcaggccgttgccgctctcgcctatggcacgaagaccctggatccggtcgataagatcgtcggcccgggcaacgcctatgtggcggccgcgaagcgctatgtcttcggccgcgtcggcatcgatatgatcgccggcccctccgaaattctcgtgatctgcgacggcaagacgccggctgactggatcgcgatggacctcttctcgcaggccgagcatgatgagcttgcgcaggccattctgctgacgcctgacgcggcctttgccgctgaagttcagaagtcgatcgaaaagctccttccgacgatgccccgcaaggcgatcatcgagaagagcctcgcgaaccgcggcgccatcatcgtgacgcgcgatctgctcgaggcctgcaaggtggccgatacgatttcgcctgagcaccttgagatttcgactgagaaccccgagcagtgggtggatcatctccgccacgccggcgcgatcttcatgggccgctggtctgttgaggcgctcggtgactactgcgccggtccgaaccacgtgcttccgacctcccgcacggcccgcttctcctcgccgctcggtgtctatgacttcctgaagcgcacgagcatcatccacgtgtccgaagccggcgcgcaggcgcttgccccggtcgctgatgtgcttgcccgcggcgaacacctgatcgctcacgcgaccagcgccgactaccggctgaagaagtaacttctgaacgtctgaaataaccgccaggaggtggcgcttatgcagtcactacggaccgcggaagtgagccgcaagacgcaggagaccgcgattgacgtccgcatcaatctcgacggcacgggccgctccgagattgatacgggaatcgggttcctggatcacatgctcgatcagatcgcccgtcacgggctggtggatctcaccatcagcgcgaagggcgatctgcaggtcgacgggcatcatacggttgaggatatcggcattacgcttggccaggcgcttcttcaggcgttaggcgataagcgcggcatccgccgctacggctttgcctatgtgccgctcgatgaggcgctgtcacgcgtcgtgatcgatctctcgggccggcccgggctcgtgtttgaagccccgttcacggccccgatgatcggagagctcgatacgcagctcatccgcgaattcttccagggctttgtgaaccacgcgcaggtcacgcttcatatcgataacctgcgcggtatcaatgcccaccatcaggccgagacgatcttcaaggccttcggacgagcgctctgcatggcgcttgagcctgatccgcgcatgtcgggcgtgattccgtctacgaaaggaacgttatgaagaaggtcgtcgtcgttgactacggcagcgggaatctccgctccgtttccaaggcgctcgaagcggtcgcgggaagcgacgcctcggttgctgtttcctctgacccggccgctgtccgggcggctgaccgcattgtgctgccgggccagggcgctatggcagactgcatgcatcatctgcttgactcggggctcgcggacgtggtgcgcgacgcgctcgtgaataagccagtctttgcggtctgcattggtctgcagatgctttttgaggaaagcgaggaaggagacgcgaagggcttcggtttcttccgcggccgcgtgatccggttccccgcgagtgccatgcgcaccgctgacggctcccggctgaaggtccccgagatgggctggaaccgggtgtatcagacgcagccgcacccggtctgggctggtgtcgaaaacggcgcctggttctacctcgtgcacagctacttcgccgcgcctgaagacatgagcatcgttgccggcatgacgagctacgggcttccctacaccagcgcggtcgcccgggacaatattttcgcaacgcagttccatccggaaaagagcgcggccgacggcctgaagctctatgcgaactttatccactggaatccctgattcctacactcaatctcatttatcaagactgattccaagaggttcacaagatgcttgatctcatccctgccattgacatcaaggacggcgcctgcgtgcgtctggtccagggggatctcgataagaacattacggtctactccaaagacccccgggacatggcccggcactgggcagagctcggtgcgcgccgtctccacgtggtggatcttgacggcgcccgctgcggccgctcggtgaatcacggcgtgatttccgacatcatccgtgacttcagcggcgtgatggagattgacctcggaggcggactccgcgatctcgatacgattgagtcctacatggacgcgggtctcgcctacgcggtgatcggcacggccgcgatcaagcagccggggttcctcgcgaacgcctgcgacgcgttccccggcgcgatcatcgtgtcgctcgacgcccggaacggcaagatcgcgacggatggctgggagaagacctcccggatcgacgtgctcgatattgcgaagaagttcgcggcgcatgacccggcggcgttcctctacacggatatttcccgtgacggcatgctctgcggagtgaatgtcgaggcgacgagccgcctcgcgcaggcgaccccgattccggtgatcgcctcaggcggcgtgaagaacatcgatgacatcgtctccctcatgcaggtggagtctgacggcgtctccggtgtcattctcggcaaggcgctctacgaaggcacgctcgacttccgtgaggcgtttgagtacgtcacgggcggcggcccgatccgggacgacgacgagctttgagaaaagcgtcaacccttttgaaaagaggtttttcatgctagctaagcggatcatcccctgccttgacgtcactgccggacgcgtggtgaagggcacgaatttcgttgacctccgggatgccggggatccggtggaaattgcccggcgctatgaccgtgagggggctgatgagctgacgttcctcgacatcacggcgagttccgataaccgcgacatcatcctctcggtgattgaagcggtggcctcccaggtgttcattccgctcacggtgggcggcggtgtgcgtcaggtgtcggatatccgccggctgctgaattcgggcgctgataaggtgtccatcaacacggcaggcgtgctgaatcccgatctgatcggagactcagcggcgctctacggcagccagtgcatcgtggccgcgatcgacgcgagaaagaacgcgtcgggcgaaggctgggaagtgttcacgcacggcggccggaagcccacgggccgtgacgcggtcgagtgggcgaaagaggtggagcggctcggtgccggtgagattcttctcaccagcatgaacgcggacggcacgaaggaaggcttcgatctggaactcacgcgcgcggtgagcgatgctgtgaatattccggtgattgcctcaggcggcgccgggaacctgcagcatctcgcggacgccgtgctgaaggggcacgcggacgcggtgctcgccgcgtcgatcttccacttcggtgagtacacgattgaagaggcgaagcgcttcatggcgtctcagggtatctgcatgaggctcggcgcggaggctgcggcatgacggacgcctggattgaagatgtgaagtttgacagccgcgggctcgtgcccgtggtggcgcaggattcagagagcggccgcgtgctgatgctcgcctgggcaaaccgcgaggcgctgctcgaagcggtgaagacccgccgcggcgtgtatttctcacgctcccgtaaccgcctctggcggaagggtgaggagagcggcaacgttcaggagctgctctcggtgcagctcgactgtgacggtgactccgtgatttacgaagtccggcagctcggcggcgccgcgtgccacaccgggcatcagagctgcttctaccggacgctcgatgaaaacggcgtctggaaggaaaacgctccggtcctccgcgatccgaacgcgatgtacggtcatcactgaaaagaagagaatcgtatggaagaaaaaaactgcacaggcattctcgaagagattgccgataccattgattcacgccacggcgcggatccgtcgaagagctacgtcgcgcagcttttctcgaaggctcccgacggcatgctgaagaaagtgggggaagaggcgactgaagtcgtcatggcggcgaaggacgtcgcggacggcaagaaggcgaaggagcatctcgtctacgaggtggctgacctctggttccactcgatggtggtgctttcctgctacgggctgcgccctgaggacgtcgtgcaggaactcgcgcggcgcgagggcgtctccggtctcgtcgagaaggcgaaccgcaagacccaggccccgaaagactaaaatccaaatctggaggatgttttatgcagaatgatgactgcctgttttgcaagatctcccgcggggaaattcccagcaagaagatctatgaggatgaggaagtttttgccttccacgacattaatcctgccgcgcctgtgcatttccttatcattcccaagcgccacattacgtctctcgctgaagtttcccccgaagacggtcaacttttgggtaaaatgctagttcttgccaagaagcttgctctcgagcagggttgcggcaatggttttcgcatcgtaatcaacacgggccgcgacggcggtcaggaagtacctcatttgcatattcatgtgctgggtggacctcagccttggaagcgtaggagctaataatcatgggttctctctctatttggcactggctgattgttctcgccatcgttgtcctcgttttcggtaccggcaagctcaagaacatgggcaaggatcttggcggcgccatcaagggtttcaaggaaggcatgagcgatgccaccgacgacaagaagccggctgctgacgccaaggctgctgtcgcctccgacgcagcgaagcccgctgccgctaaggaagaaaaggctcctgaagaaaagaagcaggcctgattctttctgagtctctcagacatgctcccccggcccgcactggaccgggggttattccacttttgccagcgactggttaggcatttatgtttgatttcggtttcagtgaactcgtagtctgtggcattgtcggactggtggtactcggtccggaaaggctccctgtcgtcgccaagacggccggtcagtggatcggaaaggcccagcggttcgtccagcagatgaaggacgatatcaaccgcgagtcggagcttgccgaactgaagaaaatcaaggacgatgcccagcatatcgctgaggatctgaatgagtcggttcgctcggccgcgctcgggattgagaaggatgtcaattccgtggcgggcgaagctcagaagaatctgaatgacgccgagaaggcctatgaggctgataagccgaaggtggccacggggattgattcgttcaacgacacgccgtctgccggcacaccgaccaccgcggtcggcgaaagcaccggcgcgggagccgagcagtacagcggcaccgagttcgacagcagcgacttcgcctgggacgactcgggctccagctccaacaccaagattttcgataagcggtatatcgccggtccttcggttgatgaactcgccgaagaggtggagaagatgcagcagcgtctgcagcttgaacgccaccagtttgtcggcaataaccggaagtacgcaccccgggcccgcgtcaaccgtccccgcatttaccgctagccaggttcccccatgagcgagaattctgataaaaatttgccgatcgaggcgccggatgatccgaggaacgaaaagcctctggtcgagcacctgatcgaactgaggaacagaatggtgaaagcgatcctcgcggtcgtgatcgtgttcctcgtcctttcccctttcatgaagcagctgtttgacgcgctctcccatccgctgatggtggcgcttcccgcgggaacgaagctgctgtcgaccggcgtcgtggcgccgttcctcgtaccgctgaaggtgacgctctttgtctcattcctgatcgcgctccctgtggtgctctatcaggcctgggcctatgtggcgcctgcgctttaccggcaggaaaagaaactcgtgcttccggtgcttgtgtcctcggtcgcgatgttctttgtcggcgtgatgtactgctacttcgtcgtgttccggtttgtcttccggttcatcgcgcagttctcgcctgagtccgtcaacttcgcgccggatatcgattcgtacttcagctttgtgatcacgatgttctttgcctttggtctcacgttcgaagtgccgatcgtcgtcatggtgctgaaccacgtgggtatcgcgtcgctcgaggcgctgaagaaggcccgcccctacatcatcgtgggcgcgttcgtgatcgcggctattttcacgccgccggatgtgctctcgcagacgctgctcgctctgccgctcgtgattctctatcaggccggcatctggctcgtgcagctcttcggcaagaagaacccgaaacccttcatggaagctgagcaggaagaaatcgctgagcttgagaagcgtgagcgggaagaggctgaaaagaaggctgctgaacagaacgccggttcttccggatcctgagaccgctgattcagtcagaaaaaatgggagccccagcgggctcccattttttattcccggtttctttcctggatcagacgggattatcgatatcgatatgcgtcacctgcagcccgcagttctcctccacccaggcgccgagcgcctgaatgccgaagcgttcagtcgcgtggtggccgcacgagagatagggaacgccggtttcctccgcgatatgaactgtgggctcggagatttcgcccgagagatagagatccgcgccctgatccacagcttcctcgaagaacccctgagcggcgcctgagcaccagcagatgcggcggaccaccttgtcctcgggaccgacaagaagcggcgtcctcctgaaggtcttttcgcagagaccggcgaactccttcgcggtgaggctgcccgcggacagcgtccccgtccagccgagatccatttcaccccactggccttcggggatgatgccgagacgcttcgcgatctgagcgttgttgccgagctccggatgagcgtcgagcggcagatggtaggcaatgagattcagaccggcgctgagcgcggtctggatccgcttatagcggattccggtaatgcagggagtatcccgtttccagaaccagccgtggtgcacaagcacggcgtcggcgtgaagatccgccgcggcctcaagcagcgcgaggctcgcggtaacgccagtcacaacgtgggaaatttcaccctttccctcgacctgcagtccatttggcgcataatcatggaagcgctccggttcgagcagcgtattcagtttttctacgagcgttcggttccgcatggattttccttatgtttaaaaggctctggcttattttcgcccaagcagtgacagtctgcgctgccgcagcgctcgtgtgggtgctgcttgagcatttcacgcacgaaggtcatgagcctcggcagccgctccggacggatggcgttgtggtgtcctactctgacgcggtgcaccgcgcggcgccctctgtcgtcaatatctacacaacgcagcctgtggatgatgaagaccgggagctcggtcagacaccttccggccactccggaacgtcccctctcgggtccggcgtgattgtgagccgcacgggtttcattctgacgaataaccacgtgatcgacggcatttcggatatcgcggtggcgcttcctgacggccgtgactgttcagcaaagcttgtcggtacggatccggaaaccgacctcgcgcttcttaagattgacggcagcgatttcccagcgattgaattcgggagcagtgacgtgcttcacgtgggagatgtcgtgctcgcgatcgggaacccttttaacgtcgggcagacggtcacgatggggattgtttcggctctcggccgtcacggtctcgggctgaacagctttgaggatttcattcagacagacgccgccattaaccgcgggaattcaggcggcgcgctcatcaacaccgcggggcagctggttggcatcaataccgcgatcttttctccggatacgaattcaggcgcctcggtcggcatcgggttcgcgatcccgtccgctctcgtgaatgaggtgcttcccgcgctgatgaagaacggcaaggtgcggcgcggctatctcggtcttgtgcctcaggcaataacgcctgagatcgcggcctcgaagcatattgaggccgggaagggggttctcgtttcggtcgtgaagaaggacgccgcggcctgggcttccgggatccgtgagggcgacattctcacgagcatcaatgggcagcccgtctctgatgttgccgccatgatgcgccaggtggcggcgattcctcccggcaccacggtggatgtcaatttcacccgtgacggccgccggtggaaaaccaaggtgacgctccaggtgagaccgccgcttcagcaggctccctcagacgaccgccagtaaaagaacgccccgcagggaatcctgcggggcgaactgttttatccggaatcgggagaccggtgatcaggccttcggctgattcttcatgagatcacggatttcacgcagcagagcgatatcttccggagtcggagcgggagcggccggggcctcttccttcttcttctcggcggcttcacgcaaggcgttcatgcccttcacgaggaggaacacgacgaaagcgagcagcaggaactggatcaccgcggtgaggaaagcgccgtaaccgaaaacggtggcgccagccttggtaagggcgtcgtatgtatacgggccggtgtaattttcaggagccttcagaacccagaagaggttcgtgaaatcgggcttcccgacaagaaagccgagaatcgggttgaagatatccttcacgagactcccgataatctggttaaaagcgccgccgacgataacaccgacagccatgtccatcacgttgcccttggagatgaaggtctgaaattctttaaagaatgacatactgagaggatccttagagtgtgatactgaaaatagtaaagcgagtgcgcggttagcgctaccccctctctgcggctccgctgttctcgcgattgatttaaaatgacatctttaaaaccgcatgaaagcactttgacttttgtgtgccggactgccggtaaccggtaggttctgtcttttggtagggaaaagctttttatgatggtactgtattcaggcacgacggatccgttctcccatcgctgccgtttcgtgctcttcgagaagggcatggattttgaaattcgcgatgtcgatatgttcaacattccggctgaggtgcgggcaatgaccccgtacggaacggttcctgtcctgaatgaacgggatctgatcctctacgaagccaatgtaattgatgaatacattgatgagcgtttcccgcatccgcagctgatgccgccggatccgattacccgtgcccgtacgcgcatgttcatttacggctttgagcgtgagctctaccagccggtccgcgtgctggaaaatcacgcttcttcggaagaagcgagggaagctgcccgcaagtcgatttcggctcagctgcagcagttctccggtcacctcgcgaagaacaagtatttcctcggtgaagatttctcgatgctcgatatctgcatcgctccgctcctctggcgtctcgactactacaagatcgagctcccgaagaccgcgaaggcgatccagatctatgctgaacgggtcttctcgcgtccggcgttcatggaatcgatgacgccttctgaaaaggttatgcgccgctgatatggctgaagcagacgacaaccagatccccttcaagccctacattctgagggcgatgatcgactggtgtgaggataacgggtttgagccctatcttctcacgcaggtggatgatgaaacggtcgttccccgggagtttgtgcaggacggaaagatcacgctcagcgtggcctccgaagccgtgcataaccctgacttcgggaatgatgagttccggttcgacgcccgcttcggtgaggcttcgcgtcagatcgttcttccggtaagagcgatcatcgcggcttacccggctgagcatcctgagagtgccatcggttttccctacgaaccgccgacggccgctcccgaggctccggaagcaacatctgcgagtgcgaagcgcccgactctgatacaaaagatcaaataaatcgggtatagtttcactctctgcccgtttagcacagttggtagtgcattcgccttgtaagcgaaaggtcgtctgttcgagtcagacaacgggcaccagaatacatcccgtaccgcttgccgcggtgcgggatttttctttgctgctcagcgagttatggaagttactgccagggtcctggccgcggggcaccgctttttctccttcccgcggcagggctcccggcggatccgcgggcggctttaatcggaaattcagcagtcccgtgtattctctccgcaggatcggtttctcccggccccgggcagggggagtttccatccgtcatcagccgcaggtcataggtcaaaagcacatataatgttgcagacccgcagactgatgatttttatcctcaaaaatccgactacttggcagtcggaaaggctcagagaagccctgctgtccaagccttgggtttgaggtgtccgccgagcggcggacgcagtttcagaatctcagtttcagaatgccctgtggtatcagggttgattacaaaaaacagatagaagacagcgctcttccccctcctgaggaagagacagccgtctcagacgcctccgatgcagctgcttgctttaggtttaaaccatacgacggccccgctttccatccgggaagcggtggcattctctccggaagaaattcccggagcgctttctgcgctccgcagtacctatgcccgtcctgaagaaggcggaatacgggaagcgctgattctgtcgacctgcaacagaactgagttcttcctcgcggcggaaaacggcgatgccgcgctgcattcgctctgcagctttgtcgcgcgtcagaagggcattgacctgaaggaattcctcccgcacacctatgagtaccgccagtcggatgtggcccgtcatacgttccgtgtggcgagcggtcttgactccatggtgctcggtgaaacgcagattgtgggccagatgaagaaggcctggcgtatcgcccgcgaatcgaagtcgctcgggctgatgctggggcatctttttgacggcacctttgccgcggcaaaggaagtccgtacggcgaccgcgatcggctcacactcggtgtcgctcgccgcggccggagtcggtctcgcgaaccagctgttcggcagcctcgccaatcagaacgtgcttttcgtcggtgccggcgaaatgatcgagctctgcgcggcgcacttctgtgcccagcacccgaagaaagtgacggtggcgaaccgcacgctcgagaaaggcgcggcgctcgcccgccggttcggcgctgaagcggttgagctccggacgctcccggaaatcgtctcgcagtatgacgtgatcgtgagctgcaccgcgtcttctctcccgattatcgggcttggcatgatgcagcgcgctgtcgccgcccggcgccatcgcccgatcctcatcatcgatctcgcggtgccgcgcgacgttgaggaggaagtgtcgcggcttgacgatgtctacatctacacgattgatgatctcggcaaagtggtggcatccggcaaggaaagccgccgcatggcggtgacgaaagccgaggacatcattgagtcccgggttcaggcgtttgaggggtggctcgccgcccgcgacgcagtgcccgcgatccaggcgctccgctcaagagccgaggcgatgcgggaggctgaagtgaaaaaggctcagcgtcatctcgcggccggtcacgatgcggcttccgtgattgaggagctgtcccgcgcgcttaccaataagctgattcacgatccgacgacgctgcttcgcaacggcacgggcctcagcgcagaggagcgcgcccgcgagaacgatattctgaatgagttctaccgcagcagccgggatggcggcgtggcgtaaaatccgccctttgagcagctgcactgaaataccgttaccgggcgcaaagcgcccggtaactcactggaacggattaaaaagttatgaatgaatcaatgcgcgccaagctgagctcgctcggccgacggctcgaggaaatcgacgcgatgctgtcttcccccgaagtgggcagcgatatgaataagttccgcgatctctcgcgtgaacgcgccgaaatcgagcccgtggtgcagaaggtgcgcgagtacgaaaagtatgagaagcagcgcgcggagagcgaggagctcctgtcggatcccgacatgaaggaactcgcccaggcggagttcacggagtgccgcgagaagcttgagcagctcgataaggatctcgagatcatgctgctgccgactgatccgaacgacaagcggaacatcttcctggaaatccgtgccggcacgggcggcgatgaatcggcgctttttgcgggcgacctgctccgcatgtatatgcgctatgccgagcgtcagggctggaaaacggaaattgtctcgaagagcgagagtgatcttggcggctataaggaagtgatcgtccgcgtgatcggagacggcgcctattcgaaactgaagtttgagtcgggcggacaccgtgtgcagcgcgttccggcgaccgaatcccagggccgtattcacacgtccgcctgcacggtggccgtgctcccggagcttgacgaggtggaagaggtgcatattgatccctctgaactccgtatcgacgtttaccgcgcgtcaggcgccggcggacagcacgtgcagaagacggactccgcggtccgaatcacgcacctgccgactggtcttgtcgtggagtgccaggacgaacgaagccagcgtcagaataaggagcgcgcgatgcaggtgctcgcttcccgcctctacgccatgcgggtcgctgagcagcagcaggctgaggcctctgagcgaaagagccttatcggttccggcgaccgttcggaacgaatccgtacctacaactatccgcagggccgtgtgaccgatcaccgcatcaacctcaccctctataagctcgatcagatcatggatggtgatctcgacgaaatcatttcggccctgatcacggagcatcaggctgagcagctcgcggcgctcgccgaacgcaagtcctgagagaaacggcgcgatggctcgggttgaggaactgcttcgggaaacacgggaaacgatcgggatctttgagacccggctgcttctcgcgctggccatgcatgtacgggtggagagactcgtggcgcatccggaggaagaggtgacgccagaggccgaaacggccttccggggctacgccgcgaggcgccttgccggtgaaccctacccctatatcgcgggcgagcaggagttttatggcagaagcttccgcgtgacgcctgacgttctcattccgagaccggacaccgagctcatcgtggagctcgcgcttgaagagctgaagcgcttcaggcgtccgacggtccttgatatggggactggtagcggctgcattgcgatcactgtggcgcttgagaatccaaaggcggaggtctgggcgagcgataggtctgaggcggcgcttgaagtggcgcgcgggaacgccgggaagtccggtgtccggttccttcaggggagctggtacaaggcgcttccgcctgacgctccgaagtttgatctgattctttccaatcctccgtatattgcccccgagagtccgtacctcagtgatctgacgtatgagccgcagaccgctctcgtaagcgggaatcacgggatggatgacctgagggagatcgcggaaggcgccgcggcgcatctcgctccgggcggctgcctcatggtggagcacggttttgatcagggtgaggcctgccggaaagtgttcactgaggcgggactctctgacgcggagacactgaaggacctgggaggcaatgaccgcgtgacgcgcggtcgccttcgctgatacctgaaagagccggatgaaaagaaaggagcatcgcgtgatgctccttattttttgccggataaacgaaaaaaaccgcagatctttcgatctgcggcttttggaatccgtggtggtcgggggcggaatcgaaccgtcgacacgcggattttcaatccgctgctctaccgactgagctacccgaccacgcataggagttgaactttaccataaaaaaaataaaaatgccaatttattttcactttttgcatttagtgaggaaaaaaacctcagatggacccgcattgtcgggtatcgttctcgttgaattgattgattcaggaatttgatatgccgcgtatctcccagattgctgcgggcgccttcgctgcagcgcttgcattcaccagtgtcgcttcctttgcggccggttcttctgacccggaaacggatcaggtaaagagccgcgttgtggagcgtcttggcgtgagaccgaccaccgtcgcgaaaacgcctttcgggctctgggaaatttcggtggcgccggatcaggtgttttacgtcgatgggaatgtccgctatctgcttctcgggaacgcggtcgatatcgcgacacgtgagaacctgacggagaagcggattgccgaaatcagccgcgtggactggaagacgctgccgcagaaggacgcgatccgtgtggtgcacggctcagggcgctatcaggtggcagtgttcgcggatgctacctgcatgtactgccggctgctcgaatcgtatttcgcgaagatgaacgatgtcacggtctacacctacgtcttccccatgaagcagtcgaggaatctcgcgaagaatgtggtctgtgcgaagaacccgggcgcggcctgggggaatctgatgacgaagggagtgaagcctgctgaggcgaactgtgatgacagcgtgcttgaccgcaatacggtgctgtcgcagaagatcggcgtggcgggaactccgactctcatcttcccggatgggagccggctgggcggtgtgccttcgtacgagaatctcgtgaaggcactgcgcgaacggaatcctggaaagtaaccccggattacttccggagaacttcagcgggcgaatgccccttaggcaccatgacccacgcggtcacggtgcttttttgtcgtccggcattttcaccggcctggtttccggagccccagaagtagtcgaagcggatgatgccgcggatcgcaccgcccgtatcctgagcgatgaccgggcggttgaagtgcagatccgggttctgctgcgaaacggaaacaaagaacggtgtcccgtagacccagacatgacggtcaatggcaaccgaggcgccaggggtgagcggcacgccctgaccgccctggggaccgaccgagagatcggtgacaggtgcccggcggaagaagacatagctcgggttgtaggcgagaagctgcgggacctgatccggatgagccttggcccaggcccggatgctctgcatcgaggcctcgtgcgctgtcatctggttccggtcaatcagccagcgcgcgaccgcgcggtacgggtacccgttctgatcgtcatagaaaacgcggatcaggccgacgcccttcacccgaagctggccagagccctgaatctggaggaaaagctgatcaatcggatctgcgagccaggcgatcgcgtaggggtagagatcggtgcgctgatcaatggaagagcgggatccgtagggaatcagtttccggccggaaatcttgccccggatccgctttcccttgagttcggggtagagcgacgagagctccacgtcgatcagatcaggaggcgtcgcgaggacgggccaggtgtagtgagacgtccgggtgggcgacgcgtcgagaatcggctcgtagtaccccgtcatgaggcccgtggtgtccgaggataccgtggcgccattcgctttctggtcagacgagacggcccagagatcaaaattctgctggaagaattcaggcgctgacaccgcggcgcgggcattctcgcaggccgtgctccagagcggggaagacgcaaaggagcgggaagcgcaggagcggcggaacgccttccgggcgttatcccagtccggtgcgtcagacaccgggagacggccgaagttcgcgggcgtaaagccagggaccggtttcccttccgcaaccggcgtggcagaaggccctgcaggcgttgtctgagtggtcggctgtttcacggtctggcagcctgccagaaccagagcggccagtgcggccagcgcggaaaccttggtcaatcggcgcatcattcgttactcctcaaccgtcttttttgcgttcaggctcggacctatctcggcctgctctcttacaatacgttccactgaagaaaacaaggctttggagaataccatgcaagatatccgcatcgccccgtctatcctttccgctgactttgcccggcttggcgaagaggttcgcgatgtcatcgcttccggggcggactggattcacttcgacgtgatggacaaccattatgtaccgaatctcacgatcggcccgtgcgtgctgaaggcaattcgcccgtatacagaggcggatattgacgtgcatctgatggtggagccggtggacagcctcgtaccggagttcgcgaaggcgggtgctgactggattacgttccacgttgaggcgagccgccacgttgaccgtacgctgcagctgatccgcgactccggcgcgaagcccggtctcgtgctgaatcctgcgactccggtggaaagcctgaactacgtgctcgataagatcgacatgattcttctgatgagcgtgaatccgggcttcggcggtcagaaatttattccgggcgttctccggaagatccgtgaagtgcgcgctctcgccgaccgtcatttcgaggaaaccggccacgcgatccgggttgaggtggatggcggcgtgaagaccgataacatcggtgaaattgcccgcgccggcgctgacacctttgtggcgggatccgcgatcttcggccgcaagtcgaaggaaggctatcgcgaggtgatcgaggctatgcgggcggctgtgaagtccgttcaggcctgagaagaaggaaagaggaaggaaaatacatgctgagttttgacgcgcgccgtgtccagggagcgcttttcgatctggatggaacgctggtggattcactcccggatcttcacttcgcggtctgcgaagtgctgaagtcctgggggctcgaaccgatggaagaggaagaagtgggccgctacatcggaaagggcgcgattcacctcgcggccgaagtgctgcgcgcgagaaagccggacgccacggctgaagagcgggaccgcttcgtgaaggagtatgtgaatacgctcgccggcatgggctgctcgcacacccgggcgattccgggtgttctcgaagcgcttggaattttccgctcggaagggctgaaactcgcgctcgtgacgaacaaagccggtgtcctgatcgacgctgtgctcgagcaggcaggactctccccgtattttccgacagacctcaggctttccgcggacgatgtgccgactccgaagcccgcgcctgacatgctgctcctcgcggcgtcccgcatgggacttgatcccgcggactgcatgatgctcggggattcgcggaacgacgctcaggccgcggcgaatgccggtatgcccgtgatgctgatggaaacagggtataacgaaggcgagccgatcgctaagtgggggccgcagaacggtttttgtgatatattcaaatccatggatctcgccgcaaagagtttttcctcctcacggcattaactttcagcatccaaccaaatatctttacccaaccatgcagacgattgccacattgatgatttcagcagtgcgcagcgtccgggtctcagccacatccgtcggccagacccggggagcatggtcatggcgtctctaaacacatcctgtctgtaggttttccgccgcgccgcaatggcgcggactgaaagccactctgcttcacctcagtttttcctgatttactactgacagcgctgtagccgtatctgtgcactcacctgacacgcacggaacggaacccgagaggcctaactgtatccaacacggtctgccgacggcgctgctgcaaccggagcacatcatgctggagtctgaattcaaggcactcgcctcccagggctataaccgtattccgatggtcgccgaatgcctcgccgatctcgataccccgctttccatttaccggaagcttgctgactgtccggacagcttcctgcttgagtctgtggtcggaggcgagcgcttcgggcgctactccttcatcgggctcccggcgaagcgccggattgaggtgaggatcggcgacaacggtcccgagacgatcgtgaaagaggccgggaagaccgtcgaaacgctggaagggaatccgcttgacgcgattgaagcctatctcggccgcatccgtgtcgctccccgtcctggcctcccgcggttttcaggcggcctcgtcggatacctaggctatgacacgatccgtctgatcgagaaaaagctcgcgaagccgaagaaggacgatctcggggtccccgatattcttctcctgcagacagaggaaatagcggtggtggataacatctcgggccgcatctatctcatcatccacgcggatccgaatgagccggaagctttccagaaaggcatgaaccggctgcgtgaactgagaagccgcctgcaccggccggccgaaaatctctatgccggcccgagtgcccgccaggctgaacggcgtgacttccataaggccgactatctgaaggctgttgaaaaggcgaaggactatatcgcgcacggcgaagtgatgcaggtgcagatcgggcagagaatttcccgccgcttcgcggacgcaccgatttctctctaccgcgcgcttcggtcgctgaatccttcgccctacatgtattactacgacttcggtgacttccacgtggtcggcgcgtcgcctgaaatccttgtccggggcgaagtcgggaaggatggagaaaaacatgtctgcatccgcccgattgccgggtcccgccgccgcgggctgaccgcggagcaggacgcggcgctcgagcgcgatcttgccacggatccgaaggagcgcgctgagcacctgatgctgattgatctcgcccggaacgatatcggacgcgtggcggagatcggctcggtcacggttccggatcagtttgtgattgagaagtacagccacattcagcatctcgtgagcgaagtggatgggaagctgcgcggcggcctgaataattttgatgtcttcaaggcgacattccctgcggggacactcaccggcgctccgaagatccgggcgatggaaatcatcgatgagcttgagcctgtgaagcgcggcatctatggcggtgcggtcggctatttctcatttgccggcgatatggatatggcgatcgcgatccgcaccgcggtgatcaaggacaagatcctctacgcgcaggctgcggccggcatcgtggcggactccgttccggaaaatgaacaccgggaaacggaaaccaaggcaagagccgtgctccgcgccgccgaaatggtggaagacggtctggaatcggcgatctgaggggaggaaaagaaaatgctcgcgatgatcgataactacgacagctttacctataaccttgtgcagtatttcggagagctcggagaggatgtccgggtgtttcggaatgatgaagtgacgatcgcggatctcgaggcgctgaagccggacttcctctgcgtgtcccccgggccgagcgttccgtcaaacgccgggatttccgaggaagcgatccggcactttgccgggaagctcccgattctcggtgtgtgcctcggacatcaggcgatcggtgaagtgttcggcggaaagattgtccttgcccgtcaggtgatgcatggaaagaccgacgcaatcactgtcacaaatgagggagtcttcacgggaatcccacagggaacccgggtggctcgctatcattctcttgtcattgattctcaaacgcttccagcctgcctcgcggtgacagcgaccagttccgacggagaaatcatgggtatccggcacagggagctggatattcagggggtgcagttccaccccgaatccatcgcgacagagcatggcatggaaatgcttaaaaactttctgcatataaggatttgatcatgaaaggattctcgaattcggctgtggctctggtgctcctggcagtcgccggcgccgcttcggcagatgccctttcggactgctacaaaacagctgataaccgcgttcaggtccgccagtgccttcagaaggaactggatcggacccagagagactacgcggacaccctggctgcagtgaaggatcaggcgaagcagcttgatcaggcgtcaggagattcgggaaagaagtctcgtacggcaggtcccgtttcccgggacttcgcagaagcaaacaaggcatttgatctttatctgcgccgccagtgcgggtttgagtccgcaatgtccggttcaggaaccagcgcgggcaatcagtacatcgcctgccgaatcaatcttatgaagctccgtatgggagctttgggtaacttttcagggccggcatcgcctgatccatcaggcaagtgaccctcacttttaaggagcagcgtcatggcaatcactatttctgaagcaatccagagaactgttgaacatcgcgaaatcttcgcggacgagatgacgagcctctggatggatctgatgaccggtaagctcaccccggctcagatcgccggccttatcgtcggactccgcgtcaagaaggaaaccatcggggaaatcacagcggcagcgaaagtgatgcgtgatctctccacgaaagtgaatgtcagggatcccgagtcgctgctcgatattgtcggaaccggcggtgatggcgcccgcacgttcaatatttcaacaacctcgatgttcgtgattgccgcggccggcggccgcgtggcgaagcatggcggcggttctgtctcctcgaagtccggtgccgcggatgccctgaaggcaatcggcgcgaacatcatgctgaagccagagcagatcgcgcagtgcattgaagaaacccatatgggattcatgtttgcgccgctccaccacgccgccatgaagtacgcggccccggtccgcaaggaactcggaatccgaacgatcttcaatattctgggaccgctcacgaatccagcaaacgcgggctgcgagatgcttggcgttttccatcaggaccttgtgggcatctgcgtgcgcgtgctgcgggatctcggcaccaagcgcgctgtggtggtgttcggctgcgacggcatggatgaggtgagtctcggtgccaccacgatggtgggtgaactgaaggacggggtggtgagtgagtacaacatccatccggaagacttcaatctcccgatgagctcggtgcgtcacctccaggtgaataaccctgaggagtccgtggcgaagatgatgagcgtactgcatgcggaagaaggccccgcgatgaacagtgtgatcttcaacgccggtgtcggtctcttcacgctgggtacggcgtcctctattgagcagggcattgcaatggcgagaaaggcgatcgagtcgggtgaggcgcttgcgaagatgaagctcttcgttgagaagacgaaagaacttggcggcacagcggtcaaggcctgatcaggaccggaaaacggagaaagcatgcagggaattctcaggactatttgggatcacaaacgggaatccgtaaggcgggcgaaggagaggcttcctgaagcgtcgctcctcgcggaagtgaagccgcttctgggaaccccctgccggggattcgcggaggcgcttcgccgcacggcatccgagcgaggggccgcggtgattgcggaggtgaagaaggcgagtccttcaaaggggctgatccgtccggatttcaggcccgctgaaatcgccgcgtcctatgcggcgggcggcgcggcctgtctctcggtgctcacggaggaggagtttttcctcggcggaccgggggtgctccgcgaagtgcggcagaccgtgactctcccgattctccggaaggactttgtgcttgatccgtaccaggtgctggaagcccgcgcctggggtgctgacgcggttcttctgatcgcggcggcgctttccgcggatcagatgcgggaactcgcccagacagcttccgaagtggaaattgatgtgctgatcgaatcccacagcgaaccggaaatagagcaggcgcttcagattccgggagcgctgatcggtatcaacaaccggaaccttgaaacatttgaggtatcgctcgcgacgaccgagcgactgaagcggctgattccggacgaccgctttgccgtgtcggaaagcggtattcacgagaaagcggatgtggagcgagttctcgcggccggcgtcagcgctttccttgtcggtgaagcgttcatgaggaaggagaatccgggagaggccctgaaggagcttttctatgcttgatattcagtccgcggatccgagctggcagccgctcctgaaggatttttttgattctcctgaagggaaaaagctggacgcctatcttgacgcgcgccggaaagccggggccgtgatatttcccccgacccccttccgggctctgacgctcactcccgcagatgcggtgcgggtggttatcgtcggacaggatccgtatcacgagcaggggcaggcgcagggtctcgcgttctcggttcagaagggcgtaaaagttccgccgtcccttcggaatatctataaggaaatcgcgcttgagttcggttccgatattccgtctgacggcgatctttcaggctgggcgtcgcagggcgttctccttctgaacgcggtgctgactgtcgaggaaggcgcggccggaagccatgcaaaaaaaggctgggaaattctgacagaccggattatccggacacttgccgataaggcgccgcccaaggcgttcctcctctggggcggctacgcgcagaaaaagaaggagctgattgaggcaagcggcattccgcatctcgtgctctgctcgaaccacccgtcgccgctctccgcgagacgggggccggtgccttttatcggctgcggtcacttcgcgaaggtgaatgactggcttctctcggagggagaaaagccagtcgactggacgaagagcgggctctgatttctcagtgggtctgggaaagaccggcggatggccagctgtgctccatcggcgtctttctttcaaagcgggcctttggagacgcggtttcgagggggctgatgtccacagtcatcatccgatccgtgcggaagagagtgagtttatgcgcagacccggtgcccagctgccggaagagttcgggaagcgtggctttggaaatacggaaggcatccagggcgatcagctgatcgccagggaggatgccggtgcgtgaggcgggaaggccggcagttacgctgctgaccgtggggaatccgtcagacgcggtgaatctgagaccgaggccgtcccgcacaaggtcatacggctcagacttcatttcaagcccctgcagggaaagaatgctgtcccaatccggagcttcaccggcgactctcgtaaagcgccgaagccattgtgcgacggcgactgccgggcgatccacgatttcactgatggcatccgaaagctcgaccgcgtcctctgacagtccaaggcattcatcagtcctgaggttccagattttccgcatgacgtcgtcaagcgtgatccggttctccgtgacgtttcggatatgaagatcgagcgcgaaggcgagcatggcgccgccctggtagtagctcacaccgtgggaggccgatccggcgtccgggcggtagtacttgatccaggtgtcaaagcttgatgctgccacggactgatgcttccagccggactgaccgtaaaccgtgagcgccatggcggaaagacggtcaaggattttcttttcagacgcgagtcccgcccggaagagaatgatttcctcgtagtactccgtgaacccctcaaagaaccagagaagccgtgtgtagttttccttcgtgaggtcataaggaaggaaggtggcgggcttcagccgcttgacgttccaggcgtggaagtattcgtgcgccatgagggcgagaagatcggtgtaccggtcaggggcctcagctcccgtcatcggaagggcggagaaaggcgcctcggcagccacgctgttccgatgctcaagtccgccccagcggccgctgacggtgagaaggaagagatagtctgagaagggcggttttttggtttccggctcccagagttcgatcgttgtggcgcagattttcttcaggtcttcagtaaggcgcgcggcgtcagcttcggggcatccggcaatcacgagacggtgaacggcgccgtgaacggagaactcagtggacagggtgtcggagtcccgtgagagcagaatcgggcagtcaatcagatggtcatagtccttcgcgctgaacaggaagggctctccgtcgtggatgatctgaggaagcgcagtggaaaccttatcccagggggcgggagaaaccgcgatccggcagggcgtgttttcttcgcctgaaatctgcaggaaggctgcggcaccggaaatgaaagcgcggtcagtgctgatccaggtttttctgacagaaggatcaacagcggtcagcgcgtagcggatcgttaccggagttctgtcaccggaagtattcgcgagaacgaaggttgctttgtcagacttgatgacgttcagcggcgtttcaccctgatatgcctctatatcggaaatagatccggcatattcccgtagcagatagcttccgggagtccaggccggcatgcggagcgtaatcggatagttttccttacggggcgtaaagtggatcgcgatgtgaaactcacggcggtcggtatccgcagactcaatccggtattcaatttcaggcatattcagtttcagcttaataattcgttggtttcaatcaggttcggtagctgtgatattagatttttccggatagataaaaaagactttcagaaaaatttgacaatttaaaaaagcatctgtaatattcacactctcgttgctaccgcagcgatgttctttaaaaacacaataacgaaccgataagcgtgggcatctgattttgatcgagtttcaactcata

SEQ ID NO: 1301 - DNA, 11722 bp, Unknown
  gut microbiota DNA sequence
ctaaatttggggagcagttcagtaaacggactctctttttttgaccgtgtgacggggtttcatcggagtgctttccgaagttccgcgagaccgcggtccgaaataaaggcggcggaccgggtttcgtgcctcgcccggctccggatccggaagaacgccacggcgtcgccgtttggaagcacccgattgatcgcgtaggcggcggcgagcgccatgtcttcattttgcttcaccgtgccccagagccggatcgggatgagggtgccaagcgtcaattcctcatcgtccttaaacccaaagagccgccgggtaaaggcgatgaattcaggggacagcgcttcaaaatacgtgtccccaaggaccagcagccgatgccggcagccgtccttcgcctccgccccgcagaacgggcagtggagcttgatcagttcatacgcctcttcatcgaactttgtcggaatcaggcgcggatagtctttcaggtcttccatctcaggttttatcagtcggttttcaggcgattatgcgccggattggctcccggccgacgctttttctcattcttgggttctcagatccggctgcctccggaaccgggcacaaaaaaatcccggaggctctgatgagccgccgggagaagtccacccaatagacttaaatacaacaaaaacaaaaaagaaaagacaaacaacaaaaccaatcagagcgccgcgagcttccccgcgaacccaaggaacagactcccgaggagcgtgtttccgactttcgacatcagggggctgccgctcacaaagcgctggatcgcggctccggagagcgcgagtgtcgacatccagcagatgctgaacgcttcaaggatcgacgccatcacgaggtacgggatccaggtgcggtcaaaccccgggttgatgaactgagaaaagaacgcgacgtagaagagaatcgctttcgggttcgtaagcgacagcaccagcgccgtgcggaagggcttcacggagtccggtagcgtttccggtttcgcgtttccggcctttttcccgcggtacgtggaaatcagcaccgagagcccgaggtacgcgaggtacgccgcgcccgcgatccggaccgccgcgaaaagcatcgggtgcgaggcgagcgccgccgcgaccccgaggtacgcgaggaagatcagggcagcgtccccgaggaacaccgcgagtgccgcgtggaacgcgggcttcgacccgtactgaatcgaggtcttgaaaacgaaaatagaattcggacccggcgcgagcacgagcgcgagagctccgagggcataaagcccggcattcatgacaccaaagctttccagcatttctgtttcaaccgaaaaagtgtttttgagaaaaagaaaaaacttttttgaaccgagactcaggcgagctcgaaacccatacgcagacaccgcgcggcggcgcaggaggcattcagtcgggttgaaacggcggaaacttcagtgaccggacggaagtgaatccgggaaatgtgaccgggcggaaccgccgcggcgtaaatacgggttgcgtcgtgagtcatgccttcaccttggttcaagcgaaaactctttaagtctgtccgcaatccagaatgcgtcttgtcgcgggacagccttgaagagaggttgttcgaaactagatgcatgcaggagagcaaaaacgcagccccattctgtcttccagtgttacatacccgctccccgcgagaatggtggcgggaagcaagtgacgtgaattatacaaaaatcagcctgatgcggaaggcttaacccggagctccccccgtagatcagaaattccgtttgccctgcgtcaaaagagatatttcctctttacacgctcagggggccccgggctccgggacaccggtttcagcaggggtcggggggagatgaagaagccgggaccggggtggtttgtgtgcatcccctccgcgaatcctgagcgcttccctgtcttttccgtgatcggaagagaggaaatgccggtctctctttcagaaagaaaaccccagcgggccgccaggcgactccttaaaaaagtttctttttcctcggattggtattagttttcctactatgtaaagagaaagctcttgacttacccccgccgtctctccgtccggagacagcctcgtttgaaggaatatccatgcgtttgatgaatcgtttcgcgaaagccgcggttttcgctctctgcgcgtccctcatgtcgtcctttgcctgggcgggggcctttgacctcccgtcagacggcaaaatcctcaccgggacggcgcagcagacttatatcagcggtcggatgcatgaccttcgatccgggaaggtgaagatcacgttttccgtcacggacgggtgggagaagcagatgctgaaggcgggtgaggcggatctcgagcgctatgactatccggccgcgaaaacgaaccgtatcctcctgcagctgcatggcggcgcgtatgtgcagaagctcgatgacctctaccgcatcacggcgttgacgcaggggaaactgatcggcgcccggacggtctattcgctcgactaccgggtcgcccccgaggccgtttaccccgcggtgctggaagaagcgcttgccgcgtaccgcgggattctggcttccggtgccaggccgtccgacatcatcgtggtcggcgattcggcgggcggaaatctcgcgctggaactcgctctcgcgctgaaagaaaaggggcttccgcagcccgcggcgctgatccttcagtccccctggaccgatatgggaacaagccgcgtgtcacgcgtcacgaactttaagaaggacctgattctcggagaggggacgccgttcagcggccccgtggttgaggccgcctacgccgggaaactgccggtggatgatccccgtctctcccccgtgaacgccgatctccgggggcttcctccgatgctcattcaggcgggcagctatgaagtgtttctctctgaaatcgaggatcttgcgaggaaagcgggggaagcgggcgtcctgacgaccctcaccgtgtaccccgggatgtcacacgacttcgcgctctgcctcccggaactccaggagtcaatcgattcactcaaagaaatccgcgatttcgtgaaccggattgaccgcgcgaaataaacagttattcggaaaatcgagggtcgggatggatgtcacccgctccatcgaggctttcttttccggttttacttctcctgccccagcttcccggagacgagttccttgagtgttgatcggatgatctgcatgccggggtcggtgtgcgttctcacatgccaccccatgtagaccgtgagtttcggggccttatccgtgatcgggaggaaatcgagtttcctcccgtcaaacgccatctccgcggtcgccttcgggacgatcgcatagcaatccgtttcatagaggcagagcggcaccgagaggaaaaagggcaccacaagcgcgattttctcgggatccgtcgggttgaaccacccgttcgcggggctattcggggcgcggtagcggtccggctgcgcgttgatcagcacctgacgccagggatcgagatccgccttatcaaggctcccgaatttcacagccttttttgttaatggatgccccttccgcacaacgcagacatagggttccgtgacgagcggaatggagcggagctgcgggtgcagtccctggcgcgcgaagaaaacgagatccagccgattcgcccggagatcatcaaacaaatgttcgtccgcctgcgtcacgtggaagcggacgagcggcaggcgcttctcaaactctgaaaataccgacgcgatcccgagcgtaaaggcgttgtcgtacgtcgcgagccgcacggtgcgcttcagatgcagcggatcaatccggtcctcatgctggaggtcttccagggtgttcatcagaccgaggacgcgggcgtagcgcttcttcgcgctttcggttggctgcatcaggaacccgcttctttctcgtaaaaagagggtcgttccagtacgtcctcagcttcgcgagcatccggttcgcggatgagaggctcacccccatctgctccgcggcccgcgggagcgaccccgcgcggtagagcgtgagaaagaagtagagcgactccgcgtcgatcccccggacataggcggggagggctccggccgcggtgtccgtctcccgttctgacactccctttttcttcagtaccgttttttctgacatggagtcacttcgatttctgacattgagaagagaagattaacggattttcagagagggagccgatccctagaattttttccgaaccatagaaaaggcgggagcggttgagaggaaacgctcctttgcctcagacaaccaaaggagaaaagaagaaatgacagccattcagaatttcagcgaaccgaaaacgctgaagcggatcgcggcgctcgtcgtcgcggccggagtccttaccgcggggagcgcctccgcgatgacggccggcacctacacgtcgacggtccagggccgtaacggcaatatcacggtcgaagtgaaggtgagcgcgacgaagattgagagcgtccgcgtgaccgatcagaaagaaacccctgggatcgggtcgcttgccgtgaagagcattccggaagcggtggtcgcgggtcagaccgcgcaggtggataacgtctcgggtgcctcgatcacatcgcaggcgctccggaaagggatccgcgaagcgctcgtgaaggcgggcgcggaccgcgcgatgctcgaccgcaaggcgatcaggaagcagtccgccgcggcgcagacgcttgtgcattcggccgacgtgatcgtcgttggcggcggcggagccggcatggtggcagccgcgaccgcggtggatggcggcgcgaaggtgatcgtccttgaaaaaatggcgatgatcggcgggaacacggcgcgctctgaaggcaacatgtccgcgatggatccggaacccgagaagctcctttcgatgaccccggcggtccgcgacatcgtgaagaagtacaccgatcagaagccctgcacgaaggaagtggctgaacttcagaagactgtgaaagatcagctgaaggcgcatgacgccgccggcaagaagtacatcttcgattctcctgaactcttcgcccttcagacgcttgaaggcggtgactgccataacgacccgaaactcgttctcacgatgacccggaacgcgacggccgcgatggagtggcttgagaagcagtccgatatgaagtggtaccacgtgccgcgccactgggtggacgtcggtatcggcggcatttatccccgcggccagtggccccgtcaggcggacgggaagaccccgatctcgacctacgacgcctacatttcgccgctcgcggataaggtgacgaaggcgggcggccatatctacacgcagatgaaagtgacgcagatcgtgcgtgggaaggacggccgtgtcacgggtgtgatcgccgttgataagaacggcaagaatcaggccttcaatggcaaaaacgtgattctcgccgcgggcggctacggcgcgaatctcaagatggtgaagaagtacaacaacatcaacgtgatcgcgacctctaaccagcctggcaccacgggtgaggtgctggaagaagccgtgaaggtcggggctggactcaccggcatgaagtggattcagatccatccgcatgggaatccgaagaacggcgaactcgaatccgcgatcgcggggcggccctctgacaccccctacgtcaacgtgaacggcgaccggtttgtggatgagacggggcggcgtgatgacatctcgcacgggatcctcgcgcagcctggccaggtggtctacgcgatcttcgatcagaagaccattgatcagaagaaagtgcgtgacgacctgatgcagatcgcgctcggccacggctacgcctataaggcggataccctttctgacctcgcgaaggcggccggcatcaaccaggccgaattcgcgaagacgatggcggcctataacgaggcctcccgcacccagaacacgaagtcgcttccggtgccgaagatcctgatcggcatgccggtcgacaaggctccgttctacagcgtcccgatcacgacgacgatccatcacacgatgggcggtctccggatcaatgagaagactcaggtgctcgacgaaaagggccgcgtgatccccggtctctacgccgcgggtgaaatcacgggcggcatccacggcggcaatcgccttggccgcaacgccctcacggacctccttgtgttcggccacatcgccggtatgcaggttagccctaagccctaagcccatagtcctaattcgggtgcataatagagatacttcggcgggataccttaggagagaaccagggacccgccggggtgtagcagcaaccaccaccaaaacattcaagagaagagagtcatcatgcgcttcatgcaaactgcggccgctgcggccattgcttccgcgtttttctgcggctccgccttcgcggagaccccgaccgtcacgctgtacggcatcgtgaataccggtctttcctatacgcatcagaagaccgccccgggtaagtccactgacacggttcagatggatagcggcaactacctcgggagccgctttggtttgaagggtgaggagaagattacggatacgacgtccgtcggcttcatccttgagaatggtttctcgagcgacaccggtacggagtcggacgacaaccggatcttcggccgtgaggcgtccctctacgcgaagaacacgaatttcggtaccctccggttcggccgcctcacgcagctcaccggttccaccgggtcttccagcatcatgggcgggaagttctccgcgctcagcaccggctggggcatcgtctatggccacaacgccgtgttcgcgggcaagttcgcgcgctttgataacgtcatcaactactccaccccgacctggaacggctttgacctgcatctgcagtattcgggcggcattgatatgaagtccgaaaccccgacggggcgtgaaaacaccggatccaccacccgctacggcgcgatcggtgcccgctacatgaagggcgctttcagcacgatcggcgtggtcgatacgtatcactacgcgaatacacaggatgacgcgggctacaccgcgaacctgagtgtcgcctacgacttcaatgtcgcgaaggtgttcctcgccggccagtacttcaaggatatgcgttacctcggcaaggccgcgattaacgacacggtttcaggcgccgcggtcttcggcaactccaccgccaaagacggctggggcatcaacctcggcgcgacggctccggctttcggcggcaagttctacgccgcggtgggctacatggacgccgatcattcagacgacaccgccggcaaactgaagcgctacacggtgtccctcggctacgactattcgctctccaagcggaccctcgtctacgccggcgctggctacatgcacgacaagtatgacgacttcgccgcgaccaccgttggctccgcctataactacggcgtgaccgcgggtctcgtccacaagttctgaaattagaccactaagagtcatctctccttagcagtaaagagcagcaaatttgaagggctccttccagtcccatcccaggaaggagccccttttttgtccgcgttttactggtggagagaagcgttctgtttcagggcttccggcgtcagagcggcgtgtggtgaatgacggtgggtttccggctcatgagccggtactggatgaggccggatgcgagctccgccgcggtgataagcgcgatcccggcccaggtgagcgcctgcggggtatcagacgtgatcgcccatccgaggagcgcggcaaacggcaccgcggagaattgaagggacgccgagagaagcggttttccgtggccccagccctgagtctgcgcgagctggcttccgaccgtcgtgagtccgatcgcgagcatcacaggttcggtgaagagagacagcgcggattccgcggagaagagactgaacatgacgatcccggccgcgaggcacccgatcgcgaaccaagtgacggtccgaatgatgggttctccgagagacccaagtttccggagcgtaagaccggtcgcggcggagcagagcccggaaaagagcccaagcgcgataaaggggagtgacccgtcagcgccgccagggcgcatcacaagcaacaccccgataaacccagccgcgatcgtgagcagcagccccggatccgggaagcgcttcagaaggacgccgcgcgccatcccgaacgccgcgacaaagagcggcgcggtgaagacgagcgtctgaaagaggacgaccgacatatgctgcaccgcgatgatattcacgcagagcgcggtgacgccgcagagaatccggaaacactgaagcccggggtggcgggttttgaggctcgtctttgagaccgccgcgatcacaaggatcacaagcgccatgaaggcggagcggacaagaaaaatgtcataaaaagcggtcccaaccggcgcgagcttcacgagcgcgtaggtaagcgtcgtgagaaaggtggatagcagcaaccagaaagactgcacggggaagggctccggggaccgggaagagttttatggacgtaggacttaatcataacgacgtattccgtaaagtccatgccggaaaagaaggactttgggagtctctgcgtgaggtcaggaggtgaccgtcatctttgccgttctgccacagagaaggatcgggttttgcctgcggaatcggtaaaaaagaaaatgagaatcggataaaacggtaaaaggtctttagccgatttgttcgattcggcgagcggcttttgagaaagcgtcacgatttctcagaattgaagacgaaaaacgccggcacctccttatcagccgcggaaatcagggctctgcagcgttttaacggttttgttttttagaggattgcgactcgcgcgatgccgtttcagtcccgaatcggtaaaaaagaaaacaggaatcggataaatcggtaaaaggggttttaccgatttgaccgattcgggaagaggtctctcagcccgtgattttctttttagggacctgaatcgataaaagccggtatcgccagcggcggccatcagaggtcttcaatcggcataacgattttatctgcggcgtgtaggcggaaagtaattgaaatacatcatctatttttatttaaagaaattaaaatagttacttgatgaacgacggagtcccggatatgtatcagatcagcaaaaatcacatcgcagttccgccaggagaaaccatcaaggagcagctggagatttgggagatcacaaaggccgaatttctctcccggatgggtatgacagaagatgagggcgaggcgcttctcgaaggtgacatggcattgacgtccgacatcgcctcacgtctggaatccgcgctatccattgataaggggttctggcttgggcttgagggcttgtaccgcgaggacctcaaaaaagtggaagaggaaaacgcccggatgaagaagccagcccgttcctgaatccagcggattatgatgacgggctccagaaactgaatatcccgcttaaagagaatgaaggtaaaaccgattcccgagaaaaccgctctgccgcccggatcaatgatcggagagatgctcgcgatgcagcagatctcgctctcaagctttgcctcagcgcttgagatcactgaaaccgatgccgaggcgctcctcgcgggcggcctgccgctcacggaagagatcgcgggaaagcttgagacgcttctcgatctccccgcccacttctggctgggactggaagcgagttaccgctcggatctcagaaaataaagacggcgtcaaagactgaccccgtctcctcagacaattttccgtgtcagaaaaaaagaagacctccattccgtgagtaatcaggggatggaggtcttcacgtgcagaaaggcgtgtcagcgtgcggttttaacgcctttctaggcacccggaagatctgcctctcagaaatttatctattgagacagccatatccgtagtctacctttgctgtaccggaattgctaaaaaattgaggtatccagacagatttaggttatacggaaaagcagaagagaatacaggtaagcctgtcaggcgtaagggcgggattcgatccaggcgtagatatcagccgcgcgccaggcgacggactgaatgccgatttttaaactgcgagggaatctcccccttatggaatccatgtaaattgaggttctgctcctcccggtgagccggactacttctcttatccgcatcagaccgggatggtcttctctcagtttttcatcccaaaagttctgcaatagagccacgaaagccttcgtggctctggctcatcaaatgccgagcagcttcaggaacagttggtcgcgcttcacggactcggtgctccagcgcctcattccccgcggcgtcatcacggaggtcgtcttcacgcagtcaaaccactcgaggacttgaatcagggacctggcctcaagccatttcttgagactgacttccagatcgagctcggtcttcgtcttcccatccttttccgtgccgagccgctccttgatctcgccaatccgcttggtgaggtagcagtggtagccgagcgcgacaaactgcacgaagagcctgccctgaaggctgtcagggtgccagacgcgtgggcggctcccgtccatgccattcttttggacattgaagagctcctcaatcttctccctcagcctgtaggacttcagcgcctcctcggcgtccttgacctcattggagacaagcgcgaagaaaccgaaatacttcctggcctcgcggaaggcctcgtctctgaaggccaccttcagcttcccgccgcggcccacggtcgaacagtggaggaacttctccgccttcttttcgcccgcgggggagagctgctcgccagcctcgacgagcctcttgagctcgaacaggtcgttcaccagcctctgctcgtcctttgtggcgcggtccctggaatagcagacatggacatagagcctgcggctgaaggtctccgcctcgccggcggcaatgccgccgcggctcctctgcctgacgacggacagctccttcatgaccattttcgaggcgcaatggaccgaagtgtcgaacgagcagacggaggacaccgagtcgagcctgtcgcgcagctcgtcgacgatctcccgaatccagagggtggagggcgaggcgagcgtcaggaacttcatgctgttccgtgcgaactccgccatgttcgcctggctgtagaagccgttgtccgtaactacgacgggcttgtcgatgtcgaagcactggagctggcggatggcgttctggatggagatgacgtccggcacgttccccggctgcttcgcgaaggcgacgggctggcggtcattcaccgagtagagcgtgagcagcttgacggtgtccagcccgtcgccgtccttgttgaatccctggcgggcctcggcctgccccgagctgtaggtcgaaaccgtggtcgagtcgaaggcgatgctcggggacgtctcgagccttgccgcccgggaggcaaagaacttctgctgcccgtcgccatccttgccgaccttgtcgaagagctcgctgcaggcgctttc

SEQ ID NO: 1302 - DNA, 3344 bp, Unknown
  gut microbiota DNA sequence
ggaaatcttatggtcacaccagcctttcgaatcgtacgactcttctacggcgttactcggatccaccttgttcttgaatctctgccagaggagccacgtgtcggcatacggcccggtgccggccggggcggcgttcatgtacgtcgcgtagaggccggcggagtaaccggacacctttcctttagacgtctctccgatatccgttgaccgggtcttttcgctttggtgggcgtaccccatcatgagaccggcgtggaagcggtggtcgccggacccaggccaggagacgacatcgcccccaacctgcacgagaccccacgtgccgcggttcgtgagctgatcatccatcatgcgggaatgggatctcccgcccgccgtccggatccagatgttctccgaatgcttctgagacttcaaggcgtccgagtaccgggtttcgccaagccgatccgcgagtgacattgtgaaaagcgtgtttgaggcgatcaggttcgcggcgtagcttccgagttccggcttcacgatatgtgtcgtgggatccgtggggtcagtcggctgaatgtccggctgatccggagtgaccggggtatctggagtgtcgggtgtatcgggggtatccggcgtatccggtacgactggatccggagcgtccgggtcccgttcgctcgtgaggtaccagttgctcccgactttcttaagcgcgtagagataagcgccggcggaaagccggttcgagtccggtttcgtgaacaccgcgtctgactccccgtccacttccaccactttgatcccggtgaccgtctgagccccggaccccgagactttattgaagatgagggtcgcggtgcctgtggcgctccccttcacgagaagcagatcgtgcgcggaattgtcgccatcgagcacggtattcatgttcacggtgcccccgtccgctgaatagtccccgtcaatcgtgagcgtcgtgccggtgaaagccgacgcggacacgggtttcgggaaattcacagtgccggcgtcctgcgtgaggctcgtgagttcagagtttccggtgaggttccagatacccgcggggtccgtgaacatgagatccgcggtgccgcctgaaagcgtggaggagccggtccaggtgccggcgagcgtcacagtcgccaaggcgccgtccgacgccgagaggtcgccagtccacgcggtgccggtcccgaagtcagcctgcagctgggtccccgagcctgactcggtcacgttcccagtgagggtcgacgtgtcggagagcatcactatggcacctgctcccgaagtctggctgatatctgcgaggctcgacgccgaatcctgctcctgaaggaggaaacggcctcctgttccgtccaccgagacttctgacgtgccgccggtctgcgacgtgtacgcggcgtctcccgtcagcaccaggtatacccagctatcggatgccgtgatcttattcgctttcaggtaggaaccggttccgctttcgtgaatggcgacgcgggaatcattggtggctgtcacgttcccaaccacctgaacgcttgacgcggtcagatctccgttaatcgtgacaccggtcgaaggatcggcgttatcagagagaatcacctggccgccggattggttgattacctgaatcggggcgctgtccgcccgaataaccacactgccctcgctcgccgcgtaaatcgtcggagagtcggaattattgagcacctgaactccggtgcccgaagcatcgttcgctttcaggctaaccaacccgtgaccggtgacttcaatcgcggcggacgaagcggcggtgtctttcacggtcacgctgccagcgtcaattgtgacagtgccatccgaatccgacatgattgccgctgcggcggattgaagactctcaaccgccactgtgccgccgtcgtggtcttcccccgtaccataaagattcacgctgccgctgtccgcgaggatcgcgaaagtgctgtttgatgtgaccgtcgtgctcccggccccggcgatctggacgatcgctgaagcggcattcgtctcaatgccgtagcccttatcggcggtgatcgacgcggtgccgcctgaaagcgtgaggtcgacgccccggtacacgtaccgatccgtcgttccggcgctcccgaggatcgcggcgcccccttcagtcgaacgcacggtcagattcccgccgatcgtgccgtcaatattgttgtttgaccccgtgacaagcgaattcccgaccgtcgtgacactcacatcccccgtcaccgcgaggtgaacgcctcccgtcgccgtgccagtcgcggtcccggtgaggtcgttcgcggacgaaatgccatacgggctgatccctgtgctcgcggccgacacggtattcgtgaccgtgagagagttaagggtcagcgtgatgcctgtcgcggcgtccgtgtctgatcctgcctcaaccggcgcaagggatccaaccgaagcgggatccgtctgatcggtgtatgacacgaccgcgtcagtcccggcggcatcaagcgttgtgccgatctgcgtataggtagccgcgtgcgccgcgcttcccagtgtgaaaagcgccgcagcaaccgcggcggctgccttcgtccccttcagggcataggtttttctctgcttcatggtgaatactcgtccaatagtgtgttcagccggattaaagactcacctcgggtcagaaactgcccttcaaggggaattgctgagagggatggattctgactttttcgcctcacctgtttatttttggctgttcttcaagttgacagatggaccgaagtaaggattacggtaattatggaatctttactcattatttcgtgtcgcttccgatttcgcaaataaatacagaattctgttgccttccggcaacagggaaatcagagaactaatgacttttccgtaatttcaaaaatggatgagttaatttcggttaactatttcaggttgacaaataagggcaggaaacccgagaaagctgtcagattctgacgaaggataggatcagttttcggtcgttcgagactcctccgaacgcctcaggccgcgtcacctgtaagaggcagtgaaacgcttttcgttattctctttttgaatatccagcataacttgcaaaggactcaacctatatctacctagtactacccaaaaggttgattgatcacggcaaactatttaaacgattgaaaaaagccctgtatctttttttatcgttctcgtaaaaaagccccgctctcaaaaggtctcgcaaatttaagaaacctgtggcagactgcccccgatgctttgaacaagcttttgatgtcataaaaatg

SEQ ID NO: 1303 - DNA, 5312 bp, Unknown
  gut microbiota DNA sequence
atctccgtaacattgaagtgatttttggatgttaaagaatcgtttatctataggcaattacgcagatttaagaatacagtttgtgaataatttgttaatcttgagatgattaattagaagaatcgaaaatccttgataatcgctctctttgcctctggtggaaccgactttctgagtccttcggttttgtctctcacaaactctttccaaggtacatttttttcaatattatctttaggtaattatgtttaggtaaattcttgtagacccatacagacgtaaacagcacagggaccgtccgcaggtacggtaaacgttataactggctgacgcctgacttcctcattaaggccaaaacctatgtaccactattctttggtggacctgctgcttttctccgctgtcgctgaagagtcctgtctcacacgcggagccagaaaggcacatctctcgcttccatccgcctctctcagaatgaaatcgcttgaggaggcgctccacgtgacgctctttaaccggaagccgcgtggcattgaattgactccggcgggcgagatcctgaatcagcatgtgaatgagatcaagcagacactcgcccggatggagaacgaaatcgcaccgtatgcccgtctgagaagcggcgtcatccggatcgcggcgaactatggcgcgatgcttgatttcctcccagtcgatatcccgtcgttcctcaaagcgaatcctggcgtacaggcgcatcttgaacagaagacatcgcctgaagtcgtggaagagatcgcccgtgggcgtgctaacatcggcgtgaccgcctttgaaggcccctacgagggcgtgaagttcagggattaccggaaggatgagctgatcctcgcggtgccagcggatcacccgctgaaggatcgtgagacagtcgacttctctgaggcgcttgaatacgaattcgtgacgctcgatcggaacttcgcgatgcagaagtttctctatgagaaagcagacgaaatcggccgcgttctgaagtcccgtcttgaggttgaggatccgctgatcctgctgcgttttgtgagtgagggccttggtatcggtgttctcagtcgcaaagcctttacatcgctctcagcgtacgcgaaggcggttccggtacgtctttccaactcctgggctcagagagagagctcagaatcgccgtcaatgaggatcccgcgctccgaggtccctggacatctgctcttatcagtcatctgacccgggactcgtccgataacgtttaccgtacccagcttctttgatttcctctattaatttctaatagaagctaatagctcctgatagtttcttcataaaacctatcaggagctatttttatttccgtctcaagcgaaaaatcctcttccggatctttcgcacgatgcagcaagattgatctctcagaattcagagccagtaaatcctattattttctaatagcttctaataaattctattaggaactatcagaaaccaatagaacttatgtgggttctatgagaaacgattgttggttttacagctaggaaagaaacctaagatcagacggcggtgaaacgtgagagaaagagaagagccctggcgggaaagaggagagaggtcagaaagaatcgaaaggaggggaacgcccctgctatcagaaactcatagaagctaatagcatctaataaaaaatattaaatcctgatagaaactcatagcttctatcaggattcatgggccgaaggatgaaacaacagaatcagagtccgtcttcgaggatcttcacgatcgcgagattgatgatgccggagcgggtctgcgctttcttttcgcagaaacgatccagttcttcaagcaggggaaccgggatcatgaaggagcacatctttctctgaaccggggcgtgcttcttacgggcacgttccgccttctgaggggcagccttctgaacgaaatcgcggatctgttcgcggttatcaggctcttcttcagccttcttctgtacagccggtttattcgtaacgctaagatcgatagacattgccgtctcctttggctcgtattttacttggctaagaccgtctgattcacaagatggcggacttcagcgcacgccttctcgtttctcggcttcatctcgtagacagagagaccgtgatttccagcctcctcaaacacgacacgcgaggtgagcttcgcgtccacgtatttgatgtcatcaaggctccgcaggaactgcaccacctcatggtcgttcttcgtcatgcgggtatgcgcctgggagatgaagacgaaggccttgaacttcgcgccagcctcttcacgagccttctgaatgacatcgcggatattaagcgtgaaagcgagcaggtcgagcccagtcggacggcacggaatgaggagcgtgtcgcagatcgccatggaagcgcggagagcatccgtctctcggccgccgacatcaatcaccacatactcgtacttctcattcagtttcggaacgcgggtcaggatctcaccgccatccgtgatgacctcagtcctcagcttcggcgaaacgaggttcttttcccgcgactgaatcgcgagattggaggaaccctgcacgtccgcgtcaaccaggcagactttcgcttttttctgcaccagcaggtaaagcgctacctgcagagcggccgtggttttccccgttccgcccttagtggatgcaaccgcaatgatcattcgagcccccagaaaaatgttttttacgatctgtgctgtagatgtcaatttctaatagatgctattagcatctattagaatttatagatgttattcataaatattaatatttattgaataaatcagattgtatgcaaaatccaaaagcagcgcaaacagagggaaaaaaaactacttaaacggacacttcctgaggccatcctgaggtcctttcattggccgaggagacttcgcgaatttattaaaaacgatcaaatcctggtacggtaaacgttatcggacgacaaaatgacgcatggtcggctcttatgttctatcccgatcttttctcgcatggactcagagagttggacactgcttttcaatcattccttcagcttcggtaaaaaacgccctgaaaggcctccaacgggttccgctataccgtttaccgtacccaaattcgatctctttcaggatcactttggatagagaaggagacccttgttataacgtttgccgtacctgttttctggcggaatccagatataacagcaaagcctcgccgcagcctctgaatcaggttcagatataacggaaaccgtacctgactgcttggatgaagagtttctgttttttatctagttaaaacaatgtgttgtgattgatgtttattgaagataggccatcaatcgataacagattccgtactttaatcgcggtgttttttggggcagatataacacttaccgtaccttgttaccgcaaaagagacatataccagtcaaaagctgaaaaaatgatggcaaagccccccagttataccgtttaccgtaccagaggaaagcgcggaatccggttgagtcgcttggatctcttcttttatcggtaacactttccgtacttcagacaattgattttttctaatcaatttttgtttaaaataaacagagagttaaggaacgcatcttcaggtaatggacaatcttcacgataacgtttaccgtaccctgatggctctgtcggtataacgtttgccgtaccggtttttcgctttcttctgatcaaaaaacggtgcatttaaatccgatagatcgatcgagaggacatatagaaaaatttaaagcctcttaaatgaacgtttttcgggggtctgaaagacactgatataacggaaaccgtaccctggatcttctggaaccggttataacgtttaccgtacccgaaaagaaggtctcaaaaacggacggtgtttttctctcagagggtgaggaaaattttgtgggtgactctgagataattgctcttggaggagcctcaaatgaaacgaaagacagaccccttggatagtgttgcaggacagattttagaaaacgccaagaaatccgggcttgagattaataccgcagaggatgcggaaaatcttatggcccatatgctcggtcggctgctgactcaaatgcttgacggtgaaatgaccaatcatctcggttacgaaagaggcggtaaacgtgtcaccgaaaatgagcgtaacgggcatagttcgaaaaccctcaaatcgtccagccttggaaatatccgtattgacgtacccagagaccgcaagggagagtttgagccgagggtcgttcctaagcataaacgccagctggcggggtttgaggacaaggttctggccttgtacgccagagggctctcaacccgggaaattcaaggctttctctatgatgaatacggtatggagaccagtgccgaatttatcagcgatgttacggacgccatccttcctgaggttgaaaaatggcagaaccgtcctctggatccgttttatacaactgttttctttgacgctattcgagtcaaaatccgaggtgataatggcattgttaccccgaaagcggtccatcttgccttgggcgtaaacgcccagggccgcaaggaagttttggggatgtgggtcgctgataacgaaagcgcaaaatattggcttaaggtcttcactgaactcaaaaacaggggggtgtctgatattctgattgctgtcacagacggactcaagggaatgaaggaggcgcttgaagctgcctttcccaacactctgctgcagacctgcattgttcacctgatcaggaacagtctgaaattcgtcggatataaggattacaaggccgtagccggcgcgctgaagcccatttaccgggccgtaaacgcggctgatgcgcggaaggaactggacgcttttgcacagtcggaactggggctcagatacccttacatcgccaaacagtggatcgattcctgggataaggtgatccccttctttgatttttccccaaatatccgcagacttatttatacaaccaatgccatagagagccttaatcgggatctaagaaaagtaattaagacccgagctgctttccctactgaaacggctgctttgaaacttctctttctggcaatccggaaagtagagaaaagatgggtgcggccttctccatactggagtgccgctatgagagaattggttgtgctatttggtgaccgaatcaccccctacatcgattaaccttgaacgagccgcccacaaaaaattacacaccctc

SEQ ID NO: 1304 - DNA, 4617 bp, Unknown
  gut microbiota DNA sequence
gtctaacgtctccgcgtaaaaccctgcccctgatatccgcatcgcggagccgttcccaaagctcccgtagggcttctgctccgggccgcgcgcccacgtgataaaccgcccgccgtacgcggcgtccggatgcgcgttaaagaagtgaaggagttcttcgaccgcgagggtttcgagttctccatcccccgcgtcccagcggagaatcgcttcttcgatcgccgcggtgaggaccgtgtcatccgtaaagtgggagccagccgagaaaagcggaaagtctttggaacgaaggttctcaatctcgtagatcgaccccacaatatcgccagccgcggctccgtacatttgatcggcgtccttaatgagtcatgattgcgatgatattttgaccgggttgacagatcccctgtcaggtatggaactccgatttcaatcatagaccgccgcgtgttccgggttcggaaggggaaccgcgttcagcgtatattccgtaatcaattgggggaaaccggaggcaggcgctttctcgcttccctcacagaatccaggagaaccgcggatgaatcttataaagagtctcttcactggcgcagtactgatggcggcggccgccgtgtcgctcgcggagcagccgatgccgctgccgcttgggcgcgacatctcagcctctttcaccggaaccgcgcaccggaatgatctcgtgattccggaaacgatgggcggagtcccgcagaccaacgtgatcacgtttgagccggggagccggagcgggtggcacacgcacggcgcgatgaccgtgatcgggatcgcaggcgtgggactttatcaggcgtgggggaagcccgcggtgctcgtgcggccgggggacgtcatccatattccggcgggtgtcagccactggcacggagcgacgaagaattcccgcttccagcagttcgtggtgtacgacaagacgtggaaagctcccgcggggcttgaggttcataagggaaagatcacggatgccgagtacgacgccctgaaaccggtggacgccgcgaaccgcgccgctgaaccgaaggacggcttcctcttcgcgcatccgaagaagaccgaggcgtcggatcactacacaagacccattcaggcagcgacgcttctcccgaaagaaaacgcggcgaagtcccccgagtggacttacctcgtgttcccgcacggcgcttacagcgcctggcatagccataagtcgggcgaagtcctgatcgcgacggacgggatcggcctcaatcaggcggagggcgggaagctcgaggttctgctcccgggggacgtcgtctacacgaaaccgggcgtctcgcactgggtggggtccgcgccctggagcagctttgccgggatcgtgatccatccgggaagtgacaccgcggtcacgtggaaagagttccctgacgcctatggaccgctcgcgaacgggaaaggggatccggcggagtaacagatccattctcttccttgagaatcagcgccaagtatttaagaaaatcgggtagctgatctggggccggcggattaatttattctctatcgataaagggcgtttcggggaagggcgtcggaattttcaggcttcccgcccctgctccttcagcatgaggattgagaaaaatggaatatacgcatctcggtcaaaccgatatccgcgtctcgaagatgtgtgtcggctgcatgagtttcggaaaagcggggtcgatgcaccagtggacgctcgacgaggacgcgagcgccgcgatcgtgaagcacgcgctcgacctcgggatcaacttctttgacaccgcgaacggctactccgcggggacgagcgaagagtatctcgggaaagcgctgaagcggtacgcgaagcgtgaggacgtggtgatttcgtccaaggtttactttaacgaggggcggctctcccgcgaagcgatccaccgtgagattgacgggacgctgaagcgcctcgggaccgactacctcgacctctacatcattcaccgctttgattacgagcatccgatcgaggaaacgatggaggctctgaacgacctcgtgaaagccggcaaagtccgggcgctcggtgcctccgcgatgtatggctaccagttccacaacatgcagatcgtcgcgcgcgatcacggctggacgccgttctccgtgatgcagaaccactacaacctgctttaccgcgaggatgagcgggagctgatgccgtacagccccttggcggccggccacctctgccgcccgacctgggacagcgactcgatccggagccggacggacgtcgcggcgaagaataagtatgaccgcgcggaagcggacgatatgaagatcatcgcccgtgttcatgagctctccgaaaaatacggtgtcgcgatgaacgaaatcacgctcgcctggctctgggcgaagggtgtggagaccccgattatcggagcgacgaaagcgagccactttgattccgcggtgaaggcgctcgggatcaagctgacagcagatgatgtcgcgtaccttgaggaaccctacacgccgcacacgattgtcggcgcgatcgacaagaatccgccgcagggcaccacgatcattctcgataagaatccgaagtaatcggcagccgtcatccatcacggcaaacaaaagcgccccggggtcattacctcggggcttctgatgtcagggggggggaaggtttcgatccctggagtctgactctcaggatccttccggaatccggatctgcgggtaaagctcctccgcgatcggaagcgcccagctcatatcggcgatgagcggctcatcccacgcgctgatcacggatttattcacgagctgcaggtaaaggtcgagcgggaaattgacgacccgggtgcgctttccggtttcactcgtgaacaccacgtagaagtttttgaggtgaccgtagtccccgaacacttcggggttggaaaccgagaagcgggcgttcgcgtacgtgaatttatcgtccgtttcttcctgcatccggaggaggcaaagcgccaccgtgatcgccgcgtagtggtcgtagaggtggacagaaagcatccggccgtgctcaataaagtcttcaatcgtgaagcagacacgccgggtgcggcccatgaacatcgcgcgcgacatccggctccagacggtgggtttgccggcgacgcggatagccgcttcttcccgcgtctcatcggacaatggacgcgcgaggaagagttccgtgtcaaagccgcggtacgggaaatagacccggagctcgggccaaaccgagctttccgtgtgcccgcaccggggacacatgaaggtaaacggattttcttttttgaaccccgactcggcgctttcgaataacttcacgagcgccgggaggtcttcttctttccccgcgttcatcacggtcggcgcttcgaagcggtacttatcgccgcatttcggacaccggagggtgattgtctgattctctgccatgatgaagctcctggggctgcggggtgaaaacaaggtgacaatgtcacaggaaaaatcttacgttcaaattccgtgaaactaaagactgctgaagacttaaccgcaacacgaaaaaacccctgaaaggagaacctttaaggggcgtagaggcaccgttcatatggtctacgacggatggcgttatcagccgatcggactcggcgcggcggcgttcagatccggcctctgagggaagcgtcgggcgaggattcaaacctgacagaaatcaggcggtgttaacacgtaaaatgtctgaaacaaccgggcggacgcccgaacaaaggaaaaccaatgaaaaaccgattccttgggaaaattgaagtctcgccgattggcatgggctgcatggcgttttcgcacggctacggaaagattccggatgaggcctacgcggtgagcgcaatccgggcggctctcgatttcggatgcacgttttttgatacggcggaagcgtacggcgagcagctctactaccggggccataacgaacagatcctcgggaaagcggtggaagggttccgggacaaagtcgttctcgcgacgaagatccacttccgggggaccgcctataaaccgggcgacccgatctacccgatcctgaaggagcacctcacgcagtcgcttaagaatctcaggaccgattacgtggatctctattacctgcaccgcgtgaatctcgagatgccggtggatgaggtggcggaagccttcggacgcctgattgaggagggcctgatccgcgggtggggattgtcgcaggtgtccgccgcgcagctcgacgccttccatcgggtgacgccggtttccgcggtccagaatctctacaacatgctggagcgggactgcgaaaaagacatcttcccgtactgcctcgagcataacatcggcgtcgtgccgttctccccgatcgcgagcggcttcctctcggggaaaatcacggcggacacgactttcgagaaggtcgacgatgtccgggtctttgtcccgcagctctcaaaagaaaacatcatcgcgaatcagccgatcctcgatatcctgaaccggtttgccgaggaaaaacaagcgaccccggcgcagataacgcttgcc

SEQ ID NO: 1305 - DNA, 34387 bp, Unknown
  gut microbiota DNA sequence
aagggcgaagcagaatccatcaatggcgccggatccccccttgccgcggaaatttccgaggacggtctgcagtgcgccggcgtcattcatggtgacgttctgcaccaccttgccccaggtgccattcagcgtgatgaagtcaaaaattccccaccagtgattcgaagcgaacgcgccggagaaaaacacgcaggcaaaaatcagcgagatgtaagcgccgatcccaaccttcttttcaggctggatcagttcatcggacatatcgagagctcctatttttgttgagtaatccgccggtcacgtcgctcggggctgtgccggcaaagggttttcccgaaagagaagctcgaattctagcaaagagatgccaaaacaccaaaattttttaatgaattaaatatttcaggtaattgaaaaataaaaaattttttaaacttgagtagttatttaagtaatatcagagtagtgaattcatcatcctgatttcttctgtctctgaaaaaatacagaggaatcaaagctctcgggtggtagaaaaaaagaggtagatcaggacattttttccggggtgacgaagccggaaaaaaatgcgaaaaaaccggagcgtcttcccgaggcgctccggttaatgaagtgatatcaggaaagatcaggcagcggcgctgagaggagaatcttcagccacttttcccgcgtgggtttccggacgttcagactccatatcgctatggattccaggcgccgcgcggagaagccgcatgccgttagccaccacaatcagcgtgacgccggtatctgcgaacaccgccatccacatggtggcaaggcccgcgaagtcgagcaccgcgaagacgatcttcacggcgatcgcaaatgcgatgttcgcgacgaggaaccggtaggttttcgctgccagccgtttaaagaaagcgatcttcccgatgttgtcatccatcagcatgacgcttgcggcctcaattgccgtgtctgtgcctttgactcccatcgcaaaaccaatatctgaggcggcgagagccggagcgtcgttgatgccgtcacccaccatggcggtaaggccgtctttctgaagactgctgatcttctcaagcttctgctgcggaaggagccgggcttcggcgtgatcaattccgacagaggccgcgatcgcgccggcggcccgctcgttatcgccggtcagcatccagggcgtcattccggcggccttaaggtcagcaatggattcgcggactccgctcttcacggtatcagcgactccgaacacagcaaccggtccgaagaggtcagcgagtaccgaaacggtcttgccttcagactccagcttccggacggctgcctgataggaagggcttccgcctttgactgcggcgggagacacgagtttcagcaccgcgcggccaaccttcgcttccacgccggcgcctggaatcgctttcaggtcttccgccgggccgccaagcgactttgctttcctcgcggcatgtgtgatagcagtggaaaccgggtggtcagaaagctgagaaagggcagaggcgcgttcgagagccgcgttttcagagagcttcggagacacagggatcacgtccgtgcagaccgggcgtcctgtcgtaatggtgccggttttatccagagccacgttcttcaggagacgtccctcctcgagatactttcctcccttgatcacgataccttcacgcgccgcgcaggccagcgctgaaatgatggtgaccggagtcgaaataacgagcgcgcaggggcagccgatcaccagaagcacgagtcccttgtagatccagtccatccaggaagcgcccgcgaagagcggcgggagcgtcgcggtcagaatggcggccgcgaagacaatcggcgtgtagtaaagagcgaaacggtcgacaaaacgctgcgtaggcgccttcttctgctcagcatcctcgactgacgcgatgatccgggcggcgagcgtgtcagaggaaggtgccgtaacgcggatttccagcattccggtggtgttaaccgtgccggcatagacatcgctgcccgggtgcttggacgcaggaacgggttcgcccgtgatcatcgactcatccgcggacgattcacccttgacgacccgtccatcgaggctgatccgttccccggctttgactcggatctgttcgccgatggcgacggattcaaccggaacggtttcccaccctgtgccgcgcttcacttccgcggtcttcgggacgatggagagaagcgacttcacaacgctgcggctcttctcaaggcagagctgctcgatcccttccgagatctcgaaaagcgccatgaccatagcgccttccgcccagttgccggtcaggatcgcgccgatcaccgcaagcgccatgagagcgctcatattgaatttgaagtggaagaacgagatcaggcctcgcctgaaagttgagacgccggagagcgccacggaaatcaccgcgagaagcagcccgatcaggtcaggcgcgctgaagccatgcccgaacaccgtgagaacagagccgcctgccggagcaaaatccggaatcagctcagccgcgaaggcaagcaccagcgcggcgccgagtttcttccacgggattgaggtcttgaccggatcagacgacttccggagcgcgagctgcgctgaataaccggttccccggatgacttcaaggatttccggcgcgcggtcgcgcgccaccgggaacgtaatcgtccggcgacgggtatcgaagacgccgtccggaatctctgggtgagcggaaagcgcttcctcgatttctccggcttccaccgcgcagtccatctccggcacgagaatgatgatctgctccgaacttctctcaggagagcccggaaggatttgcccgggatgaccggcccgatcgagtgcggcaagaatatcctcgtcggacaccgacgcggttctgacctccagtgtccggcgcgcggtatccgcggcaatagagctgatgccgctgattttttcaagttccgcccggatttctccttcctccaccgggcaatccatatccagaacggaaagccggatcagtttttctccggtcttctcttctgttcctgactgagccatgacaggcctcctctttgaatggtttcatgtttgttatgattaattaaaaagcctgtagttgctacagggtcaagagttattgatcgaacagaattaaggattaaccctatgagaatcggagaactgtcgcgcgagaccggtgttccggttgagacgatccgctattacgagaaagaggggcttcttgagcccccgatgcgcctgcagaataactaccgctcctatggtgaccggcatctcgcaaggctccgctttattgctcactgccggaaactcgatatgagtcttgaggaaatccgcgagattctgaattacgacagcagcaagccggaggaggccgggcatatccacgagcttctgcatcgtcagattgaggcggtggatgccagaatccgggcgctgaccgagcttcagacaaagctttacgagctagagcacagctgccacggtcatacgcaggggcatcagtgcggcattattcaggagctttctgcccccgaggcggggaggaaaccggacgcgggatccattaaactcgcacacggctaatttacttattggacactgagtcaaaagatggttcatttcacgccgcttcaggtcatcctgaacattgtgatcgcgcttctcgcggttgccctgcctacctgggttctttggattgtgggaagcaagatcccgccggctcttacctgtgagggacggaagagcggatttgccggctccctgccgttctttacggcgacgctcgttttcttcttcctctactgggtcatcatgacggcggttgacgccgctcaggcctatcggtttattctgatgtcggtcgactacacgccgctgcagattctgatgccgatgatcccggatgtgctttttgtcctcattttcggctgggtgatcgtgcgcctgacgatgaagcgctcctcccgcgtggtggccgaagcggtggccgttatctgggtgctcggtccgatcgggacactggggtcgtttttcttctaccagaccccggacctcaatgtgacggggctcttcgcctcattcttctacgcgctcgccgcaacggtttacctcgtgttctcagaccgtgtggcgctgacctacggaacccgaagcggccgctcactcaggccgctcaaggtttccgctgaataaaagataaggaggaaagaagcatgagttatgccggttcatttcagatgtggcttggcgttgcgattctgatcgggctgctcttcattctcgtggtgagtctgaagaacagcgccgcgaaggtggatgccggacgcacggatcttgaacgctggcacggcagcgtgacggggtggttcctcgcgctggtggccctgatcgtctttatggcgtttcagaacctcgtgcttcttattgtcctgctttcttctcttggccgccgtctcgcgatggacagtacgagcggaatgctggcagtgcgttatatcctgcctgcctttctctcgttccttttctacgcgctgtcgatctactttatcgtctgggtgcggaagccctgggttccgaaaatggcttccgcgctgctgtggctcgcgggcccggtagtgtcgatcccggcctatgcgctttttggcatgcagccggggccggctgacttcgcgatcccatccggggttgcggtgatcggcacggtttatctgctcttctccaaacgttcccgcgcggtgtaccgtgtgccggcaggaaagatctgatggctccgctcccaatgcccgagcgggctgatgccgcggacgcttcccgccttgttgaactctcggtgagacgcggctggcctctcgcgtcgctcaggaaagccccgtttgaagaccgccacgcggtgctcgccgggttcgctctttatgcggaggcggggaagggggacgcggcggacgccgcgaagaagttccttgccggagccgggagtttcctctccggaacgcctgaagaactgatggagctcgctctggaatacggatggctcgcgccggatggcgccgcgaactttacggtgggaccaggagcgacgaagcgggggctcgaagctgaaattgaatttgcggagacgcttcgtgcggaacgccgggaaaagatccgggggcagcttcaggcgaagaaccgtgaagtgaacggcccggcagccgggtttgagccggcgctcgaagaagacgtccgctttatgaaagaggcgctcattgaagcccgtaaggcggagcctgaagacgaagtgccgatcggcgccgtggttgtgctggatggtgaaatcatcgggcggggacggaacgcttcagtgcacggctgtgacccgacagcgcacgctgaaatcatggcgattcgcgacgcagcgtcacgcgtgcggaactaccgtcttgaccgggcgacgctctacgtgacgcttgaaccctgcccgatgtgtacgggggctattgctcacgcccgcatcgcccgggtggttttcggagcgtcggatgaaaaagccggcgcttttggttcagccacgtcactctcaacggatcctgcgcttcagcgtcggatccgcgcgacgcatggcgtctgcgcggctgaagccgcagcgcttctgcggaatttttttgattcgcggcggacagcccgcgaaggggaaatctagtcatgcagtctctcagaccgaaagtcggtctcatcacgccgagcagaacctatgtgatggaggatgacgcggcggagcttaatacggagcgtctcgccggctgtgtcaccgggcttgaggatctgggattcaccgtggtgcgggacgccgcgggattcagaaactggcgccgctacggcggcacagatgcggaacgtgcggcagaactgaagcaggcgcttctcgacccggatctggatctcgtgctgccggtgagaggcggctacggtatgacgagactccttccgacgcttgacttccggaggattgccgaacgaaagcccctcgcaatggggttttctgactttacagcgctgaacctcgcgcttttctcaaaggccgggcttgcctcctggcagggaccgatggcgggaggcctcgctcccggataccggacgcacgaatcccagatcgcgtttcttgaggcgctgacctccgcatcctggcgtcaggaatggaatgccggcgcatctgacgcggacacggagcgtgagggcgtgatctggggcggaaacctcgcgatggcagcctcactcatcggcactccgtggttcccgaagcctgaacaggtgaagggcgggattctgttccttgaggatgtcggtgagcccccgtaccggatcgaccggatgctgctgcagctttgggaggccggcgtgcttggaagccagtccgccgtggtgttgggctgcttcacggatgctgaccgccatgtcacaggagacctcgacctgagactggaggacgtgctttcagacttcagagaacggctcgctcgctctggcgtcgccatggtgacggggctcccgttcggccacatccggaaactctccgcggtgccggttggggtgaaggggaccctgagggtgaaatcggggcgggctgagctgtccgcggactcggtgcccgtcatcggccgcgggcgcgaccttctgcaggcgtcgctcgacgccgtcagacatacggtttctgaggcttccgccccgctctgaacggaaaaggatactgactgatgggtgcccgtttcagcgccttccgccttgcggtgcgaaggattttttctgaatcgcttcccggggctgtgctcgggaagcgtacctcccgcgtgatcagccagcagctcgatcaggcgatgcgggtgatgtctgtggcgctgattgcccaaggggcaggcgccgcgcttctcatcgcgtcgctctggaatgccggatcgcatgcgctccttatctcctggggcattgtggtgatcctcacgatcattttttcgatcgaatacaaccaccttttcttcgcggataagaaccgcgtggcccggatccgcggctggattcgggttggaatcgcgcatagcttcgttaccggtatcacctggggtttcgcgggggcggtgtttccgtcactcggaagcgaatacacgctcgcggcgtcggtttccgcggtgatcggcgtggcgctcgggagctggcctttctacgcgatgtggctcccggggctcgcgatcttcacgttcctcgcgctttttccgaccggtctctcgatcctgcttaattacttccatacgtcgcagggctttgtcgctatcttcttctttatcgtgatcggcgtaattctttactcggggcgtcggcttcacgacctgattctttcctccattctcacggaaaccgagaaccggaagctgctgcagaagctggcccgggaaaggaatgccgcggaagccgcccgccgtactgcggtgcgcgaggggcagaagcgtcaggaattcttccgtgcggcgaatcacgatctccggcagccgctgcaggcgatggcgatttacctgcagattctgaagaagaaggccccggccgatattgctccggttgtgcagcagctctcgctctgcgcgggatccatttcaaacctcgtggagcagattctggaagtgagccggatcacggcggatacgcttgcgattcagcgtgaactcgtgccgatcccggagtatttcgagaagctgcgccaggagtgcgatccgatcgccagggctcgaggcggcactttcgtgatccggccgcttgactacaagatcgacacggatccggcacttctttcacgcgtgatccggaacctcgtgaataacgccttcaagtattcggataaagagcatccgatcgtgattctcgccgcccgccgtcgggcgaaagggctgattcagatctgtgtctacgataacgggcctggcatcagccgcgaagaccgggaaaagatcttccactcgttctatcgcggggaggccggcaggaaggcggaagggtttggtctggggctcgctattgtgaaggggatctgcagccggctgggaatcggtctctccatggggtcgcttcctgggaagggatcggttttcagactgcagctcggagcctcaacgattacagagccgctcgcgctttcgcctcgcggtcaggtgaagaaaacgattgaattccgtgatattccggcccggattctttatctcgaggacaaccgtacggtgtctgactccgtgaaggcgctgctggaatcctggggagcgactgtccgtgtggctccgttcctcgatgacgggctgctggaggagatgaagaccttcaaacctcagatcctgctcaccgactttgatttcggagagggagcgccgaacggtattgagtcctgcctgaagctctcgcacgctcttaagacatctgtcccgaccgtgatcctgacagcggtgccggaagacatgatcgagcgcgagtggcagaagcagctcccgcaccgggcgcttgcggagatgcctgaaattctgcggaagcctgcggatgaagagaagctgaatggcgcgctctggcggatgtttgaagcaaagggaccggattttgcggccccggcgggttctgcccaggcggcagaaccagctcttaaaggttgatcttgtaacccgcgcggtgcgcggcaatcagggcttcggtgcggttacgggctccgaaggcgcggtagatcgcggagacgtgagtcttcacagtgccttctgagagactgagattcgtgcagatacgcttgatcgggttacccttcgcaagctcccggagcacatccatttgccggggagtcagcgtcggagcggaggccatgcggcccgcgatgccttcaccggcctcagcgaagaatccgcggcgctggctttcctcaatgatctttgagggcagatagacgccgcccttcaggacaaagtgaatcgcggtgaggaggagatccgtgtcgagcgtcttcggaacgaatccggcagcaccgagcgacagcgtgttcatcacgctttcgcggtccgtgacgccagaaagcacgaggatcttaagcgacggctcctcgcgcacgaactcttcaagaagattggtaccgacaaccccgggcatcgagaggtcgagaatcaggagatccgcttccggggcatggctgtgaacgagtttccgcgcttcatccacggaattcgccgtgaacacttccgagtcgggattttcactcgtgagaagcatggatagcgctccggtaatgagcggctggtcatcgaccacgaggaagcagagcttatcggaagcatcggacacggaaaatctcctttagacatcaaatacgggagtgaattctagccggataacccggggttcgctctcacccgaaacttaaatgtacttaaaatttactgtattcattctttcggagtactggctgtgccgctgaatcccgctcaaatcgcgcttcttatggcgaggctccccgccgcgagccagcaggcgctcgagttcctggcgaaaaccaagggcaaaacacctcaggaggtgtttgaagagtgccttcgcgagtacattgccggccgggtgcctcaggtcgacgtgtcggctgcgctgtcgacgacaaaaaacgtcatgtataacttcggttttgcctttggcaggatccgaagtattgccagggcctggcaggaccggaacgacaaggagtaaagcaaaagggcggttatctataaccgccctttttcattggatccggggtttctgtccggatcaggcttccttttcaggctcgccgctgaaatccatgtgctggaacgcttcaggaagttccacagacttggaggcgccggaaacgagcttcgcgaacacgtcaagcattccctcgaaatccgattcattcacaggctgattgaagcgcttcatcagctgctcaaacgtcgcgaatttgctgtagacgttcgagaaaataaggatgaagttctgcatcgcggcctcttccgtgccggccgcgaagtccgggctcttctcgaagagattgccaggaatagagtctgcgagccacttcacgagcggaacgccggcccagcccggctgggtcttgccggggaactgtccgagaaagagcgccgagaggaagaaaagggcgcgatgttcctgatcaatcagccccagcgtctcttcatcaggagcttcaggcgcatcaacaccgcgcttcgcggcatcctgatacagatcgccgatccggcggcagctttcacgggcaaccgtggcaggaatccgcaggaaagccttgacggtttccggattcttcagatcgatattaccggcatccaggagtgccttgagcttcgcggttgtcgcatccattttttcttcagtcatgaagcgtccttcactttatttggttttattgtcctgcccgtttttcagaatcacacgggtttttgccatggtatcccagggctgggcttcgcgtctcgaggcccagagataggaaaagggaagcaggaaggggtagaggaagtaccagaagagcccgaaattcagaatgccgcgggctctctgataggcctgaaggtaattgatccgtccaagcgtttcctgatccacgactctcagcttcatcagcatctttcccggcgtggcgccgaagaggaagagaaagacggattcgtacgacatgtggcagacgccgagagtcgccaccgcgcagacaataaagagaatgccggccgtctggtcggaaccgatgtggccggctgcgttcagatactcgtagaccgcgctgtacagcatcaggccgcacgggaatccgatgatgaagcagatgagggaatcgattccccgggcggcggtgcgccgcctgaggagaggatcacggggttttttatccatagccccgggagtttagcagatgcgcgggagctgatccgcgttcagccagtcgaccatgcggacgccgcccatgagggtcgtcatctgcacgtagccgcgggcttcatccgtcaccgtgccgacgatcgcggattcctcaccgtgaggcgcggacttcatggcggcgaggcaggcttcggcttcgtcctcggggacgatcgcgatcagtttgccttcgttcgcgacgtagagcgggtcaaggcccaggaattcgcaagcctgagcaacgtccgagtggaccggaatcgaggcttcgttcagcatgatgccgacatcactctgagccgcgatttcgttcagcgtggtggccagaccgccgcgggtcgggtcacggagcacatggacgtgaggagcggcagcggcaatggcttccaccatggcgttgagaggggccgagtcactgagaatcttggagccgaaggagagtccttcgcgctcggacatgatcgccatgccgtggtcacccatggagcccgagatcagcaccttgtcgcccggtttcgcgagacggccggaaacgtgaatccccggaatcacttcaccaaagccggtggtcgtgatgtagagaccgtcgccgtgtcctttctcgaccaccttcgtgtcacctgtcacgatctgtacgcccgcttcgtgagcggtgcgggccatcgattcgatgatcttctcaagcttcgcgatttcaaaaccctcttcgagcacgaagcaggccgcgatgtaaagaggcttcgcgccgcacatcgcgacgtcattcaccgtaccggcaatggcgagggatccgatgtcgccgcccgggaagaagagcggacggatcacgtgagcgtcgcaggaaacgaccggggtgcccttgatttccgggaggaatgcgccatcgtgtccctcgtcgagaatcgggttcgagaagtacttgccgaacacctgagtgatcagctgagccgtcgcccggccgccggcgccgtgcgtgagatcaatgatcccgtgcttcacgtcgatcggagttgagaaataacgtcttttttcttccgccatagctgtccttttttatttttaatcttcgaataccggtaggctcttacttacgaagccggccgtagctgtaataagccgcgcaggcgccttcgctcgaaaccatgcaggagccgagcggatgagccggcgtgcaggccttgccgaacgccttgcattcaaacggttccttctcgcctcggagaatagcgccgcactggcaggccttgttgtcgggcacgtggtgctcaacgaggccgaagcgggtttcagcatcgaattcagcgaattcaggcgagagcttcagagcggacttcggaaccgggccgagaccgcgccactcgaacgagtcgcggagcgagaagacgcgggccatcagatcgatagcgcggcggttgccttccggcaccacggcgcgggtgaattcattttccacctcatgacggccttcgttcacctgcttcaccagcatgagaatcgtcatcagcatgtcgagcggctcaaaaccgcagatcacgacaggcatcttccacttctccgcgaactgcgcgtaaggctcagagccgatcacgacagaaacgtgagccggaccgacaagaccgtcgagcaccggggcgtccgcgcgcttcggagcggtgagaagaatgtgttccatcgcggaaggcgtgagcacgtggcagcagatcacggagaaattcttgatctgttccttcttcgcttccagcaggcagagcgccgtcgggggcgttgtcgtttcaaagccgatcgcgaagaacaccacctggcggtccggattgtcgcgggcgatctgcagcgcgtccatcggcgaatagaccatacggacgtccgcgccttcagccttcgccttgaaaagagacttgccgccggaggccggaacgcggagcgtatccgcgtacgtgcagaggatggcgttatgcttcagcgcgcattccatcgccatatcgatacggccgatcggcagcacgcagaccgggcagcccggtccgtgaatcatatggacgttcttcggcaggatgtccgtgagaccccagcgggcgagcacatgcgtgtgaccgccgcagaattccatgaaacggtactcacggttcggatccaccgtggcggcgagctccgccgcaatacccttggcctgttcggaatcgcggtattcagtgacgaacttcatgctgcggctcccgctgcggcagccgcacgggcgccggactgggcaacttcagcaagaaccttaagcgtggcctcggcctgcgcctcatcgatcttctgaagcgcgaaacccacgtggatcacgacccagtcgccgggctgaggatcctcgatgagactgatgttgatgttcttctgaatgccgccgaggtcagcgatggcctcatcggcgctcagaatcttttcgagttttccaggaactgccaagcacatatcaatggtccttaagtaaaaaaatcgtttacggagagacacggtctccgccgtccagagcgccttcacggcgcgcgagagcggcgagccacgcctgaccgagcgcgacgcctccatcgccaggaggtacagccgaggagaggagcggatggatcccagcgcggccgaggaggctgatgagccggacggtcatccggcggttcaagaagcagccgccggcaagacagagcggcagatccgcttcatccggtccggtgagctgcagaatccagtcagaaagcgcgcgggcgacagcctcgtggaaatccgcggatgcctgggaaacagcatccggatcatgcggggtgtcagcgagcatcgccatcaggggaagaagggaaagcgagccgtcaggcaggatttcccagagttttctgagttcacgcggcgtcttcccctcagccgcggattcgagccgcatggcggctgtcgcttcatcatgctgcgtgaggcagagtccgagaagcgcggacgccgcgtcaaaccaccggcccatggcggtggtgacaccggagagcctggggttggcaatgaccttccggatcatgcctgagttcggtatttcacggaaccggtcagcgatttcgtctccccgtccaagagcttcgagaacagaggaggccatgcgccagggttcacgcgccgcgcggtcgccgccaggaagcgggagcgcgagcagatgcgcttcgcgggtgaagcccgtgggcgtgagatgaagcatttcaccgccccaggccttgccgtcggtgccgagacccacgccgtcaagcgcgatgccgcgggcgggtcccgtaatgccgtattccgccatcacggcgccgatatgggcccggtgatgctgcacggcgtaggcagggatcccgcgctcaagctcaatccggtgagccagacgcgtggagaagaagtccgggtgcaggtcatgcgccaccagttcgggcgtgatttcaagcaccgcttcgagatgcttcaccgcgagctcgagcgcctcacaggaactcgcgttcccgaggtcaccgatatgctgcgagaggaaagcttcgctgccgcgggtcaggcaggcagtgactttaagtcccggaccggtcgcgagaaccgaaggagagtcaaaggcaagcggcaccgcttccggcgtatagccgcgggcgcgccgcaccatgcggggtttatccgccaccacccggacaaccgagtcatcgcagcggacgagaatctcgcggttattcgcgagaatgaaatccgcaatgccgccgaggcgctgcagcgcttcatcgtttccgatcacaagcggctctccgcccggattcgcgctcgtcatcacgagtgtccaggggagcacgcggctgtcaagccactcaacgccatccggccgtccggcagcctcgtggaagaggagcagatgcacgggggtataggggagcatcacgccgagttcggtgagtcccggggctacgccctcgagttcagcgtcgcagagcggtgtctttttggcgagaacaatcggtcgcgcgatggattcaagggtttcacgctcgaggtctgaaagcgtgacaagccgcgaggcggacgccgtattggcgcacatcacggcaagcggtttttcgtcgcggcgcttccgggcgcggagcaggtgaaccgcctcggcgtttgccgcgtcgcacacgaggtggaagccgccgagtcccttcaccgcgaggatccggccttccttcaggagcttgacagcatcgcggataggatcatccgtttcgacggtttcgcccgtatttttccagagcatgagcttcggaccgcagacagggcaggcgttcggctgagcgtggaaacgccggtcgagcggatcacggtactccttcagacactcggggcacattttgaaaggcgccatcgaggtctgagggcggtcgtaaggcagatgccgggtgatggtgaagcggggaccgcagtgcgtgcagttggtgaacgcgtaacggtagcgacggttgccgggcgtgaacatatcgcgcgcgcattcgcggcaggtcgccgcgtcaggcgtgatcgcggtggtgacgtgccccgcttcgctctcatgaatggtgaaggacggatcgcccttcaggggaattccgcggctcagaaccgtatcgattctggcgagcggcggtttggcggcacggagtgccgcttcaaaccccagtacagcttctctctccccctcaatttcgatcccgacaccggccgcgtcattaaagacgaagccggtcagatggcgttcaagcgcgacccggtaaacggtgggccggaaaccgaccccctgtacaagaccggttacgcggacaagctgtcggattatctgcggtgcttctggcatgagaaatcgacctgatagaggagagaaaagctgatgtcgtcaatcagagagtggcgagcgtgagctcagtctcgagccacttcatccacttatccatgccgtcacccttcgtggcggaaacgcggagacagcggatcttcgggttaacgcggcgggcatactcttcgcacttatcgatatcgaagttcacgtagggcagcagatccaccttgttgatcagcatcaggtcagcggcctggaacatatccgggtacttgaggggcttgtcagcgccttcagtcaccgaaatcacgaccaccttgtgggcttcgccgaggtcgaactcagccgggcagacgaggttgccgacgttttcaatcagaacggcgctgccgtccttcggttccaggtgatgaagcgcctcgtgcaccatggcggcgtcgaggtggcagcccttgcccgtgttgatctgaatggacttcgcgccggccgagcggatgcggtcagcgtcgttcgccgtttcctgatcgccttcgatcacggtgatcgggagcttctcgggatcagcgcggcggatcgtttcggagagcagctcagtctttccggatccggggctcgaaacgaagttcagagcgaggatgtgatgctctgcaaagaaggcgcggttcccggctgcaacagcgttgttgcgggaaaggatgtcttcttcaacggagatcgtggactcgtgggagtggtcgtgctcatgagtatgggcatgttcatgatcgtgcgtgtgggcatgatcatggtcgtgatcgtgatgatgatcgtgctcgtgttctccagcgtgaatcgtcacgttgccgttttcatccgtatgggaatgcatatgggaatgatcaccaccgcagccgcaggttgcacacatagcgtttgactccttaagttttagaaatccagtttatttctatttgtaaatgaaagtgaggctatcaggaatcggtcttatccgaatcttcgggggttgtcgccttgatatccacgacccgcatgtcgcgtcccccggaaaccactacctgatagccgccgcagatcgggcaggcgtctccgaaccggtgatacgggacatctttctggcaggtcatgcaccaggcgcgtccctccggccggtcaatcacgagctttgcgtcattcgcgaccgtgccttttttcactgattcaaaggcgaaggcaagggcctcgatctcaacattcgaaagttcgccgaccgcaacgcgcacttcagagaccgctgtggcgtgggcgccttccgcggcgcgttcgactacgtcaatcacgccctcagcgagtgagacttcatgcattggcagactccgtttcaattctgaaggggacgcaggcgtcgaactgccggacaaccagctccgcgcgggtgcgccatgaatcccagttggtaacaccaaggcgggaaagcgcctgttcggcggctccgcccggagcgaagttccattcggtcggagcgacgatcgttgattcgatcatctttccgttttcaatcctcagtcgatgaatcagggtgcctcgggcggtttcaacaaaaccgataccgaccccgggttcagggctgaatccggaaacaagtttctccggttcttcaaacgactgcatccaggagccaagctcgagaagccgcgcgtagaagtaaaggaacgtacccgcgccgttcgcgaggtattccggcatcagggcaggcgactcaaagcggcggccaagagccgaagtctgagctgatccaagcgtgagggacggtgccgtgcagaaaccttcctgcgtcagatgagccgcaagatccttcctcacggcggtgcttgcggtgctgagcgccggaacgctgcttcggccgagctcgcggggaaggctgagcagataggagaagaccgggcggagaactgtattccttgagtcgatccaggcttccatctggtcagtcggacgccagctgccgagtgtcggaacatcttctgtctgatagagcagttcgtccgcgcagtcagcgacatccttccgcagagcctccagttctttcttggaaagacgggaaacaccggttacgcgggtgcggagacggccgatcagtttcgcgtcactccgggactcgatatcgagagagcgcggcagctcaaacgcgaggcagcgcaggtgctcaatcatggcttcgagctgaacgccggcggcccagttttcaagctcctttgctgaaggtgttccctcagcataggcccgggcagctctccacgcggtcgactgagcaaccgggcagagggtgtaaagcatggagatgaggctcgggatcgactcgtcagcctgacggccttccagcagcttcgacaccatcgggccgcgggtgctccgtgtccttgcactgacaggaacgccgtccttggtgtcgactgttacgatgatggctccgaaatcaggcagcgcacccttcatagtttctccttgccggaagcagcctcggcacgatccttggctgcatcaactgtcttcgtgaagatctcacggcgggacatcggggtcttcgtgtcaatcagaggggcctgaggttcaggatccggagccttcgccggcgtgagaggaattgctccctcatccgggtccggctctttgtagccctctttcggcggattcagcatcgtgtcgagcgaaatccgggcgacagcttcacctgtggcctgatcaccgatttcccaggttggggagaggagcgagcagctctggtagccgccaaggtcaggatcaagcacacccatgaagctgaagtcaccgccggggagctcaacactaccgatctttgtttccggaatgactttccaggtggcggggtcaccgcacgcgcggatcacaagaatcgaccacggcgtgacaatgccgcctacccactgcccatcgaccttacggaacgggacagaagaaacgtgcagcttcggattcagaatcggaacccctttcatgcgggtgtttgagatacgctcgaatccagcccggaagaaagcctccggactgtcgcggaagacacgggttttgattttcggcaaagccttcttctgaggcgattcgcttgtcatcctaaacctcctcatcatcgtcaagaacgatgaacgaatggtgaggacagccgcaggcggggcagtcgtaattgtccgggatctcagcaaagggagttccgggaggcacctgccactccgcgcagccttccgcaggatcgtaaacgaaaccgcacaccttgcactgcatgcgggtctcaggcttgatacggctcgcttcaagtgtcttgagaacgctcagcgggtcattcgtcatcattccggacatgattctctcctcaattcaaacggataggattacagcgcgccgcgggacagatcgagttcaacccactcgatgagatcgtccatcttcttgatggcgcccgggaggtcttccgcggtgctcggaatttcaggaggaagcggcgttgcttcaacctgatcgagcagttcctttccggccttgttcagaatgcggctgcgccacaggccgcggactgaagtctgacggatcgtgctcttcgcgaagccctgcatctgaacttcgatcgtgccttcgcccagaaccttgttgatgtagtccttgtcattgggggaaagaggctggcgggtcagttcaacagccaccgggaccatcgtcggatcaaaatggtcgaagtcaacatccttcgcggcggcattcagttcggaaatgatggcgggagcagcgaaaagaccgtccggtttttctgccggttcttcgatcttatccttcatgtcgcgggcggcgtaagtgagaacgacgtcagggatgtaagcaacgacgagcagatcctgctggccgatcagcatgcgccagatggtcgggacattcgtctcctccatacggatctgacctccgcccatcgtgatgcggatttcacccttggagagcgtgtcgaagaggaacttcttgaagggaccgtccttctgacccagatccgtcactgagtgaagccggccgccttccttctgggttttgaccagcagatcgcgggtctcgcggagccagttgagggtttcgcgggcagcagcgagtctttcctcagaggtggattccttcttggcctcgcgggcagcggcgaggatgctatcagcagaaataggagctgtcatagtgtgtgtctgtcagtagattaatgaaaagggttcgtcagttagcctggatcgaaatcgtgcggcgggcaggtgccgtacggccgccgatttcagcaagaccgctgatgtattcgttccagttcttaagtccctggagaccgccgagccattcaccgtcacggtagaaaccgactgccgggaggcgggtcaggccgagacggcttgcgatggcgcggcccacggcagggtcagtgaagccctttgcggcaatgtgatcctggaacaccttagcaacttcaggagcgattactgccatgtcaatcgtctccttgaaagtggtcgggttatcagcgaagaaaatcagaacgagtcccttggcggacttgaattcttcaaggttttcctcattcacgcggacgaagccttcttttccccaaagccggttgaagatcggatgatcgtcaacgttgacgatggtaatctcgcgggtcgggtcattcagttttgacggcattgtctcttttcctttgtttttctgaattactgcttgttaaccttaacctgagccttcaggaagtcgggaagttcgcccgtatgcgccgtgatatcggcaaaggcgtcatcaagctggctctgtgtggcggtgccgctcattacgtcagaaagagcgacgagggcggtacgcattttgagcgcctcatcctctgtcatacggcgctgggaagcgccctggaataccagaagccactcgccgggggtggccagtcccgtgagctctgtattgacggtttcagttttttcgcctgagtcacagaccgcagagaagttatcggaaaccgaaacgaccttcatcggaatcgcaatacacatggttttcactccttttcagagatcgggtttccattctgatctcttttcacgaagtaccggaggtctgcataacggcaggcttcttcttccgacggacgtccttcttcataaggcttacgctcaagacaggtctcggcaagcgcctcggctttttctcccgggttacggggctcgatcttgaatccccattccttgagctgcttcgcggcttcttccaccatgccggggacggcagcgctcacctcgggggtaagagaaccgccgtaatcctcgaggtcacctggctggcagccgagcacgacgatttcatcagggtagcggccaagaagcttcgcgacagcgaagaggtcattcagaccttcctggtgggcgctcatcttggtgttcagccacgggttgatatcttcttttctcaggaccttgcaggtgccggggagatcgttgaattcgcaggcatcgaaaataatgatcttcgagcagttctcaatgtactcggagagataaaaaccaagcgtaccgccgtccagcaccagaacatcttcaggacacttccaggcttcgttgaacgcttctaccgcgcggacgccgaatccctcatctgcccacaggatattgccgatgcccagaacaactacggggtattttttattgctgtctgacatgtgtctaaccactccctgatggaacacgaatattagccatcacaaatgtgcgggagtgaggttagcaaaaaaaaaagaccggaaccaccaccaaggggtggaagttccggtctatatccctattcctacgtactaccccctatccaaagggatagtacgaaaggatgtgaggattacttcgcatgcttgaacatgcggaggccattcgtgatggcggacatttccgtcgcgccgcccatgatgtcctcgcgggcagccatgtagaaatgggccaccatgaagagcgtgaagacatacatcagagcgtgatggaacgtgcggactgcctgagcgttatcgccgaagagagcgaacacccagccggtcatgatatcccagccagagccggcgccgtaaggctgtccatagagtgcaaggcccgtgatgatgatgcagaaggagccgagcacgaagaagccgaacatggcggtagcagcgagcgggttatgcgccgcgtactccggagacgtcttcttgatgaacagatagtacagagcctgatcccagatgcctttcaggaacttaaaggaccagaaaggcggcaggaagatctgatgagcgtaacggttgcccatgaacgcccagaaaatacggtagacaaacagaccagtgaagcagatgcccgcgatgaagtgaatcatacggatatcagcgaactggaacgtcgcccaggtatttcccagattggcatccagaggacgcccgatcaggtaaccggtgacgatcatcgtaaacatcgtgacgaccatgagccagtgccagacacgtaccggagcttcccagacgtaaatcggacgcttatcgccatcactcaagtctacttcgtaagtaaccttatcaattttcatgaggttcctccttactcggattcgaccttcgtaatttctttgccctcagggtcgaaaagatgagaagcgcaggcgaggcatgggtcgaaggagtggatcgtacgaaggatctcgagcggcttcttcggatcgatgatcggagtgccgagcagagaggcttcgaacgcgccgtgctgaccattggcgtcacgcgggcaagcgttccaggtggtcggaaccacagcctgccagttggcgatcttgccgtccttaatgacgcaccagtggctcagagcgccacgcggagcttcgcagaggccgacacccttgcattccttcggccaggtcgacggatcccacttctccatgttggcagccacttcatcgccgcccttaatgttagcggtgaggtcgtcaacgtacttcaccatcaggtcagcagccacgaccgcgtcgatagcgcgggcagccgtacggccgagggtggagaacacggcttcgagcggaaggttcatttccttcagcagagcgtcaaccggctccttgtagacttccttgccgagagcgtagccgatcacgacacgggcgagcgggccgacttccatcgtgtgacccttccacttcggggtcttgatccaggagtacttgccgtcaccgccgagccagctgaacttggtcttcgtgccgacagagcccttcgggagttcgaagtgcggaacggtctcaccgtcaaacggatagaggccgacgtccttctgatcgcccttgtcataggtgaaccaggagtgatcaacgaattcctgaatttccttcggatcgttcgggttgaccggatggacttccttcaggttaccgtcgacgatggcgccgcccggcatcacgaggttgtcattgctccagtcgttcggacggacagggaattcgccgaaggagagcaggttcttggagctgatgccgccgccatacttgaaccactcggggtagaaggaagcgatggccttgacgtccggcacgtagacattcttcacgaagtcgacggtgtacttggcgatatcgcgcatgtagttcatcgtcacttcattgatcatgtcgccggctgcgccggtgccattcatgttgatcgggcagggaacgccgccgaccaggtagttcgggtgcgggttcttgccgccgagaatcgtgtggatcttaacgatttcgcgctggaagtcgagagcttccaggtagtgagccgtcgcgagcaggttaaccgcgggcggcagcttcatggcggggtgaccccagtagccgttcttgaagatggacagctggccgccggcaacggaggccttcagctggcgctgaatgtcggcgaagtagccggcgccgttcagttcatgcgtcggggagatcttcgcttcgatagcagcggcttcgcgcggatccgcattcagagcgctgataacgtcaacccagtccagagcgtggagctgatagaagtgggtcacgtggtcctgaacgaacagcacagcgttcatcaggttacggatgatgttggcgttggccgggatcttgatgccgatagcaccttccacagcgcggacagccgccagagcgtggatgccggtgcagacgccgcagatacgttccgtgaaggcccaggcgtcgcggggatcgcggcccttcagaatcacttcaatgccgcgccacatcgtgccggtggaccaggcgtcggcaatcttgccgtcagcgcccagaacggcctgcatgcgcatatgaccctcaattctggtcagcgggtcaacgacgatacgggtttcactcatgacgatcctctccgatatgcttgttattggtcttcgagcgtgcctggacaacagcgctggccgcgatatgggcggcagcggcgacgccgacaacggccatcacaccaaggccgaccttgtcaacggtcgcttcaacaccaccccagcccggaggcagaacggtggtttcgtgatcatagaaggagcccttgtcgaagaagtcggcttcggcgcagccaatgcagccgtggccagactgaaccggccaggacaggccttcgttccagcggatggtggagcagggggagtacgtgaccgggcccttgcagccaaccttgtacaggcagtagccgagcttcgcgccttcgtcatcgaagtgctcgacgaactgaccggcgtcgaagtgaccgcggcgatagcacttgtcgtgaatacgctggccatagaacatcttcggacggccctgacggtcgagcgggggcagacggtcataggtgaggatgtaggtgagaacgccagtcatcacttcggcgatcggggggcagcccgggaccataacgatcggcttgtccttgatcacttcgttgatcggcacagcgtgggtcgggttcggcttggcagcctggacgcagccccaggaggcgcaggagccccagctgatcacagccttggcgccagcagcaacgtgctggatcttgttcttgaagatttcaccgccagggatgcagaacgtgccgtcgccggcgagaggcacattgccttcgaccgcgaggatgtactgacccttgtacttcgtaatggtgtcttcgagagccgcttcagcctgttcaccggcagctgccatgatggtgtcgtcgtagtcgagcgaaaccatggagaggacgatgtccttggcgatcgggtgataagaacggatgaaggattcggtgcagcaggtgcactcaagaccgtgaagccagaccaccggaacgcggggtttggtctgcatcgcggtagcgatatccttggcgccggcgctgccgaggccgaggctggcagcggtgagggagcagaactgcaggaagctcctgcggcttacaccctgacggcgaagggcctcgtattgtgtttcagccatagctatctcctatagaagctttgcggtttccagatgaagcagaggaagccgtttagccactttatttgacgtttgttattggtaaaactgtgactaacggaaaaaatcctgcctcagttttttgcttcaccgtaaatttaagaagtgcgggccgaattgggaatacttttttaaaaacgcattaggtttaaggctaaacccttgtgtaaatatttacagtatcttgcagtttatgaaaatatatccctatataggtaataatttgatctgtgtcagccatattcggttacaagtcgaattattttgcggatagcgaaaaattagggattagtcggtagtaagggtatgtacctaccagaaaaagagcagacctaaagacccaatgcgaaggatgcgggaaggaacgaatccttaagcaaggcttaagcgcagattcctagactcccgatagcgttttttgaggaggggagaattgcgcccgaaaaaagcccccctctcttatagccggtgacagccggcagacgccaggctctatttatttactgacttaatcatttctgccttccagccatgaatcaggattctgaccatcagaaggccccggcagcttcgctgagggctgagggaatcacctgcgtgagaggcgaacggtgcctctatgaaggactctgctttgaggcagagcccggtgccgtactgcgccttgccggtccgaacggcgcgggaaaaaccacactgatgcggattgtggcagggcttcttacgccgaccgagggaaaaattttctggggcggacgggataccaaagagttagggggagatttccgggcagacctcctctatataggacaccttaacggagtcaaggaagagctcacgtgtctcgagaatctccgcaccaacgcgacgcttttcggccgcgaagcttcccgtgaagcatgccttgcagcgctgaagcaggttggtctccggggatttgaggaagagcccgtccggttcctctcccaggggcagcaccgccgcgcgtcactctcccgcctttatctctcggaagacattccgctctggattcttgatgaaccgttcacggcgcttgatgtgaagggcgttgcttcgctttgccgtctgattgagcggcatgcggcttcaggcggcatcaccctgatgacaacgcatcaggaatcgggactcagcacgccggggtaccgcaagcttgatgtttcagacttttctcccgcccgccggaaggcccgcacgaatccggaggtgacccatgcttaagcttttccgcgtgatgatccgccgggatctgcttctcgcgtaccggcagaagtccgatgtcctgcagaccgtgttcttcttcctggtggtgattacgctcgtgccgctgggtgtcggagctgagacggaactccttcgcagcatggctccgggtattgtctgggtggctgcgcttctcgcggccctcctctcgctgccgcgcctcttcgcgcacgactttgcggacggcacgcttgagcagatggtcctctctcctgatccgctccccgtgatcgttcttgcgaaggcattcgcgcactggctgacgaccggcgtgccgatcaccgttttcgcgtcgcttgccgccgtgatgtttgacctgaaggcggaagtggccgcggtcctggttttctcgcttctcattggcactccggtgctttcgcttctgggaagtgtcggcgcggcactcacgcttgggctccggtcgggcggcgtgcttacgtcacttcttgttctgccgctttatattccggtgctcatcttcggggccggcgcggcaggagctgtagcggttgcggtatcccccgcggcttatctactgattaccggggcgctttcgcttttcgctctcgcgattgccccctgggccagcgcggcagctttgagaattgcgctcgaataacagcccgggatgatgcggcggttctccgctcttttatctcgggaaaaataaaaaaagcatctgtctatatatagagagacttcagtctggaacagcagctatgagttttccaaatttttcggatccacagcggttttatgaaacctcgcggccgatcgtgatcggctgctacatcgtggcctttgttcttgccgtgatcggtatctacatgggcttctttgtaacgccgattgattaccggcagggcaattcctaccgcatcatcttcattcacatcccgtgcgcctggatgagcctcttcacgtacctcatgatggccttctatacgatctgggcgcttgtcacaaagtcgaagatggctccggtgttcgcggttgcgatggcgcctacgggcgcgatcatgggctttatcgcccttttcacgggatccatgtggggccgtcccacctggggtacctattgggtgtgggacgcgcggctcaccagcatgctgattcttttcttcctttatctcggctacatcgcccttcatacggcgtttgatgactggagaaaggcagatcgtgccgccgccgtgatcgcgattgtcggcgcgctcaacgttccgatcatttatttttccgtccgctggtggaacaccctgcatcagggcgcgtccattacgacgcacggcacctcgatggaaaccacgatgttctacaccgtgctcaccatggtggccgcgatgtggatctactgcacgggggcgatcgtgcgtcgcgcaaggacggtggtccttgaacgctatcgccgcgaaccctgggctcgcgcagctgctgccaaggaggcttgattatgcattgggaaagcgtatcggcattcttcgccatgggcgggcacggcttctgggtctggatggcctggggtatggcgctcgccgctgtgatttttgaaaacattttccagtcagtccgccgcaaggcggcgcttgacgccatccggcgcattgaacgcgctgaaaagcaatccgagcaggtatcggacgaggagtagaaacatggccagaaacgtatccagaaaaaaggttctgattcttggaggtatcgcttttgcggtcattgtgggcgcgggcgcgctcatctactcggctatgtccgagaacgtggtgttcttctattcaccgactcaggttgccgcgggcgaagcgccgcatgaccacacgttccgtgtgggcggcatggtgaagaagggtaccgtggcaacgtcggatgacggcgtcacaacgagcttcacggtgacagatgacaacaaggacgtgcagtgcatctataagggcgcgcttcctgacctgttcgccgagaacaccggcgttgtggctcagggcaagctgaacgcttcgggtacgtttgttgccactgaagtgctcgcgaagcatgacgaaaagtacatgccgccggaagccgccaaggcgatggaagacgcgaagaaagccaaggccgccaagcagggtgcgtcgatctgacggcgcgggaccggcaaagattcaattcagcaatacaggcaataaggaaacggagaaagtctcgtgataccagaactcggacacttcgctctcatgctgtcgctcgtcatctgcctcgtgcagggcgtgctgccgcttgcgggcacatttttgaaaatcaggagctgggtcgaccttgcgcgccccgcggccgtagcgaacgcgctcttcctcacaatcgcgttcggaatcctcgcgtggtgcttcctcacgagtgactttacggtgctgaatgtggcgaataactccaattcgctgctcccgtggtactacaagctcgccgcgacatggggatcgcatgaaggctccatcctcttctgggtggtgtgcctcagctggtggacctgcgcggttgccttctcggcccgctcgattcctgagattacccaggcccgcgtgatttcggtcctcggcctcgtctcagtcggcttcctcctcttcatcctgatgacgtcggatccgtttgcccgcctcttcccgccggctccggaaggcgccgacctgaatccgcttctgcaggatccgggcatggtgttccatccgccgcttctctatctcggctatgtaggcttctcggttccgttcgcgttcgcgatcgcggcgctcctcggcgggcgtctcgatatcgcatggtcccgctggatgcgtccgtggaccacggcggcctgggttcttctcacgctcggcatcgcgcttggctctttctggtcgtactacgaactcggctggggcggctggtgggcctgggacccggtggaaaattcctcgttccttccgtggctgaccggtacggcgctcttccactcgctcgcggtgactgagaagcgcggctgcttcaagatctggaccgtgttcctcgcgattctcaccttctcgctttcgctgctcggcacattcctcgtccgctcgggcgttctcacttcggtgcacgctttcgcggccgatccgtcccgcggcctcttcatcctgatcttcctctgcatcgtgatcggtctctcgttcgcgctctttgcctggaaggcgcctgaagtggcttccggcggaagcttcgcgatcgtgtcccgcgaatcgatgctgctcgtgaacaacatcttcctcgtggtggcgatgagcgcggtgctgctcggtacgctttacccgctgatccttgacgcgctcggtctcggcaagatctcggtcggcgctccgtatttcgacgcggttttcgcgccgcttatgctccccgtgatcttcctcatggcgatcggaccgctcgtgcgctggaaggaagcggagcttggcagcctcgtgcgccagatggctccgtccttcatcgtgtctctgatcgctgctgtcgcgattcccttcgcgatgggtgaattcaagatctggccggccgtcggtttcttccttgccttctgggtgctctgctcgatcattcatgagatccgcgtgggttcccgcaacgcgaagacggtttcttccggtttcctccgccacggccgcagctggtggggcatgcagctcgcccacctcggtatcggcgtcacggtgttcggcatcgcgatggtgatgggctacgaagctgagcgtgatgtccgcatggtgccgggcgacgtggttacggtccgctcgaccaccttcaagttcaatggcgttacggaatcgcgcggaccgaactatctctcgaagaagggtgacgtcacgctgatcgaaggcggacgcgaaatcggccatctctaccccgagaagcgtgactacttctcgagccgcggcatgccgatgacggaagcctcgatcctgcatcgcgtgacgggcgacgtttatgtctccctcggcaatccgacggctgacggcggctgggttgtccgagcgtattcgaagccctttgtgctctttatctggggcggcacgctgctcatggcggtcggcggtctcctcgcgattacggaccgccgctaccggaagaaggccgcgaagcctgaggtcggtgctgcgggagcgaactgattatgaaaaagctgaagtatcttctgccgcttgcgctctttatcgtgctggcggggttcctcgtgaagggactttatctggatccgcatgaggtgccttcgcccctcatcgggaaacctgcgccggcgttccagctgcaggacctgaatcatcttgaccgcacggtctcgagtgatgagctgaaggggaaggtctggctcctgaatgtctgggcttcctggtgcgaaagctgccgggaagagcatccgtacatcatgcagcttgtccgcagcggtgaactgaagaatacggtggtgggtctccagtacaaggataaggtggctcccggacttgctttccttacgcagtacggcaacccctacaccctggtgcttcgggatccggaaggtcagaccggcatcaatttcggtgtctacggtgtccctgagaccttcatcattgataagaagggcatcatccgtcacaaggtgatcggaccgatgatgcagaaggaatggacgaacgacgtgaagccgctcctcgcgaaactggaggctgagtaatgaatcgatttttgaccgtactgtttgcttttgggacggccgtgatctcagcgtcagccctggcagcgcccgaggcgtctgcagaggcggttcagccttccgcggccgctgctgcggtggcttccgctcccgcctcggccccggccgcttcggcagccgccccccgcatggaagctcatgaggcagcctccgacgaattcgatccggtaaagaacaagcgtcttctcgccatcgctgaaaagctccgctgcctcgtctgccagaaccagaccatcgcggaatcgaacgcggatctcgcgatcgatctgcgccgccaggtgcgggagcagattgccgaaggccggactgatgacgaaatcatcagctacatgacggaccgctatggtgacttcgttctttataagccgcctttcaaggcatcgactgtcattctctgggttggcccgatagcgcttctcgtgatcgtgcttgcctggtacttcgtgaccgtgcgccgccgcagaaagcagcctgagggagagggaagaccgctcacgcaggcagagcgcgaggaggcagagcgtctgctcggcatccgtccggatgatgaagattccccgaaggagagccgcaaatgatgatggcattttttgttctgatcgccgtgattttctgcgcggtcgctgtagcgatcctcgggttcggcctgcgttccaagcgggtttcgggccgggctgaaagcgaactcgtgcagacaaacgtcgaggccctgaaggcaagctacgcggacctgaaggccgggcacgacgcgggaaagatttcagatgatgagtttgaggaaacccgcgcagagcttgaacgccgtgtgcttgacgaaagccgcgccacggagtcgctcgacaaatccgataagcgtgagcgtcttacgacgctcgcctttatcgcggtcttcattccgatcgcggctgcggtgatctactggcgcttcggcacctgggacgccatgaatccggcaatcgccggcatgcaggcccagaatgagtcgggcggtcactcgatggctcagctggatgaacagctcgcgaaacttgagaagagcctgcaggaaaatccgaagaacgtgaatggctggatgctgcttgcccgtaccaacgacgctctgaagcgctttgataaggcggctgccgcctatgagaagctttccgtgctggttgacggcgaaacgaaggctgaggttctggccgattgggctgactgcctcgcggcgaagaacggctcgcttgacggaaagcctgaggagctggttgatcaggctctgaagatttccccgaagctctggaaggcgctcgcgctgaagggcaccgcctactacaaccggaaccagttcaaggaggccgcggccacctgggaaaaggttctggcggatcagaagccggggtctgaggactatcagagtgttctcaacatggtgaatgacgcccggacgaaggccggcatgaagccgctggcggggccgagttccgttacccgtgtggaaccgagcccggtgtccgaagcggccggaagccagcgcgtggtgtcggtctccggcaccgtgagccttgcggctgacctgaaggccggcctctcggggaacgaaaccgttttcatcttcgcgcgccccgtcgaaggcagccgcatgccggttgctgtgacccaggtgaaggtgtcggatctccccgcgaagttcactctcgactccaacatgcggcttccgggcggcatgggaggcatggaatccctgaagcaggtggtggtcggcgctcgcgtgtcgaaaaccggaaacctgatgccgcagcccggtgacctcgagggcgacacgcccgcggtcgcggtcggcagttccaacctcgtcgtgaagatcacgaagaaactcgcgcagtaacttcagaagtttcttctgattctctataccgattcccggcgcagtgatgtgccgggaatttttttgagtgagaagaccgggttcaggctgcctttctccgccgttccgctaaactttactcattcggctttccgacagtttttgataaaaaggcggcgcagtcatgtcagcagcagatactgaaaagaagatttcccggacctatgtcatccccggaaagggaaagcggatcggggagggcgcgcccggcattctcgtttcggcgacaggacgcacgcctgaggcgatccttgaagcggtgaagcggctggcagctgatcccgcggttgatggaattgagctgaggctggatcacctcgattccggccggaacagcgatcagattcttgaaatcacggggcttgtgaatcaggcttacgccgcggctcgcgataaaattctcattgccacagtgagaaccggtaaggaaggcggtgaagcgagctatacggcagctgagtatctgcggcttctcgggagtctgatccggtactcccggatggatctgattgatctggaggtgtcgcgcggcgaagagctcctcgccccccttgttgaagccgcgcatgcggctggaatcggcgtgatcatgagcagccataatttctctgaaacgccggattcggagaaactccgcgagactctggaactcgagcggaagctgggaggggacatcctgaagcttgccgtgatgccccggaaggcgtccgacgtggcaagactcctgctcgtgacagcggaagcccgtgaagcggggcttggcccgcttgtcacgatggcgatggggccgctgggctcgatctcccgggtttcgggtggtatcttcggctcggcgctcaccttcgcgatgtccggcacggcatccgcccccggccagatggcggtagaggatgtgaaacgatccctcggtctcttttccgtctgacagaaaccggtgaacgataaaaaagctgcagtctccattcagagatgcagcttttttcatggaaggcggagattcagaactccgttttcctgattacttcgcgcacttattggtggcaagaagatccgcgagcttcgtatccgtcgaggtcttattcgcgcggaccatatccgccgggctctggc

SEQ ID NO: 1306 - DNA, 1833 bp, Unknown
  gut microbiota DNA sequence
cacaaaaaattacacaccctcggctgctttgctggaacacctttccggcctccctcttcatatataagaagagctctgcggcctcttctactctctcctcctgctcagctcatcagaggattcggcctgagatgcaggttcacccggtttgatcaaaggccgcgccccgtcaatccctgctccccctctcacacgctctctatataagttctattagctcctgatagttcctatcaaaaactatgagagcttatggagctgctatcagtttttatagatcctctaataaagaaagagacaacgaaaaagccccggaccggcaataccggaatccagggctattaatcgcgaagcgatccgctgtacgtcagaggcggtcgcgatacgggagcgtcaggaattcaaagccggaaccaaactttctcacgcgtccgattcccgggaacgggagatgaccgcccgcgaggagatgcgttgattccgcgagttccgtgaagagatcgatacgttcggccgcggcgcgcttcgggtccatgtcgtagcgagcggaaatcgtgggaaccgcgaactgaaccgcggccacgtgagcaacgtcaccggcgaatacgatctcaccctgctccgtatcgagcacgaagaacgcgtgccccggggtgtgtcccggatggaattcagcggagaagtcaccgaaaagcgtttcagccttatcgatcagcttcagatgaccggcttcctcgtacggggcgaagaactcagccgtagctttccgggtttcctcaggaacgctctcacccgtaaaaaactcatagtccgtcttcgggacccagacctttgctttcgggaaagcggcctctccgttatgcgtgagacctgaaatgtgatccgggtggcagtgagtgatcaggacgtccgtgatcgtagtgggcttcacttctgagaaaagccgcgtaagtgcgagaccctttccgattccgtaccccgtatcaatcacaaccgaacggcggccgctcttgatatggaagacgttgacgtaatgctcgagcgtatccggggtctggcagctctgacggaccagctcctcgatacgttctttagacgtgagagaaagccctggatcctgagcacgcgtgccgtcagaaattgaggtaacagtcacattaccgaactcgtaatgcctgataccttccatgtcctttttatccatagtcgtactttccttcgattccgctccgaacggcagactgatagccgcaccggcagccgcggcggctgacagcagcacacggcgtgaaaaggcaggctggctcataacacgctcacttcagagtctctgatacggtgatattagaccggagagtgggaaccgtgaaaccttgcctgaaaaaagagtcctcacagtactctggtcgtcttcggatgaattatcagcttctattatttgctattaatttctgatagtttttgataggaaatattaggttctatcagaagctatcaaaaaatatcgaataaacgatgaatgaaaaaaagctgtcatgaaccggccctgaatccacccggcatcagcagtcatttctgtcacggttccgccatcaggcgctttacagtactgacggaaaacctattagcttctaataggaactgataggaacgcatagtttctatgaaaaaactatcagaaggtcttattaaagctctgacgccaggtcagaccggggaacagcagaggattcagagaaggcagaaaaactttccccgcgatcagatcccaagaaaaaacgatcagatccctggaggaggtatctgatcgtcttcatactgctttattagatc

SEQ ID NO: 1307 - DNA, 19156 bp, Unknown
  gut microbiota DNA sequence
gttaggaaatcttatggtcacaccaatagtagttatgccacagacttaatctgtggctagatggtaatttcctttacaccgcggctgctccctgcatccgcggtctttttgttaggacagggtttccgtatacaggaaagtccgtctcatcggttctctgtcactcagctacactcataagaatcacactcattcaggtttcttggaggctttgagatgacgaaacgcgttttgaccgcggctgcggttctcgcactttcgcttgggatgacctctgccgcctttgcggccgaacccgcggaagggaattccacctcgatcgcgaacgaaacgacggcggctccttcgaagtccacgtcgatcggtcaggacatcaaggaaggggcgacggacgtcggccatatggcaaaagacgccgcgacggaaacgggtcacttcttccgtgacgcggcgaaggacaccggacacttcttccgcgacgccgcgaaaggcaccggtcacgccgtgaagaagggcgctgagaaggtgggaggcgcggcctcgaccgtcgggcacggaatcgcgaagggcgcgaagaccaccggtcacgcgatcaagaatggcgcgaccgcggtgaaggatacgttctcggactcgtactcctccgccccggcctccaaagccgctggcaagtaaaccataaaaccaagcaacacaaaggaaataccgatatgcagaaggacctcggcggactgccccccgaacaggcgctcgactatatggaaaagaccccggatctcgtgatcgtgaatgtcgcgggacgcggtttctgggatcggaaccactttgacggcgcggtgaatattccgacggaagatatcggggacgacgcgtcgatcgagaaactgaaggagctccccgccggccgccccgtcatcatgcactgccgccgcggccacatggtggtcgactggtaccagaaattgaaggcgctgcgccctgatattcctgaagtgagctatatcgcgggtgtccccccgtttgacgcttataacgactgggcgcgcgataagtaatcggtctcgtttgttcgagacaactgaaaaggctgaccggttttttgccgcgtcagcctttcttttgcttggataaaggcgaggggagattcagtctgggttcagagcgcttttgccgcgctttcccccgcgatccgcccgaacaccacgcagtcggggagcgagcagccgccgagcctccccgcgccgtggatcccacccgtcacttcacccgcggcgtagagcccggggatcggggtgccgtccgttttgattacgcgggcatgtgtgtcaattttgagtccgccgttgcagaaatgaacgaaaggccgctcaagcccgtagtagaacgggggctttttgatttcctgcgtgaaaagcgtccgcccgaactccggatcctggtgagcccgggcgtagctgttatagcggtccatcgtctgaaggaactctttcggatcgacccgcatcccgagcgccacttcctcaaggctgtccgcggttttgacgatcccgcgtaagagtttcacgctccggctcgcgcctttcgcggacgcggcgtccgtcaccacccagaagcggtgatgcgggagtttccacacggtctgcgagatcgtttccatcggagcctgctcgttcacgaaccggtgcccggattcatcgagatacacatccgccccgacgtaatttgtgagccggccgccggagaacggaatcgtgaggatcttatccatgtcgaggagttcggctccgagcgattccccgaaaataatgccgtctccggtcgcggtatcaagcccatcgccataggggttcgcggtggaggtgatttcagacgtgagtctcgggtcgtacttggaccggagcgcgacatttccggtgtagcctccggtcgcgagaatcacggtctttgcgtgaacgaggaatttctttttgagacgcgaccctgagacgaggaattctgagtctgtcggtgttacccgtgtcacttcggctccgaagtaaagcgggatccggagttcgcgaagccgccggttcacggcgaagatgtagtcgtagcccccgttcacaaagcttgtgaggtagcttcgggggacaagaccgccgagcgcctcgtagggatccgggagccaggtgacgccgaggcttgtcatccagtcatacgccgccccggaatgctcaacgagaatccgaatgagctccgggttcccgagtcccttcccggttttctccatatcggcgatcatggagtccaccgccgcccggtactccgcgtcgtgccccggcatatggcgcaccgcgctgaagtatccggtcgagatcgtggagtggccttcaaggagcgattctttctcgagcacacaggcgttcaccgagcccgaggttttcgccgcgatcgcggcagtgagcccagcgagtcccgctccgatcacgcagacgtctgaactccattcctcagccggcggctccgcggttgaggagagcgccggacccgcgaacgggatcacggagaggagcccgagaagattccggcgtttcatagggcggcctcactccccgggtcatcgccggtttcatagtcgagaatcgtgaagatccggacaagctccgcgctggagcgcgcgtcgagcttgatcagcgcgttctgccggtgcattttgacagtcgtttcctcgatcccgagttcccgcgcgatttccttattccggagaccccgcgcgatacagcgggcgacgtcgttttcgcggggcgagagtttgcggacgagttccttcagacggttcacctcgtgctcccggacgtcgagctccacagaagccgtcaccgcggcggcgacccgttcgagcattttgtgcggctccgccggtttctggataaagtccgcggctccatgccgcatcgcgtgcaccgcggcatccacttcgccgtgcgccgtgaggaagatgatcgagaggtgggtgacaccccggttctcgagctcttcctggacttcaagccccgtcattcccggcatccgcatatcgagcaccacgcaccccgggcgcttcagttcatcatgcttcagaaactcaacaccgctcgcgtacgtaatcacttcccacccgagcgtctcaagcagcatcttctgcgaggcgaggagttcgggatcatcgtccacgattcggataagaggagtgtcactcatccgctgcacctttatgaatgtcggaagtggttgtggtgttgttctggctgccggagtcagagctgtctgtcgaagtctcattcacccggtcaaagcggaattcaaagataacgccgtgcggctccgcgtgcttcacggtcatcagagcgccgtgcgcgtccgcgatcccgcggacaatgccgagcccgagaccgagccccgcggggtcggtggagtcactcgcctcggtaagccgcctgaaatctttgtcatccagtttcgggcccgcgtcctcaaccgtgaggaacacatactgatcgaccgtccggacggacacctgaagcggccggcgggtttccgatttcatcgcgcgggccgcgtttttcatgaggttaatgagaaggatctcgagttcgagcgggtcgccggacaccagagcgccggggaccgcggaaatgaggagttcaggcgaatacttccggtactcctcatagtgacggaaattctcagcggccgctgtgacaactgccgtgagatccacgggcttatgcgcggacttcttttcccgcgcgtacccgcgcacccggtccacgatatccgtgatccggtgcgcctcgcggttcacggcgtccgtcgccttttctagcgtcgggtttgagggcgtgaggtcttcaagcgtcagactcatcacctcgcagtaattcatgatcgtcgcgagcggctgcttcagttcatgcgcgatcatgctcgagagatgagaaacgagggaattgcgttccagcaccgagagcttcgttctcgcttcgcgttcgttctcggcgagccgttcgttgtcagaaagcgctgccgtgaggtcgcttgtccgcttccgaacgagggtccgcagccgcatctcgttcatcacgaggatgaagatcaaaagagcgacaccggcgaaaatccaccggtacttgatgaggacatccttgaatgtcaatggcttcggggcaaacggccccatcccgagcgttttatagaggtcgcccacggtgtttaattgccccgcgacctgccaggagaacgaccgctgatccggcatcgtgagaagggcgaccgacaccgctttcactaattccggccgcgtgaagttaagcgccccgaaaacgttatccgggtagagcgccgtcgtgtgccggcactgaaggaggctgtccgcgtgaggggagacgacgcggagcactcccttttcgatgagtcccgcgttttccgcggcttcgagttcgcacgcggtgaggaccccagcgtctgttttcccgtccaccacgttttccatcacgtccgggtactcaaacgtccggtaactcacgcggctgaaaaaggcgtttgggtcgtagcctgattgcttcaggtaccccgcgagcgcgagccacccgccaagcgaatcggggagcgacgcggcaaccgacttccctttcagatccttaatggagtcgagatccttccggtcagaccgcaccacaaccgccgacccgacggaatatccgccatccttcgcccacacggttttccgggtcgcgagcgcctgggctccgagtgaattcgtaagcgtatagaagatgtcggagggcccaatcacaaagtccggccggtgaccggcgatcacagacgccgactggtacgccggaatctccagcacccggaagtggtacgcgggaagggcgcgcgatagctggatcagcgtcggcgaaataaattccgaccgataccccggctcattcacgttgatcacgccgattgtgacttctttcgccccttcattcggatccgcgtcaagcgacgggtttttcgcggggtaactcgcgggcacggtccgggtcgccgccgagtcaaactgcgggccgagtgcctcagagggccctgtgagacatagggcagagaggagcgcggcaatgagagcggacttctgaagcatggcgtgccgggagagaagggggaaactgtggttttttgtatgaggtcattctatagaaggaccgtgacggctacccacctacttttttaggtagtcaatttttgtcactatctataaccttgtacctaagcttaagtgaagcttaaggggtgtgaagggtgtcgcagaaaccttccaaatacctcttcaaaaacaagaactctgtgaaaaaacaacagagtcggatgtttttaaagatacccgctttcagacggagagagagaaagtctcagcagtactccccagaatccgaaagccgattaaaaggacaacggatatgcagataaggttcaaagcagcgcttgccgcggcgatcggagccatgctcctcgcggccccgtccgctttcgctcagggcgttacgatccacggttcccacgccggcatgaagtgcgaaacctgccacgccgggcagacccagaaggccgccccgtcgcagaagacctgcctcaagtgccacggttcttacgaagctctcgcgaagaagaccgcgaagccgggcgaaaagttcaacccgcatgactcccatatgggccgcattgagtgcacgcagtgccattcgatgcacgccacgagtcactacatctgccgcgactgccacgcgattcccgatcgtaagttcaagggggagtaaaccatgtcttctattctgacccgccgtaatttcctgaagaccgcggccgctgccggcgctgcctccgcagccgccccggcgcttgccgcctcttctcagtccactgccgctccgaagcattgggatcagaccgttgacgtggtcgtccttggtgccggcggcgctggcctcatggctgcctgccaggtctatgacaagaaggggaaggtcgtcgttttcgataagtcctacagcccctaccactccgcgacccgcatgtgcggcggcctcttcaccgcctacggctccgcgatccagaagcgtgagcacgcgaaggactcctggcaggaattcgcgcacgacatcatggattacggcggctatatgtcgcttaaagaaccggtggaactcttcgcgaagcattccggcgaagcctttgactggctcgagaaccatggtctcgcgaagcatcacctcgaaaagtatccgggccacagcaatctccgcgctgtgcgtcaggacagctatcagggcaaagactacatcgacgtgctgacgaagcagatcgcggaccgcaagatcaagatctacgaaggcacgccgctcacgaagatctacttcgacccgaagaagaatgaagtgctcggtattgaggcgacgaacctcgatacgggtaagaagtacaacgtccgcgcgcttaagggcgtcatcatggcgaccggcggcatcaccggcacccctgagtctctcgacttctgggttccgtccgtggctggcaagggcgtctcgattggctgctccgcgaacgacggcaccgcgatgcgtatcgccgtgcgtgatgtcggaacgccgatctcccacatgcagtacatcgcgtcctacccctgcggcattgtgaccgcgggacgccggggaccctactgccgcttctggtacttcacgcaggcgggcggcattctgattaataagaacggtaagcgcttcgtctctgaaaacgaaggcatctgccacatcacgccgtacctcgcgagcaacccgggcggctaccacatcgtcttcatggataagaagatctatgacgcgacccgcgcgaagtataagatcggcgcgctgatcggtcttccgtcctggaacgacgaacgcaccgaagaggagttcaagctcgggaagaacctcttccgcgcgaatacgcttgaagagttctgcaagatctcgggcgtggacctgaagggccttcaggatcagatcgagctgtggaacaaggccgttgacacgaagaacgacacccagtacggccgtcacgaccagaaggtgaagattgacctcgcgggtccgttctacggcatcaagatgtatccgtggaacaacctctcctgcggcggcttccgcgtgacggatcacctccaggtgcttggctgggatctgaagccggtgaagggtctctacgctgccggtgaaacggttgccggtgtccacggcgcgttctactgcggcggcaacgcctgcggtttcgctcatacgtcgggttacatggcgggccagatcgccatggggcgcaaagacgtctgagagaagtaaaagtcggggaaccggacgaactctcctccggtcccccgcggttctggtgaaaaagcagttcaggttataagtcagtcagacttgggatccggtaatagcgtaaccggatccctttttttatccgaattacgcggattttcttccgatcgtgagcacccagcgctgctcgaaacagatttcgtcctctttccgatagggcgcgaagccggtcttcggaccgcccgagagttccgcttccatccgaccccggatcgccttttccgtttccggcggcgtccgggtgagtcccatccaggactcgagatgctgctcaatccgaacggtgtcggagtgttcaatcgagagtccctcagactcaaaaagcatctccatgtcgtccttcgtaagattgctgacatgagacggatcgcgcattctttcgatttcgtcccgggccgcgcggtccggttccggagacgcctccatatcgatcatgatgagccggccttccggcttcagaacccggaccatttcctcaaaggccttcaccggggccgagaagtgatgaaaggcgagccgggacatcacgaggtcaaagctcctggagaggaacgggaggtcttccgcgaaccccttctcaaatatgagattcgtgagtcccgatttatccgccgcggctttcccggcttcgagcatcggaagcgtcgcgtcgagacacaccacggtcttgaccgccggagaaaaagtccggccgcaggccgcggtgcccgcggcgacttcaagcacaaggtcacttttcgcggggctcacggcttcgagcacatggttcagatagtccgctttggagaactgcagcgtcggactatcgaagttcgacgcctggatcgagaacgattgattgataagactgagattttcaggtgtcatagggcagtgcccttttttggaataaagagagaatgcatatcggctttttcaagcgtgaggagttttaccttccggaggattccgcccgcgtacccggtgaggctgccgttcgcggcgaccacgcggtgacagggaatgatgatcgagatcgggttatgaccgaccgcgcctccgaccgcctgagcggaaaaccgggtgccgccgtgtcccgcggcgatccgcttcccgatcgcgctgtaggtcaccgtggtgccgtaggggattgagagcagatggttccagaccacggtctgaaactcagtcccgatcaggtgaagcggaggcgtgaaggagggaatattccccgaaaagtaaatactgagccacttcgaggcggagtccagaatcggtgaatccccggtccggtaagtcttggggagcgtccgcgcgaaatacttctgtcccatgaaccaaagaccgatgagccctgtctcgtccgccgcaagcagaatctccccgagcggcgactcatagtgcttcacggtgaccatttcagtttccatcagtgaaatagcgggttgagtcatctggcgcttctttccgatccttttccgtataagagcggagttcggcgcagaccgtgacccggtagctctcaatcagtttgccgcgtccttctttctgcgcgagccggtgcttcagcgtgttccgccagcggctcaccgcggcttcgtccgtccagacattcatcgagaggagtttcgagtgatccgcgaggctctcaaaacgctcagcccggacgaatccctcaaaccccgagaggagaggtttcagcatcgcggcgagttcgaggtaccgcgcgcggccctcgggggtcggcttcagttcaaaaaggacgatgatattcggcatggtggttttctcctttccgttattcaggtttcaagtgcggggattggctgagcggctggatacggattgggatgtcgggagggctgtggccccttgcttcaggcttttcccttttttcactgacagcggcgcgtaatcccgcagctcaggaaccgcgcccgccgcggcggcccagaggtagaggctcgcgacactgccgtacgggctgaaacggtgctggtacttccgaaagagcgccggcgtgatcgctttgtggtgatagaccatgcggagtccccgctgaatcgcgagatcgccgaaactcagaatgtccggccggccgagcgaaaaaaggagaatcatctccgcggtccaggttccgatcccccggataccggtgagcgtccgaatcgcgtcctcatcagtcatccgttcgatcgtgccgagatccactttgccccgaagaacgtctgaggcaaaaccggcgatatagtccgccttccggaaagtcatgccgaacgactgcagccggggaattcccgccgccgcgatcacgtcaggcgtcacgctgccaaaagagtcgagcatccgattccagatggttttctgagctttggacgaaatctgctgcccgatgatgtggcggatgacggaggaaaaaagatcggggtccgtctcacggtcgatgtgcccgatcctctcgatcaggcttcccagccgcgcgtcgcgcgctttcagatactctgtttctttcgtgccatagcgaaaaaacacgatccggtccccactcagtaccaatcctgagtatcaatttattattgaaattcttgtccggatatcacattgcgagcgaaaatcatcacaatatcgtcatcatgaaattttcggcatggaaaaagaccgctatatcaattccgtcaatctgaatgccgggagccggtttccgtatctggtgctgaacgtggtcgacaatcagtccactccccggaatcccggttttcaggtgatgcattggcatgaggacctgcagttcatcgcggtgaaggatggcagggttgcggttcagacgctcgatgaaacggtggagattggagcaggggaaggcgtctttatcaacgcggatgtcatccactatgtgcggaaaatcgggacctgccgctatcggagtttcatctttcccgccgcgtttctcactttcttcccaggaagccccgcggaaagcctcgtgacccgggtgactgaaaatccggatatccatctgatccgcttttcaccggacacggagtggaaccgcggcgtgctttcgcttctctttcgtctttcctcactcgaagatcaggctaaagacgagacgtacccctatgaagtgctctccgtgctttcgcagctatggctcatgcttatccggaatctgaggctgccggcgaaggaaaaagtgagcgcgtctcaccggagaatgcagaagatccttcagtacatcgcggttcacttttcggaaccgattacgcttgaggatctcgcgcggagcgcgagtatcagtaaatccgagtgcggccgggttttcagagtgagccttcagagaacaccgtaccagtatctgatggagtaccggatgaagagagcttctgaccttctcgcggaaacggatcttccgatcgggaccattggtgaaacggtgggtttcagccaggtgagtcacttcgggcactgcttcaggaagagaaccgggctcacccccagcgcctaccgacgggcgcaccggaagaaaaacgaatagacggttttccgggtgtctgaagacagctccgattgatggcattcccacggtgtctgccgctcgaggcgtaagcacggctttacctgagagatcactctttaataaaagagcggcggctgtaattctgaaacccgagcggaaaggaaaccgccgctgattggtgatggactaaacaaaccccaggggctgcagatcggcaactgatgccgggattaagagcgacctcatatcggttttttcaagcatcagaagtctcgcccggtggataacgccgcccgcgtagcccgtgagacttccgtttgccggcaccacccgatggctcggaataatgattgaaatcgggttctggctcactatgccgcccaccgcctgcggagaagggcggaagccagtccgctgcgcggccacccgttttccgatatcggcgtacgtcgcggtggttccgtaaggaatcgagagaaggcgcttccagaccgcgatctggcaatcggttccgatcagatggaggggtggcgtgaaagagggtttttcgcctgaaaaataccccctgagccagcggaccgcggattccagaatgggcgtgctgccggtccggtaattccgtgtgagggtctgggcgaaatatttctggccttcaaaccagagtccaatgagccccgtgtcatcggccgcgagaaaaatcagcccaagcggggagtcgtagtacttcacagtgaccatttcaattcccgaagctaaaatagtgctctgaatctgacagcaggtactggctgtctttttccgtaaacgaccgggggtcagcgctgactgttacccgagtccccgcgaaaccagcctcgcggtctttcagataatctgtttcaaacgcctgacagtgcagaaacacgattccatctccattcagtatcacttcctgagtagcaatttattctcaaaatccccgttttgatatcaggaaacgagcgaaaattattaataaatcgccaaaagagaacttttcgcatggataagaaccgttttgtcaattccgtcaatctgaatatcgggacccgattcccttatttcgtggtggacgcgattgatgacaagccgttcccgccgaatccagggttccggctgatgcactggcacgaagatctgcagttcatcctggtgacagatggccggatcacggttcagacacttgatgaaaaggtggaagtgggagcaggggaagccatttttatcaacgcgagagtcatccaccgcatcacaaagattggtacctgtcggtatcggagctttatttttccggcttcgtttctgtctttctttccggggagccccgcggaagatctggtgacccgggtgaccgagaatcaggacatccggctgattcggttttcagacgatacggattggaaccgcgaagtgctcgagcgtcttaccagtctctacaaacttgaggaccaggcgaaagacgaaacgtatgcctatgaggttctgatagagctcgcgaggctctggctcgtgctggttcggaatctgaggctcccggataaacagaaggtgagtccgcttcaccggcggctgcagaagatgctgcagtacatctcgcttcatttttctgaaccaatcacgctcgaagacctggcgcggagcgctagcatcagtaagtcagaatgcggccgggttttcagacaggctctggaaaaaacgccgtatcagtatctcctcgagtaccggctccagcggggggcagagctgctcgcgaaaaccgatttcccgatcggcgcgatcgcggaatccgtgggcttcgctcagatgagctacttcgggcagtccttcaaaaacaaaacgggattgtcgccaagcgcttaccgccgggcgaagcggcagaatgaccggggacgtctgacggaaaaaccccgttctgactagtctgagaccgccaggcggtttttgaatcctgagcattcgatacgggattacccgtagacacgaatgtctcattcttaggaatcttgcttagggtgaggttcttcggtatattaaagctgtatttgaaatacatcttaaattaaataagagagaatcatgtcgttacctgaatatgcatcgcagtctgtcggaaatgtggcctcgaagagcacggcttttgccaaggtgctgaacgacgccggcgttgatttctgctgtcacggctctgacggcttctccgaagcctgccgcaaggctggcgctgatcctgaaaaggtcgccaaagagctcgactccgtggttggtgttccggcccagatgtcgcacgacttcaatacctggccgaccgatcttctctctgactacgtgctgaaggtgcatcaccgcggcatccgccaggtgggcccgaagattctggacctgctcgcgaaggttgtcgaagtgcacggcccgaatcaccccgaactccacgaaatccagtctctcttccagcagaccatggtggatctgacgaaccacctgatgaaggaagagatgatgctttaccccttcatctatcagctctgcgacggtgacctgaaccaccactccgtgcaggctttccactgcggctccgttgaatccccgatcggtgtcatggaagcggaacacgaggaagaagggcagcgtcaggaaaagatccgtcagctcacgaacgactacacgccgcccgcggacgcctgcgggagtctgaagctcacgtacgctctccttaagcagttcaaggatgacctccacgagcacatccatcttgagaacaacctcatcttcccgagggctctcgagatcgaatcccgcgtcgttgaacgctgattctttctgaagtaaacgtctttctcctgggtgaatggccagagccggatttttcggtgatggatctgcagaggagcggtaagagggatccgctctggctgttcactttttagttttaaggagcaaaagcagcacctgaagtatcaatagaagtgaaagcactgtcctcatgggccgttctttcactcctcccaaaggtttccccctctggggcagttggcaaactacgcatcacactctccgacccgccgattgttccagagacctattgagaggagtgaaacgactgtctctgagaagagaagaagcctggcgcgtcgggaaccgcgtcgggcttcttttttttgactgtccgctttcagcgatcgaacgcacatccgagaaccgtcttctcgtttagaaggacgcgaaacgcaaggatgcggggtctctttctctctccttgcctcgaagaacagaatatttatcgattgaatttatttgtcttttctgggaattatccgtattactacccatgatggtagtaaccccggatttgggataaaaagcggtctttcttcactatatttcacggcacacaggcattgttgcctgagaatctaggagagagtttgttatgaccgaaatttcccgtcgttctgctattgcactcggtgccgcggccggacttgccacttttgctgaaggcgctttcgcgaccgacgctcccaagtccacgaaagatatgccgatgaagcatacggaactcgcgctttccaaagaagaatgcctctatatcatcgagcacacggatcacgcggttctctcgaccgctgatgccaccggtgaaccgtatggcgttccggtgaccccgtttatgctgaacgggaagatttatttccacggtatcggaatgggcgaaggccgccgcaacgcgaacctgactcagaatccccgcgggtcgctctgctggatcgcgaagcaggacatcaatgagccgcatctcacggtggattacgtttccgtgattgcccgcggtccgatccgcatcgtgacggacgcgaaggagaaggaaaagttcatgcgctatctgctcgcccgctttacgccgagcatcgatattgataaagccatggctgcccgtactcagaagatcgcgctttatatgaacgtgttcgagatgacgcctgaaaacatcacgggcaaggccaaggaccgcggctacatgcattacttcggtaagcagcgtccggggaagaaggactctgattaatttttcctgagtctctttagagaacgataaaggggcgattcctttaaccggaaccgccctttttctgtgactttcccgagaaagcagcccatatgggagcgaaggagggtgaaaccgacagggtttctgaaagccccgatcgggaaagaagcaccgcactcagtcaaaaagatctttcgttttcctcggtttatccctctcccggaaccggaggtacggcgtgaggatatagcgcccgagcgcgtagaaaaggatccgcttcttatcctgcgcgggaaggggagaggagaacttgtatttccggatccagctgtagtagacatccgcttcgaggagcgccttgctgtccccgcggccatagccaaaccgcacggcggcccaccacatgccgaccagtgtccgctcaatcccccggaccgcggcaggcggaagcccgtccggccgttctaggaaccggcgaaggaagggaagccccgcggagtcgttcctgaggctatgggtgatcgaggattttctgagccgtcggcggtagagatactgaggcaccgtgaccgcggttttaagtcccgggagaatccggatgaaatattcctgatcctccgcgattccgagccgcgcgtcgaagcgataatcccggattttgtcgtaccggaaacacttttcgtggagactgcgggaacagaacggcgcttcgtcctttgtcgcttcgtaaccaaaaaacaccgccccgatgccatcctggtcaagccggatttctttgagattagggactttcggagtttcttttttccggtcgaagtccgtataggggcagagcgcgagatcggcaccggtgcgttcaagtgactcggtgaaggacgccacgtattcggggtcaagcacatcgtctggatccacaaacgacaggtacttcacgcctttcacctgactcacgatatcgagtccccggtttcgggcagcggagacgccggcgttagggagatgcacaacggtgagccaggggtgagcggccgagaaccgatcaagaaccagaccgccccggtcggttgacccgtcatccaccgcgatcacgaagaacgcttttgaagtctgcttatcgagtgaatcgagaaattccggcaggtactggatcacgttatagaccggaacgacgatggcaaactgtgacgcggatgtgctcatgggaggacaggtatcgatggttgcctcatcgggggcgaggcattctgactcgggattttaccaacagctgagtcggttgggatccgaaaacccaaagttttccggcctctggcaatttttattttctttcggtagaatgccggcctcggataactaccttggtagagtaatcggagacagatctcaggaaatcaacgggttccagactatcgtctgaaaaaacgtcattaaggaggacaggccttttcctcccgatccgaaaaaatcccgcagacttctgagaatttcagacaaaagaccggcggtccccctgatagagttatggaaagtgatccgggagcggtttcccgggcgcagggatttaaggagacagcatggcaacagttatctgccacatgatggcgtcgcttgatggacgtattgactgcgatatgacgagccacctggggtcgaaaggctattacgaagcgcttgaggctctgaagattgacacgacggtggaagggaaggtcacggcgctgcatcattacgcgagcggcacctatacgccgatcgatccgacttccgtcggaaagcctgaattcttcaagtcgcacgagtctgataagtgggctgtgatcgcggatacccgcgggacgctcgtgtggcctgaaatggatgataagaaccgtctctgcctcgtttctgaactcgccccgcgtgagtatctcgactatctgaagaagaacgggatctcctatatcgcggtcgggaagaagtcgattgacctcagggaagcggtccggattctcgaaacggaattcggttcccagcggattggtgtcgtgggcggcggccatatcaatggctcgttcctcgaagccggtctgattaatgaagtgagcatggtttacggggccggtattgacggacgctccagccagccgaccgcctttgaggggatttcggaatcccacaccgtgccttataagctcacgctgcagagcgtggagaaggtcgccgatcagtcagtctggatccgctatacggtttaaagcgtttgggcggtaaccgctaaacctctgacgcgcttcagtttttgttcagaacgaaaattattttctcctgcagaatcaaaggaaaaggtaatataagttcaagcttttctgaataaaggacgcatcatgaaacagtcggcttttccgctcattaccgcgccgtgcctcaagggtgtgcttggggacggcaggaaccacgtggtgatcatcgatgtgcgatcgaacctcgttcacccggaaaaggggcgcgaggcgtatctcgaatctcacatcccgggcgcggtgttcgcggatatggagaccgatgtcgcgggtgtgaagaccggcacgaacggccgtcacccattcccggatctcgaaacgttcgcggaaaagatgcggaatttcggcgtccggaaggacaccttcgtgattctctatgacgggggcgaagcgaatttcgcgtcccgcctctggttcacgttccgcgcggccggccacggcgatatccgagtgctgaatggcgggttaaaagcctgggtcgatgcggggcttcccgtaacaaaagagattccgacccctgaaaagggcgactttgaggtcggtgagccgctggaacgtgtcttcacgaaggaagagatcgagaagaacctcgaaaccggggaatatctcctcgtcgacgcccgctcgaacgaccgcttccacgggaagaacgaaacgatggatccgaagggcggtcatatccctggggcattcaatcacccgtcagccgcgaatatcggcccggatggatatttcctgagaaaaggtgaactgaaggacgggttcatagccgtgctggacgcggctgccggaaagcccatcatcaattactgcgggtccggtgtcactgcctgctgcaaccacctcgcgatggaagatgtggggatccagcccgccggcgtttatatcggtagctggtctgagtggatcgcggatccgaagcacccgctcgcgacagactaaatcctcctgaaaacctaaccgaaatgaaatccaggtgtcctatggcatctggattttttattgaattccggaataaaaatgccgccctgaaactgagtttcatgggcggcactttgaatcaggaagaaaggggattacttcttcgcaggttccttgtaggcaaggtgattttcgatcgcctgatcgagcagtaactgccactgattgaccttgcgatgaccgcaaagcttgtcttcaaacgcgggctgggtgcacttgctgacatcaagccccatgctgtcaatatatttgacttcgtaggagtgcggtccgatatccacccgatagcgggcgtggaactgaatgtatttgccgtgattgaccggggggtaaacgagggcgacagagctcggtgtgtccttctccaccatgaacttgcgttcgttcgcggctttgatcaccgcgtcgtgaatcgcggactgactctgagtgacttcatgctgaggaagctgctgaatggggaaagtgcccccgcagcctgttaatgacagtgtcgcggcggccaatccaagcaccaaaagcgttcgcatgacaacctctccttatttgaaatagatcgctgaaaagccgtaagaaacctgagtctgaccaatatagtgtactggtaagaattggtaaatagattgaggactattaaaaagtgagaatccagccttcagggattttcattcagaaagaggatcggaacaggagtgttttaagaggtttctgtcgaattgccgtgtaaggaggccgatcaaagagccgttgaactgtactgaactgtaccaaaaggcggcgaactataccaaaaaaagcggtaagtatacttagaactataccaatttgtatagttgatctgctgagaggcggtttagcggtcatgaactgtaccaaaagccgtcgaactgtaccaaaaaacggtaagtgcactaataat

SEQ ID NO: 1308 - DNA, 13719 bp, Unknown
  gut microbiota DNA sequence
ggcgtctttagactgtctgggatcttaaaatggcggaaggggagggattcgaaccctcgatagggccaggccctatgccgcctttccagggcggtacattcaaccactctgccacccttccaggatgggttccactaaggctttcaagcccgtcccgaataaaggtttacgtcttcaggacaaccagcgttaccggctagcgagacttgaaattatacggatgcatatcacattgtcaaggcatagccacaacatttttttctgattgctgtcatagggacctctgtcaccctctcaaagtcatcctttttcatcctgtcatgcgttcttcttttcttctaaaatactgtcccctacgacaaaaagagacgccgaaaacgtctctattcataaactctgtttctctagaggtacttgtttcatggcacatgttgtctgtgatggctgcgttaactgcaagcacactgattgcgtggacgtctgcccggtagacgctttccgcgaaggtcccaacttcctcgtgatcgatcctgatgaatgcatcgactgcgcggtctgcattccggagtgcccggaagccgcgattttcgcggaggaagatgttcctgaagatcagcaggaatatatccagatcaacgcggagctttccaagcagtggccttccatcacccgcaagaagcccgctcctgatgactgggagaaatggtctggcgtgccgaataagcttcagtacctgaagaggtaagcgaacggtggctgataagactcagagcctcgcagaccgcataaacgacgcgctgccgcagaccttctgccggcagtgcggctttgcgggctgtcgtgagtacgccgaagcggttgctgccggccttgctcccattaaccgctgtcccccaggcggcgatgagggcattcatgcgctttctcttatcacgcatcagccctaccttcctcttgaccctgagtacggtcgggaacttccttttgctgtcgcccggatccgcggtgacgaatgcattggctgcggccgctgtcgcaaggtctgtccggtagacgcgatcacaggcggtcccaagcgtcttcacgctgtgattgaggatgcctgcaccggctgctcgctctgccaggccgcgtgtccgattgcctgtatcagcatggtggaaaccggggccgagtggacgcccgaaaaggcgtctgccgcctcaaaccgtcatcaggcccgcaagtcccgccttgagagagaatccctggaacaggaagcccgctacgcggctctgggtcagggggatctcgcccgcaagaaggcggctatcgaagccatcctcgcgcttgccgccaaaaaataagtttcatccaaattcgggaggtgctttcacgtgaattcagccgatatccgggaaattttcaggcgcctcgccgaacttcgtcctgatcccaaaagcgaactgaactaccggacgccttttgagctcctcgttgccgttgtgctttccgcgcaggcgaccgataagagcgtgaatgaggccaccaaagttctttacgctcacgcaaacacccctgaggcgattctcgcgctcggagaagagggactcatcccttatatcaacaggatcggtctctaccggaacaaagcaaaacacgtgatcgggctctgctccgagctgatcaagcgcttcaacggcgaagttccggaagactttgatgcgctctgctcccttcctggtgtcgggcacaagacagcaaacgttgttcttaacgtcgcgttcggtcatcccacagttgctgtagatacccacatcttccgtgtcgcgaaccggaccggcatcgcccccgggaaaacaccggacgaagtatcagaagctatcgtccgcgtctgcccgaaggaatatctccataacgcgcaccactggctccttcttcacggccgctactgctgcaccgcgagaaacccgaaatgctgggaatgcccgatccgggatctctgcgaatttgacgaaaagacacctgcgccggaggaaaaaccgattcctcatatccttcccaaaaaagaaggccggaaaccgcgcgccgcttccgcttcccggaagaaaaagtcatcctgacgcttttcctccatcactccaggccggttgcagtttccgctttctctcagctccgctaacatagatagattacgttttgaaatttcctctcggaatttcgacgcggtttattagcggctaaagaaaaaagagacagcatatatggaaggaacgaagcacctcacgcccaggtattcccagatggcccttggccttgcggacgacatcctgggaccgattctcgctgacggctcaaaaccggattttatttcgttcggcggcggtcttccctgcccagaaggtttccctgttgaagcgctgcgggaagcctccgactggtgcctgaagacctacccgagccggtctctgcagtattcgggaccggaaggagaaccggaactccgtgagcagatcgccgcttacgaaacttcccgcgggaatccgacgtcgcctgacgaaattcttgtcacgtcaggcagtcagcaggcgcttgatctctgcggccgggttttctgtgacccgggttcaaagattctgattcagcgtccttcctatattggcgccctggaagctttcaacctctctcagccgacgtacgttgaaatgccgtctgatgctgaaggcgcggctccggctgaaatcggggaagaagcgcgcggtgtccggtttgcctatacgctcgccacttactgcaatccgaccggacagacgatgagcgctgagcgccggaagcagctgattgaaaaagccgagcagtacgatttctggatcgttgaagacgatccttatggcgaactctggtacgaaaagaagcctccgatctccatccggaatctggcgccgcaccgcacgatccgcctctgctccttctcgaagatcctcgccccgggtcttcgccttggctacatcatcgcgccgcgtgacgtgattcagatgttctcgaagatccagagctacgctgtcctctccactccctgcatcaatcagctcgtcgctgcccgagtgctcgcaagcggccttctgaagacgcatctcccggaagtccgcgcgatctaccgcgagcattcgttcgatatgcagcaggcgctttctgaattcatgccgaaagaccccggcatcagctggaccaggccagagggcggcatgtttatctggcttacgcttccgaagccgattgacacgtttgccatgcttccgaaggcgctccggatgaagcttctctatgtgccgggattcgcgttctacccgaactcccctgagcagaaccatatccgactttcctttgtgactgttccgaaggaaaagacgattgaaggtgttcagcgtctcgcggctctcgtgtcggacgaactccgacgcctctgatccctcaaagcaaaaaggaacaccacgccatggctctgccaaaaattgaaattctgacgacaggcggcacgattgcaggaaagggagagagtgaaaccggctcttcttaccacgcgggagaagttcctggagacgaacttgtccgctcagtccctgggctcagccgggttgctgatattacagtgcgggaaatcgcctccatcccttctcaggacatgacagaaggcgtgtggctcgcccttctctccgcgatccgtgaggacgcggagaagtttgacgggttcgtcatcacgcacggcactgacaccatggaagaaaccgctttcttccttagcctcaccgtgccggcaggaaaatccgttgtgatcacgggagccatgctcccctccaccgctctttcttctgacggtcctaaaaacctctataacgcggtttctgccgccgcggctcccaaatcgtctcgctatggtgtcatagccgcgatgaacggagaactcttcgccgcccgggggctcttcaaatcaaagacggtggcgcttgacacattcagtacccgtttcggaggtccgattggctggacgcagggcggtgtcacgcacttcagcgtgagtcccgcgcctgaacgatcccttccctctttccgggacctcggggcaatccgtgagagttcgcttcccaaaatcgcctgcatcgcggtctgggctggttctgacggcgttgccgcatccgcctacatggatgccggctatcagggactcgtcattgaaggtttcggtgacggcaatatccccggaggtctcctccccacgctgcggcttgccgcggaatcggggcttgctgtcgtacggtccagccgctgtgcttacggccccgtgctggaagcaggagaaattaacgacgctgaaaacggatttgtctgcggcggagcgctttctgccgctcagtgccgtattcttctgcagctcgctctccttaagaacccgagagccaagcgaacagacctccagaaactcttttcccagttttaaccgacgcgagactattctccatgccgatacccagtgaattcacccccattctgcagtcactcccccttgtctcatccgagtgggatgaagagaaccgcaccctggttctcacgaccggacttcgctatcctggcaccgaagagtctgtgatgatctttgtgacagaagacgcttctatcggcggctggcaggtggatgacgggggatcagccgcgctgctcctttctgacgccggtatcgctccgaacgctcccggcatcactgcgtatctcaagaccgcctacgaagaaaatgttctcatgatggatgcggggcataacttcggtattccggtgtcggatgcggatgacctcctcgagtcagcgcttgaagtcgcgtcaggctccctgatgctttacgccgtcggccgctttggagccgcctctgagtaattgacctcgcgatgtctgagtctctcgaatccgcttatcgggggcgcttcgcgccttcccccacagggctccttcacgcggggagcctcctcgccgctcttgcctcgtggcttgacgcccgggcgcatgacggcacctggctgatccggattgaggatatcgatcccccgcgggatattcccggtgccggtgagaagattattgagacactcagccgcttcggttttgagtccgatgaaccggtgctgtggcagcatgacaggcttgacgcctatcgggaaaccgccgcccggctggtttctgaaggaaaggcgtttggctgcgcctgctcgcggcacgatatcgcggagtggcatcagatccacgggggcgatccttcggtctacccggggatctgccgaaacggcaccggaggtcgtaaaccccgggccatccgcttccgggttgattcggagccagtctcttttacggaccggcgtctcgggacgctcacccagaatctcgaaaaagagcttggcgacttcgtgatctggcgagctgacagtctccccgcctatcagctcgcggtcgtcatggatgacggtctgcagggcgtgacagatattgtccggggtgaagacctctatgggaacacaccgcgtcagatcgcccttcagagagctctgggactcccgactccgcgttacctccaccttccgcttgtgctgaacgaccggggtgagaagctctccaaacagggaggggcgacaccggtggatccggagtcgcccctcatcgaacttgaacgcgcctggcggtctctgggattcggaccgctcggagcagattctgttcccgctttccttcgcgccgcgcttccgctctggcgtgaagtctggggaaaccgttagtcgttcttccggttttcttccggaagccgcacttcaaccgtcgtgcccttgccgggttcggaatcgatcacgagttcagctccgatcttcttcgcgcgctcttccatgatggagagtcccacatggcgggctttccgttcctcagcaagcttccggtcgataccgacgccgttatcccgcacacttgccacaaagtcgcggttattcgtgatccgcacttcaacctgagatgctttggcgtgcttccggatgttggaaagcgcttcctgaatgatgaacgtcacctgaagcttctgcttctcggtgaggttcgggccgttaccggagaactgcaccttggcgctgacgcctgactgcgcctcaaagcgccgggtcacggtgagcaacgcggtcttgaagtcctccttatggatcttctcgcggaagttgaggagcagctcacggacgttttcgtagctctcctggacacccgccttgatctgcttcacggtctcatccaccatctgcttatcgttccccgcgagcgctgactcaaggagctgcacctgcatattgaggaaggaaagcgtctgggcgatcgagtcatgcagcccctgcgccatgaaggtgcgctcctgaaccacagcaaactgccgttcgcgttcgttcagccggtggttatcaatcgcaatgccgagatgcgtgccgaaggactccagctgccggaaggcgggcgaggcaatatcgcggttatcgcggaagaacacttcaaacgtcccgaggcttgtctggccattccggatatggaacccgtaagacacctggaagccttctttcacgagttccttcgcggtgtcacgcgttcccttcagaagatcaaagcgtgtgggaagcggcttctgatacgcgcggtaaatcggcgcgtccgtgtcgctctcgcgggacgacagttcaaggaaccgcccggagagtccggaagaggccacaatggaaagctttccgctctcatccaccaggcgcaccgcgcaggcgtcgctcccggtgtagctccggatccggtcgataaagccttcattcatgtcttcgatcgacaccgcctgcgagaggaacgtcgtcatctcgtaaagctgcgagaggttcgtgttcttttcctgcactgaggcagtcttctccgccaccttcgcttccagattgtcgtagagatcctcaagcctcgacgccatccggttgaagccttccccgatgcggccgaattcgtcattcgttccgacgttcacccgggcggagagatcgcccgcacgcaccttatcaatcacctctccgagcttattcaccgggcggatcacccagcgcttaaggaggaagagaatcacgaagaggctgccgatagcgagcgcgatgatcagcgtctgcagataccgcatctgccagagataccggactcggtaatcctcaatccggtccttcaggtggttcagagcgccggtgtaggaattaaagatctcagtatcaatcgtcgcgccgtgctcccgctgctgaaacagctgcggacgcgcctgagtctcccagacctgagtcgccttattgattgagtcctcgatatccggcgtattcggcaccttgaagggtgaccagagatcaatgtcgtgaagccccttgatcagcgtgttcgaaacccggatttcctcatcaaacatctccggcgcgtaattcgtattcgtgaagacattcgcgcggtggaagtggatcttgatttcgtttacctggttcagcgcggcggcggacgactccgcgttccagctgagcagcatcgtataggccacaacaccgaccacaaaagagacccacgccgccgtgagtgcgagaagccttattgagaggctgtgaaacttctgaacctgcataggaaataattccggatttttgctgcctgaaccgggcagataactgtagaaaaattcgctgaatactatacaaaagaaaagccgcacggcgaacaattatttttccgccgcacggcttcaaagggactagtccctctcctgttcagctcagaggagccttacattcccctcttcatcctcaggaggcagattttcaacggcgggagacggatccttccccgcgggcagcgcccgaagccccgttacccggatcagacggggcgagacaccgcgtccctttctcgtccgatgcagcgtgtattccgcaagcttcgcgccgctcaccgtctcttcacgcggctgcttcgcgcggccctcgccgatcaccgcgacaccggacgctgtaatcgggatcgccgcgacgatcttctcatccggctcaagccccatcagagaaacgccgagaccgccggaaggcagcatccgcatttcggagatcgggaagacaagaagtctgccgtgctcagaaagcaccgcgataaattcgtcctccgccttgatcggcacgggttcaagcgcccgtccttcatcgactcggacaaaggatttgccgctccggacacgcgccggcatatcgccgagcttcgaaataaagccgtagcccttcgttccggcgaggaacatcttctgatcggccggaccgcagaagataccgacaatctcggttcccggctcaagatcgataaagctcgtgagcggcagaccgtcaccgcgcgacccgggaagcgctgaaaccgcgatcgagtaggagcgccccgaactcgaaatgagaataagcgtctccgtgctccggcattcaatcgagcgtccaggtccgtccccgatcttgtaattcatgagcgaaatatcatgcccatgcccggaccgggtacggataaagcctttttcagaaaaaacaattgtgaccggctcatcgagcacctgaggcgcggcctgaagcggagccgcttcttcaacaagcgtccggcggtcatccccataggtcttcgcgtcagactcgatttcccgcgccaccgcggtggcaagacgccggtctgacgagagaagcctcgtcagactcttctcttcatcccggcacgactcaagttcagacttgatctgggcctcggaaagacgggaaagctgccgcagctttatttccagaatgtcctcagcctgacgctctgagagactgaagcggcgcatcagctcaggcttcggctcatcactctcccggatcaccgcgatcacctcatccacgtgaagcagcgcgatggcgcggccttcgagaatatggatccggtcctgcaccttcgcgaggcgcgcttccgttctgcggcgaactgtcgccacgcggaacgccacccactcggaaaggatctcaagaagcggcttctggcggggtttcccgtcgctcccgatcatcacgagattcatcggcgcgttgctctcaagactcgtctgcgagaagagcgctgcgataaaggcgttccgatcaacctttgatgtcttcggctcaaaaacgagccgcaccggcacgtttttatccgactcatcgcggacgtgcgacagcagcgcaagcatcgcgctctttgtctgctgctgctccggggtcagcgtcttctttccggccttcgggcgcgggttcgtgatcgtttcgatttcagaaagcacctgagcggtcgaggtctgaggcggaagctccgtcacaatgagacgccactggttatgcgacatctcctcaaactcataccgggcgcggacgcgaagcgtgccgcggccggtccagtacgtttcccggatcaccgaaggagaagaaataatctggccgccgcccggatagtccggggcggggagcaccgcgagcacgtcatccagcgtcgcgtcaggcttctcaagaagcagctcacaggccgccgccacttcccggaggttatgcggcggaatctctgtcgccataccgaccgcgatgccgcttgcgccattcagcagcacaaacgggagacgcgccgggagcaccgccggctccttgaacgccccgtcgtaattcgggataaagtccaccgtgccgagatcgatttcggaaagcagcagttcggaaatcttcgtgaggcgggcttccgtgtaacgcatggcggccggaccgtcaccgtcacggcttccgaagtttccgtgaccgtccacaagcggataccggaggctgaaaggctgcgccatgcggaccatggcgtcgtacgccgactgatcgccgtgcggatggaatttaccgagcacatcgccgaccacacgggcggacttcacataattcttatcggcggaaagatggagctccttcgccatgtcgaagaggattctgcgctgcacaggcttctgcccgtcgcagacattcgggagcgctcggtcagtcaccaccgaaatggcgtaatcgagatacgcgcggctcgcgaaccgggcgagcgtcagcttcccctcatccttttcgtcagtctcgtcctctccgaggaactgccccatcagctgcagagcagaagtttcctcggcggtttcgggttcattcccggtatccgtgtcaacttcgttcccgtcttcgtccacggcttccatctcttcagaatcctgttcctcaccatccgtaaacagggattcagtcgcgccgtcttccggattcatgtctttcttcgtcattcagtgctgttccttgtttatcagatgtccgcacgggcccggtcaccgtagcgttcaagccacgttctccgggctcccgattccttatgccccatcagcatggtcatcacgctctctgtctgggccttgtcgacttcaccccaggagatcggaagaaggcagcgggtatccgggttcagagcggtttccccgagttccgccgcgctcatctctcccaggcccttgaatcgggcaatggtgagatcctcgggattgatcttttccttcgcgagtttctgctgcgtccgggcgagttcccgatcatccaggcagtagatccgccgcatcgggcggcgtcccctcgccggcacatccacgcggaagagcggcggcatcgccacatatacgtgccccgcttcgactagtcccggaaaatgccggaagaaaagcgtgagaagaagcacctgaatatgagatccatcgacgtccgcgtcagcaagaatgcagatcttgccgtagcggaggtgtgagagatccgcgtcagacgctttcttatgcgggttcacgccgatcgcggtcgcgatgtcatgaatcacctggcttgagaagagtctcgtcggagacacttcccaggtgttcagaatctttccccgaagcggcagcacggcctggaattccttatcgcggcccaccttcgcggagccaccggcggagtcaccttccacgagatagagttcgtttcgcgtgatatccgagctctcacaatccgtgagtttccccgggagcaccgcgacgcttgagctcttcttccggtcaatcttcggtgcggactgctgacgcttctgagcctggtgaatcacgagctctgcgagcttcttcccctcttccacatggtcattcagccagaactcaaactgcggcgtcacaaaggcgctcacgagtttcagcgcgtcgcggctcgtcagcttatcctttgtctgtccctggaactgaggatccagcatcttgcaggaaagcacataggaggtgcgggaaaagacgtcttccgcgagaagcttcacgcccttcaccgcgagctgatgcgcgtcgatgaagttcttcatcgcctgaaagagaccgtctttcagaccatattcatgcgtgccgcctgaaggcgtcggaatgaggttcacataggactcacggacaagcggtccttcctctgtccacgcgaccacccaggaggcaccctcgccttctgaaaaagcctcggtatcaggaccggcaaacccttccgcctcaaacgcgggcaccgcgggcggaaacgccatttcagacgccagatattcgccgagccccccttcgtaaagccagcgctgatcggttccggcaatctcgttatggaagctcacctcgcagcccggcatcagaacagctttcgagcgaagcagccgcacgagctgtgacaccgggaccacgggagaatcaaagtacttcggatccggccaagcggttacccgggtcccggtttcgctcttacgcctcggactctttttggatgcgagcggctcatcgacaaacccgtccttaaaggtaatccggctttcaagcccgtcacgccagaccaccacttccatacgggtagaaagcgcgttggtcaccgaaacgccgacaccatgaagaccgcctgaaaacgcgtacgcgccgcctgacgccttatcaaacttgccgcccgcgtgaagcgacgtaaagaccagctgcaccaccggctgcttctcagtcggatgcatgccgaccggaatgccgcgcccgttatcctcaaccgttaccgaattatccggatgcagccacacctcgatttttgagccaaacccggcgagcacttcgtcactcgagttatcgaccacttcctgaataatatgaagcgggtcgcaggtgagggtgtacatccccggtctttctttcaccggttcgagccccttcaggacccggacgctcgactctacgtagctgccagcttgtttgcgtgttgccatgttttctctgaaaggggaagaacgggatccggcccattcttcaggtgacaataggaagcagcctgggaacccggaacgggttctcaggcatctgagacgttcaatattaccgcaagacctttgcctgacgccttcggaatcagaaagcctatcaggcggagacgcctgaaaacgcggtctcagaggtccttgatgagagaaaggaactcaagccgggtcgcggtgttcttgaggaaataaccccgcatgacagaggtcgtcatcgcgcagtcatgctctttcacgccgcgccatgacatgcactcatgcttcgctttcacgatgaccgcgaggccatacggcttaatgaggcgttcgagctcgtcggcgagctgcaccgtcgcttcttcctgaatctgcgggcgggagaagatccagtttgcgagacgtgagaacttggaaatgccgatcacgtggtctgacggaattacgccgatccagcactgtcccatgatcggaacaaggtgatgcgagcaggcgctccggatcgcgatcggtccgaccgtgtagatctggttcagctgcttcacgttcgggaactcggtgatccgggggcgctccgtataacggccggaaaagacttcgccgagatacatcttcgccacacggtgagcggtctcacgcgtgttgtgatcgttctctgtatcgataaggagggtctcgagcacgccctggattttctcctcgagctcagcctcgagctgcggcatctcaccttctcggatgtactgcgcgatattgtcgttcgcggcaaagggcgcgcctgcctctctgatgcgttcacgaatcacgcttgaaatcggcttttcctgattgatgcctttttccatccttcttacctttattgatagacgagtcgcagatactgattcagttcgaatcagctttggcgctcagctggagcaccaatctgagaagtttagtggatttcggaaatttccatgccgcctgagacagaggtatcagcaggctcggaattttcttcttggtgtattgcaaaaatgaaaaaatccagaaccttatccttcggttactggattattgacggcaccatccgctgagattctgagatgtaaaaaaatcaagaacttacggataagtcccaaaaacattcattcctctctgccgaaatgatgtcggttgaaacgtcttagacgtttctgttcctgccaggcccatcattctcagcaggtcggacatcttaccccagccgcgagctgaagtgaaggatgtcggcaaatgtcttggttctatctctttcttacagtacgctgagacgtcatcacagagcggcgggtgaaatgc

SEQ ID NO: 1309 - DNA, 13947 bp, Unknown
  gut microbiota DNA sequence
ctctattatggaagctttatgggccactattcttttctcaggctttgcacttgaagtgataattcgcctttaaaaaacacagaaacaagaatagaattcgacagtattggcattgtcgtagttcaatcctcatatctgattgaaggagattcatcatgaataatccgtctcgccgccattttcttgaaggcgctgccgccacaatagctggtgccgccgttctttcctccggaaccgcagaggctgcggccaagaaaggttccaaaggaacagcttcctacgatctcatcattgtcggtgccggctgcggcggtcttgtctgcgcggttcgcgcggcacagatcggtcttaagcctctgctgctagaaaagatgatggattcctctggcaatacgatttacgctgccggatttatgctcggcacgaatacgaagatgcagcgcgctgcagggatctccggcgatacgaccgataagttctatgacgacatgatcaaggtgtccaaaggacatggcgacccggcgctcacccgctactttgtcgatcacgcggatcagacgcttgaatggatggcggactattgcggtatcaaattcaagactggtatgcatttcattttcccaatgcttacccggtctcatctcgttcaggggccgacccagcctggtggttcccagctggcgctcgatcttcagaagaaggcgaagagccttggcgtaaaaatgatgtttaacaccaaggttgtgcagctgcttcagaattcgaaggggttcgttgacggtgtccgcgtcaagaccaaagatggttacagtgacatccgttcccgcggcggagtggttcttgctaccggcggtttctccgcgaaccaggctatggtgacccaatacgcgggggctgcggccgcccgcatgccgattcgcggttcccgcattattgctggtgaaaacattaagcttacggatccgctcttcgcgaagtttgtgaatgtcgatcagtatcactgcggtccgattcatgggccgaccggcgctaatcctctgaacatcgtgaataacggtatctgtgtctcaagggaaggtaccgagcgattcacggacgaaggacagacttatgttcagatggcgcgtgacaccgcagcgaagactacggataactgggcttttatgatcgttgacgaagacgttcataacctgaaggcccttgcgaacgactggaactcctacgcaaagaaccacgcaccggtttataaggctgacacgattgaagcccttgccaaggaagccggtcttgatccgaagaagctgacgaagattgtggatgaatataacgaggcctgtgcgaataatacccgcgcgaaacttgtgcccccgaatacgctgaaggaagctcggcctgtgaagaaggccccgttctacgctgtgccgttccaaggcggaatgacagccactttcggcggtcctctggtgaatacggacgctcaggtgcttgatactgagaatcagccgattccgggactttacgcgatcggcaacgcggcaggcggtctcttctatgacaattacgtcggcggcgctcagctgacaaacgcggcggtctacggctatcacgtcgcggactacatcaaggctaatctgaagaagtaagaattcagaatcttcatctgaagtacaaaaaactctcgggttccctactggaatctgagagtttttttggttgcctaatcaggaaagctcagtgatagaactcggggaatcgggatttcagccgattcatcgaccgttcctcgtgatccgcgagccagtcaacaaaaacctgaactctccgtttttcgtaagactcttcccgcgcgtagacaaagcaggagagaggtttccgcctccagccatccagtactgcgacaagattccccgcttcaatatcatctgcgcagtgataaagcgggaggtccggaacaacaccggctcccagcattacagcggatttgaccgaaatgaggttatggacaatcagcgtggacttccacctgattgttgcagttttggctcctttctgaaggaccgttgtcgcagaccgggttggagtattgatcagaacgccggtatgcctctggcagtcatcgacctggcgaggaaaaccgtgctttttgacataggcgggggatgcgcaggggataaagggcatttctcctgaatatctctggatcacccccgggagcggggcgtcttctccgtaaccaaccgccacatcaaccagattgccatcagatgtcataaaaccgtctggaagaggagctgtaagctcgctcagctcgaactgaatatccggataaattttctgaaattcaaccagagccggggtgatttctgccggcccgatgcctgcgtgagatgtgacccagatcagacctgatagcttacttttatcgcctttcagtgagcggatcatatcctcgtgagtcgcggtcagtttcagcgctgcctgatatgcctcatgccccagctgggtcagtttgacaggacgcgaagagcgagagaaaagaggagcccccagttctttttcaagcgcgtgaattgcccggcttgcggtgctgggttcacagtcaagccgctcgcaggcggcattaagtccttcagcccgaacgatttcacagaacatccgccatgaattcatgtcgtccaaacggttcacatctctctccggattttttattcgtatttcttaagatgtattccattttctccgagataggtactcatatacaccttaaggtgttaggtaaatcgtatgggtattttcccggaattttggaaaaaactgcaatctgatgttccatttatgcaacagatcttttctcagattggctgtttaacaataggttgagctcaaactaggaactaagtctacgttatttattgcgtttatgccaatttaaaattgatgaaattgtcttttctgaaatctatcttctccggataatcagactgttcaagaaaaaatccctgccggacgagaccccgggggggattcatgagagagataggagaatcagaatgacctggcagatttggttcgcttgtgcggccattgttcttgcggtggtaggacttgttaaacggtatgaaacccgaatggttctgcttttggcgggttttgccatgtgtattgtcggcggggacccgatgaaagcctttcaggcatttgtcaagggaatgacgaatatcaccctggttccggcaatctgctcggctatgggctttgctgccgttgtcaccgcttccaagtgtgacgagcatctggttgccgcggttgccgctccccttaagaagctcggcggtcttctgattccggttaccacgcttctcacctttgccatcaatatcgccatcatgtcggctgccggacggctgcaaccgccggcgcgactttcatccctctccttatccgcgctggcatccgtccggcagccgcagcagcggccgtcggcggcggcacgatggcggggcttctgctgaaccctggctgcgcgcatgacatttacgtcgcgaagatggccaatatggatctgatggctttcattgcctgggcggctccgtatgtggtggggctggttgttatcgcgactctcgtgaacgccgtcgttggaattttcggtttccgtgatcacaaaccgagcgcggaagaaatgcagggcctgaatctgggtgaaaagaaagaattcaaggtgagctatcttcgtgccatctgcccgctcgttccgctcgcggtccttatggttgccgctatctggttcccgaaggcagggctcgacgttgtggccgccatgctgatcggtaccctggtgatcgcgctcgttacgcttgcgaatccgggtgaactttccaaggctttcttcaagggcatgggttctggttacgcgcaggtgatcggcctgattgtggcagccggtgtttttacggctggccttcaggtgaccggtgctgtcggtgccttcattgaattcctgaagagctcgaatgaacttgcccgctggggcgccgctcttggcccgtatctgatggctatcggcacgggttccggcgaagcggcgatctgggccttcaaccaggctgtgacgcctcacgctgtgagctttggaatgtcgcctaattccctcggtcttctcgccattatggcgggtcagttcggccgtaccgcaagcccgctcgctggttcgatcattatcgtggccggtatggctgccgcgaacccggtcgctgttgtgaagcgtctggtgccgggcatgacggttggtgtgctggtcgctgccctgattctggtctgaggtaagaaaaatgtttgacctcattatcagaaacggttttgtggtggatcccgaatccggattcgccgggaagtctgatgtcgctgtcgaggacggcaggatcgctgaagtttccgaatcgatcagcagcaaaggtacggaagaactcgacgcctccggcctcacggtgcagccaggcgtcatcgatacacatcttcacctcgcttctcacccctttggcatgcggatggccgcggaaagcggtgtgacgacctgtctcgaaatggcaggtcccgcgccgaaagtcttcagctatatgccggttgcgggtgttgggatcaacgtcgcggtgctgaccgcgctgattccaggagacaacgtctcgggaaacgatccgaaggctgcggaaattgacctcgcgatgacgaaagcggttgaggacggcgcgttcggcgtaaagatccttggcgggcactttccgctcactcctgaagcatccgctgaaatcatccgcattgccgcagagcgggggatttacgccgcctggcacgcgggaacgacggaggcaggttccaacataaaaggcatgaaagaagcggtggaactggcgtccggtcatcccttccatctggctcatatcaacgcttattgccgcggccgcgtgaacggcattctggatgaatgcaaagaagcggagtcactccttgcttctcatccggaaatcgtgacggagagttacctctcggatcggaatggctgccccctgaatttcacgccggacgggaaacccgcctcggggattctatccgcgcagctcaggttcttcggttttgagccctctcgggatggagcggttgccgcgatgaaagcggatgtgcttcgcgccatcgctcccagaaacggaacgcttgtgcttctccctcccaaagaaggggttgaagctttcctctccggagaagcgaaagacggatcctttgggggagtgaacccgatcatcgccagaactttcttcgcgaccgcgaagcgcgctgacggcacattcctcgtggatgggatcagcacggatggcggtgtgctgccgcggaatgtcatcgtgcgcgggggctgcggtctgatgaagcttggcggactctcggcgcttgagtttgccgcgaaaacctcccttattcctgcccgcatgctcaagctcgaaaagaaggggaggctgtcagctggggctgacgcggatctcacgctctatgacccggagaggatgaccgcggttcacacctttgtgagaggcgaagccgttctgcgggatggccgggtaaatggccgcggaggcaccgctctcgtcactgaggcaggtttggaagccgttcgccggatgggcttcgggctgaagtccttccaggcggaataccaacaatagacaggactttcggctcactgtcaaaaaacaatcaataggagatcgttcatgaaaaagcattcacttctcgctgcctcggtcgcgatggcgcttctcggtgcggttcagcaggcatctgccgccaacgttgaagtcttcggattcctggatcagggtcttacttaccggtacgaagacggaaataccggcatgcagggacctgttggacagtccaaggcaaatgtacttgacagcgcgggctatgtgacgcagcagggcgctggacataaatttgagcagggcacgggtaatgtgagcacctggggtatcaagggttctgaaaagctttctgacaatcttgaagcgatcttccacctcgaaaacggtttccttcctgatgatggcacgctttacatgaataacgtgctttttgagcgtgagtcttcggttggtttccgctccaagatctggggtgaactgaagggcggccgcatgccggccatgtcaaccggttccggtacgaccgggttgctgaacagccgcgtgaatccgttcggagccggctggggcaacatgacaggcggctggaagtttgccggtacgctggcgaccgcacgctggaacaacatgatcaactacaagacccccgtgatgaatggggctcagttccacttccagcattccttcggcaataagagcgacacgactgagggtacgtctgacgccgatcgctggaccgcggtcggttttaactggacaggaagccgctcgtacattgcggctgtcgttgactggattgcggccggcaactctgccaatcgcctgaccgataaggatacgtggaaagccactgttggcgggcactacaagtttgatcgcttcacgctttatggaacagcccagtacctcaagaatacgcgctggatcggcggctactctacgaaggaatttgcgccgctccagcatgcaggcgacctgacaaaggggtttgacggctgggctttctcgacgggtgtcgatgttcccgcggctggcggaacagtcaaggtttccgccgcctgggggttcggtgaaaacaacaacacgacgaaccagaataagtatgaccgcgtgaatctcggcctcggttatatctatccgctttcccgccgtacctcgctctacgcggtcggaggctatttctggcaggacgccgattggcagcggaagaacatctcggctcatgaattcatcgccggcatgatgcatcgcttctgagaaatctgaaagttctcagatgggcagtacccgcggctgattccgaaagtaagagtcagccgcgggtgaataaaaagtttttgtggagcagggtaaaaatgttgggtttccatgtgggtaaagttcaggcgcctgatcagtcgatggtgcatgacacggagtattggctgcagcagatcaaccgcgcgtcggttgtggcgaatgttgagagcgggctgcttgaccgggaactcgcgagaaaaatccgcgccgcattggatgaactccggcgggaagctgcggagccgggcgcccagcactgtgatctttatattcagttcgagccgaagcttctgaaactctgcggcatggaggcaagccggcttcatgcgggacgctcaagccaggatattctcgcaacctcgaacgccgcgatgaatcaggaacgtctgatgatgctcgcgggtgaaacagcgcggctctgcgacgctcttcttgaaaccgcgaagcgggagtctgatgcgcttgttccggcttatacgaatggcgttcaggcgcagccaacactttacagccattacctcctcgcccaggtctacgttttcagccgcgatattgagcgcatggtggaatgcgtacggcgtcacgatgtctgtccgatgggaagctgtgtctgcaatggcacgggatggccgctgaattctgcccgtatggctgaactgctcgggtttgaacggacggcggataacgctttcgacgcgggacagtgccgcggaaatgatcttccgctcgaggcaagtcagatcgcggcctctgtcatgctccatattgacgcgttccttgcggatttcatgacgcagtattcccagacaaagccctggattcacagcgttgatccgaatggcgtctatcactcgagcgcgatgccgcagaagcggaatcctagtcttatcaatgattgccggcgggacgcggggctcgtgataggagaagcgcagggtgttctgatgcgtatgcagaacctgacgcttggtatggcggacgtccgcgactcgtggtctatggaaagcctgatgacagacgccgccgtggtcgtgaaaaccttcgcgggcattgtgaagtctcttcgggtggatcgcgaaagagcgctcgccgagctgaatgcggaatggacctgcacgcaggagatcgccgatacgctgatgcgggaggccgggattgatttccggacagggcatggctttgcctcccgttttgtaacatacgcccgggagaagggactgacgccggccaacgcgacctacggtgatttcaccggtgtctggtctgaatttgcagctggtaaggaccttcctcagtctttcccgctgaacgacggacagctgaagcaggcggtgaatccccttcacattcttgaaaaccgaaagactccgggaagtgcctctcctctgatgcttgaggaccagatgaatgccgcctcccagatggtcagagcgatgaagggtcgggtagactttttcattcagaaccgaaaagaagcggaaaaaacgctcgaatcggaattacaggctctttgataagcggcctgtctaaaggagagaaagagcatgaacgccgaaatgacgctgcagctcgaaaaacgccgatggtggattctcgcggtcataggtctgattaacctctgcgcgggttctatctacgcctggagtgtgctggcggccgccagcgccgcaaagctctcatcggtgctcggcactgcggttaccccgggagacctcgctatcgcgttcggggtcgcgaatgcggtgggaccgattccgatgattctgggcggtgcgatcaatgaccgattcggcccccggaccgtcattgtggcaggcggtttccttatggggctcggactgatctgctgcggactcgcggaatccgtgggaactctgatcgcggcgtatggcggtcttttcggtctggggctggggctgacctatggggcctgcattactaccgctgtacgttattttccggaccgacgcggcatggcagggggtatcgtgacggcggcctacggcatgagttcggtgcttgtgccgccgattgcccaggctctgattggctctgtcggcattaccgcaacgttcattattctcgggacggtctgtggggctgccatcatggccgggggctttgtctgcaggcagtgtccgcctgattttgtgccgcacggcatggtgaagaaggcgaaagcagaggcgaaggggctcacctggcgcgaaatgctgagaagtccggtcttttaccccatgatcgcgctgctgctcagcggggcctttgcggggatgatgattatttcccaggcggcctcgatcgcgcgccatgaaatcgggatgacagccgcggccgtagcggtatcggtttctgtcattgcgcttttcaatatggcgggccgccttgtggcgggaattctttcggatcatctcgggcgtatcacggtgctcgccggagcgctctgcctgtcgctcgccgggctctttacgctgatgaccgcggggatgggggatttcgcgcagtactacctcggctgtgtcctcgtggggctctcctttggcgcctttatggcgatttacccgggctttacggcggaacgttttggcaccgcgcattcaagtgtcaactacggaatcatgttctgcggcttcgccgctgctggatttggcggtcccgcgctgatgcgctggatgcagcacaccggctttgtcttttcagactgctgtatggtcggcgcagcgttctgtcttttgggacttgttttcgcggcagtctgccgcaggatggtgaagtagggcacagagagaagtcagaatccagagtgcattttggggcggctgccgatgaagccgcccctctttttttcttatggaatccctgtaaatcgggcgtttccgttgagatcgttactgtcagcgggcttttcctgcgtttttgcagcagaggtaaattggtcccggagattttgtttcactggagcttgactttttatcagaatggtagctataatgcgccgttaacctgtatccgagattctcgttgaacagttcccccgttcagcactcggaccacggcagatgccttgccggagggacttttttttttgctcagaggttaaccatgcgactccttcagagagcactcacgttcgatgacgttcttctcgttccggcgtactccaatgtgcttcccagacagacttccctgaaaaccaagctgacgcgcgaaatcacgctcaacattccgctcgtttcggcagccatggatacggttactgaatcccgtctcgctattgctctcgctgaacagggtggcatcggcattattcacaagaatatgtccgctcaggcccaggcagctgaagtccgcaaggtgaagcgtttcgaagccggtatcgtgaatgatccgatcaccgtccgtcctgatatgacggttgctgacgtgcttcgtctctcccgtatgcgccgcatctccggtttcccggttgtcgctgaagaccgcacggttctcggcatggtgacgaaccgcgacgtccgcttcgaagaccgcaaggatgtgccggtttccgccgtcatgaccccccgcgaacgcctcgtcgttgtgaagaagggcgcctccctcgaagaagccaaggctctgatgcaccagcatcgtctcgagcgcgttctggtcgttgacgatcagttcaagctcgccggcctgatgacggtccgcgatatcgtcaaggctgctgaatttccgaacgccgctcacgacgcctccggcaagctcctctgcggcgctgccgtttccgtcggtgccggcactgaagagcgtatcgaagcgctggttgaagccggcgttgacgtcctctgcgttgataccgctcacggccactcccagggcgtgctggaccgcgtcaactgggttaagaagaactacccgaacgttcaggtgatcggcggcaacatcgctaccggtgacgctgccaaggctctcgtcgacaacggcgctgacgctgtcaaggtcggtatcggcccgggctccatctgcacgacgcgtatcgttgccggtgttggcgtcccgcagattaccgctgtttccaatgtggcagaagctctcgaaggcaccggcgttccgctgatcgctgacggcggcatccgcttctccggtgatatcgccaaggctctcgctgccggcgcttactccgtgatgatgggttccatgttcgccggtactgatgaagctccgggcgaagtgatcctctcccagggccgcaccttcaagtcttaccgcggcatgggttccctcggcgctatgagccacggctccgctgaccgctacttccaggacaacaaccagggcaacatctccaagttcgttccggaaggcattgaaggcatggttccctacaagggaccggtcggcgccatcatttatcagctgatgggcggtctgcattcctccatgggctactgtggctgcccgacgatcgacgatatgcgccacaaggccgctttcgttgagatcacggctgccggtatgcgcgagtctcacgtccatgacgttcagatcacgaaggaagctccgaactatcaccagcagtgataattcgatctgaattgatgaattaaaatcagcggatacgttggaaagcggcagtgcacctgctggccaatgtatccgctttgcttttcttctaacttgaaagagtgttcccccatgaatcatgatcgcattctgattctcgacttcggcagccaggtcacccagctgatcgcccgccgtgtccgagaagcgcatgtgtattgcgaagtccatccgaatgacgtctctgaagacttcatccgtgaatttgcgccgaagggcattattctctccggctcctatatgagcgcctatgaggagtcgaatgatcaggcaagccccgcggtgttcagcgccggtgttccggttctcggcatctgctacggcatgcagacgatggcgactcagctcggcggcaaggttgagcctggtacgaagcgtgaattcggctacgctgaggtccgcgcccataaccacacgaagctgctggaaggcattgaagacttcaagggcccgaacggtgaaggtttcctgaaggtctggatgagccacggtgaccgtgtttccgagcttcccccgggctttgttgtgatggcgtccactccctcctgcccgatcgcggcaatggcggacgaaacccgtcacttctacggcgttcagttccacccggaagtgacccacacggaaaagggccgcgagattctgcagcgctttgtgctcggtatctgcaactgcaatccggactgggaaatgggtaacttcgcgaacgaagcgattgaaagcatccgtgctcaggtgggttccgatgaagtcattctcggcctttcgggcggcgtggattcttccgttaccgcggttctgattcataaggcaatcggtaagcagctcacctgcgtgtttgttgacaacggtcttctccgactgaacgagcgtcagcaggttcaggaaatgtttgagaagaacctcggcatgaagcttgtcgtggtgaacgctgaagagcgcttcctgaatgccctgaagggggttgcggatcctgagcagaagcgcaagatcatcggccgtgaatttgttgcctgcttccaggaagaggctaagaaactgaccggcgcgaagtggcttgcccagggcacgatttatcctgacgtgattgaatccgccgccgcgaagacgaagaaagcgaaggtgatcaagtctcaccacaacgtcggcggtctgccccccgatatgcacctgaagctgctggagccgctccgcggactcttcaaggatgaagtgcgtgaactcggtattaagctgggacttccccgcgagatggtgttccgtcatccgttccccggcccgggtctgggtgtccgaatccttggcgaagtgaagaaggaatacgcggatctgctccgcgcagctgacgcgatcttcattgaagaactgcataacgccggctggtacgacaaggtctcccaggccttcacggttttcctcccggtgcgctctgtgggcgtcatgggcgacggccgtacttacgactgggttgtgtcgctgcgctgcgtcgaaacgacggacttcatgacggccaagtggtcccacctgccctatgagctgctcggcaaggtgtccaaccgcattatcaatgaagtgaagggcatcaaccgtgtctgctatgacgtctccggaaagccgccagcgacgattgagtgggaataatcccgttcaaactgctgatctgaattgaaaagcgaaagcctggggaatgacagatttccccaggctttttatttactgcaatggccaactgaccgctcggacgtcccagagcagaattcgatcaaaataaaaaattgcgtcaatcgcataagcctgacactcagagcagagaggcatggattatattaaaagttattatttttatataataagtgctcaggttgtttttccggaggctctatggacttcgaaacggctgatcggatttccagcacctttggtttatatgcgggaattttggcttttctgattcccgttgcgctctggtggtgttcacgtcacttttggcacccggagagccgggcttcctatgcattgcagtttgctctgtggccagtgatattcctcagttatcagctcgggggtcccattgtccggatactgatgggactgccgacgccgccatttgcgcagacactgggtgagaaaataatgggcattttcggggcattcgcagtcctgggtcccgtttttttcctgatcggatatgccgtgagcaaaaagaaattccctgaaagaaagaattctgtggaatcctcttcggaaaacaaaacagaaactaagaaataagactatgactgaaatttatcaatatccggtaaaacccaccccgaatggtgacctaaattcccgctctgttagctgtatt

SEQ ID NO: 1310 - DNA, 10641 bp, Unknown
  gut microbiota DNA sequence
cctgttcggttcataaaaaactgactcccactttttttaggtgtgtcctaaaaatgggagtcagttcactgccctcctgtgtgcaaaggggatcctctttttgaacagactgcgcgcggaaccgcgatcagtcgttatacatcttctgcttcagttcacggcgctgctgggcttcaagcgacagcgtggcggtaggacgcgcgagaaggcgcgcgacaccgatcggttcacccgtctcagcgcaccagccgtactctccttcgtcgatgcgcttgatggctgcctgaactttcttcagaagcttgcgctcgcgatcacgggtacgaagctccagagcgtgctcctcttcaatcgtggcccggtcgagcggatcgggagcaagctgcgtctggcgaagcgtctccgtcgtctgacccgcattgtggcgcagctgggcctccattgcttcaagacgggcacggaagaaagccagctgatcttcgttcatgtactcgtcctcagacatgctgagaagctctttttcggtgatgatttttttcttggtcgccattttgtgtctaactcactgtttaaaaaaacagacttttgcagaggaggagaaccctgttccttcagcctgagaaggaatggggaaaccgtattaaaccacgatttaaaaaaagcggcaggaaaaatccgccgcttatccaatttttagtattttttcctagcagaggcaggcatcgagacccttgatcagggcttccttcggcagatttctgccaataaagacgatacgggacttggggctgccctcccagggaccgaaagcctgagtaccggccgtcatgtgaacaccctgcagcacgatttcgcggtccgcaccctgaaggtaaaggatgcccttgtagcgaagcagatcctggccgtaaacgctcagcagcgacatgaagtaatgctcaaagcgctgcggatcaaacgggcggtcggattcgtagaggaaagagctgatttcgtcgctgtgatgatgcttatgcgcgcccgtgaggaaatccggggccacattcagcacatcgctgatattgaagccctggatatcaatcaccacgtcaaccgggcagtcgcccatattcacgcggcgcatatcagcatgcggattcatggcgcggagacgctcttcaagcgccttcgccttttcctcatcgacgaggtccgtcttgctgacaaggatgcggtcagcgaaaccgacctgcgcctgggcttcaggctgctgatctagcgtcgcgtcgccattcatcgcgtcaaccaccgtcaccacgccatccagacggaagaaagctgccacgacatcgtccatgaagaacgtctgggcaaccggacccggatccgcaagacccgtcgtctcaatcacaacccagtcgaacttggattcgcccttttcgcgctgaatccggagcttggtcagaatccgggagaggtcgccgcgaatcgtgcagcagatgcacccattattcatggacacaatctgctcggcttcgctgtgaaccagaaggtcatcatcgataccggcctcaccgtactcattctcaatcacggcgatgcggtgatgatgatcttctttcagaatccggtttaaaagcgtcgtctttcccgcgccgaggaaacccgtcacgatagttacggggatcagcgtgtcagctattgattctgccatcctttctcttccttacttaataagttctcacggccttacgagcaggtggagtcccttcaggtactccccttccggataggtcacgagcagcggatgatccgcgccggctccgagccggccaacaatccaggcgttcacaccggcgtcaaacaccgcgccggcaacgatcttctggaaaagatccgcatccactgcgcccgaacaggaaaatgtcagcagatgaccgcctgtccgaagaagcttgagaccgttcagactgatgtccttataggctctcgcagcccgttcgacatgataacgagtcgatgcaaacttgggaggatcgagaataatgaggtcaaacttctcgccgcggtctctcgctttcctaagatattcaaagacatcggcttcaacccactcgcatttgtcctgcgggaagccattccgctcagtgttctcgcgggccagcgcgagcgcctcacccgacgagtccacggaaaccacgctgtcagccccgcccgccatcagggcaagcgagaatccgcccgtgtagcagaagcagttgagcgcccgcatgccgcggccgtttttctcacggaactcacgggcaaggcgctgaaccgtatagcggctgtcacgctgatcaatatagaaaccggtcttatgcccgatgcggacatcgaccccgtagcggacaccgtcctccacgatctcaatttccttcggaggctcctcaccgctgatcaggccggaacgcttcggaagaccttcacgctcacgaactgaggcgtccgaacgctcgaatacccccttcgctccggtgaccttcatcagcaggcgggcaatcagctcgcggttctgctccaagccggcggagagaatctcgcacaccagatagtcaccgtactgatcaacgatcagaccgggaagcctgtcagcctcaccgaacacaagacgcagagcggtcgaccgggagcgaagatcctcacgggccgccacggcctcgcggagccgggcctcgaaccacgcctcattgatcacgtcatccttatcgaatgaccagcatcgggctcggatcgccgacttcggtgaccacgaggcccacgcgaggaaccggctgtcgtgacccacgatccggacgagatcccccatgcccggctttccattcacccgggcaatggccttctcatagacccaggggtggcgcttgaggagagacttttctctgcccttcaccagaacgacttcaataggctgctgttgcatggaggtttcctatactcactgactgttagatagcggggacgtcaatttcgcccgtgaaaacggttgccgcagggccgatcaggaagacggagccggtcggcgtgccatcccactcaatacgcaggcggccgccgtgcatctgaagctcgacctcggagtcgaagagtccgcggcgcataccggcaacggcagccgcgcaggcgcccgtaccgcaggcaagggtctcgcccgcgccgcgttcccagactcggagcttgccttccgtgcggctgacagcctgcaggaagcccacattcacgcgttccgggaaagccggatgattttcaatcgcggggcccacagtgctcaccggagcctgttcaacgtctcccaccaccatgacggcgtgggggttgcccatggagaccacggacacccagttgttgtagcccgcagccttcacttcccagagcgtgtcagaagcccgcgagaggtgagagaggcccgtcgtattcagcggaatctcttccggacggaatctcggcgcacccatatcgaccttcacgcggccgtcatcctgcagttccggctgaatgatgcccttcatcgtttcaacacggatcttcttcttcgtggtcagaccgcggtcatagacgtagcgcgcgaagcagcgggcaccgttgccgcacatctccacttcgccgccgtcctgattgaagatccgataacggaaatccgtatccggggtccgcgccttttcaacgatcaggatctgatcagcgccgataccgagatgacggtcggcgatgaatcggagctggttcgtcgtcatggtgaacggagcttccgtgctgtcgatcacgatgaagtcgttgccggctccatgcatcttggtaaattgcagcttcatttttcctgctcctgtcagataggtctcaaatcaatagatggaaggttcgccttcaggccgtgttttgaatcgccggtgcgtccacagatactggtccgggaacttgaggatccactgttccagctcgtgattgatacgggctgtatcggcctcgtagtctcctgtcgggaaaccttcaagcctgtaaatatgcacacagtaaccctctttcgtcatctccgtgatgcacatggcgacgtgagctttcgtcagccgggcaaggcgcgacaccatcggcagagtggcggcgggtacaccgaaaaacggcacgaagatcgaattctgcctgccgtggtccatatccggcaaatagtagaagggaagaccgtcacgcatagcgcggatgacggggcgaagatcaaagtgcccggtcttcgcgatcagaatcggattgcagaagcgcagtctcccgtcaagctccgccttgtcccaggctttgtttgactgcgtctgataaagcgatacgccgcgcacatacgtgttgaaggtaatgccggccgcatccagcccaaggaagtgaggcgacacaacgatcagcggacggttatccgtgtccgtcacaagatcaagcccctcaaacttcaccatcgcctggagctcttccttcgtccccttccagagcaccgcgtgatccagagccgcgcggcccatattgcggtaattctgcttcgcaatccgcacccgcttttcctcagtccagtcggggaagcagagccgcagattcgtcagcgccacatggcggcgtttcggaattgcccaccagagaatccaggcaatcaccgcgccgaaccgctcgcgggtccggatcgatgtgccgtagaagcaacccaggacccagatccagaaccgggccatcacttcattcactttcttcattccttcgcctgctcctccggcggattcacgcccgccggacacttgtagcggttataggcccagagatactgctccggaagcaggcggatcacgcgttcgagatgctgattcatcgtcaccgcgtcatccttcatattcccggtcagcggctcattccagagccttgcgtcaatttcccagccccggctgctgatccggcatccccaggcgacaatcttcacggcatcaaactgatgggcgagccgcagcggcagcgtcatcgtgtaggccgggcgtccgaagaagttcacccacactccctcaccctttgacggcacctgatccggcagcacaccgaccacctgtccgccgcggaaggatgacacgagcatccgcacccccttcagcgtcgcgggagccggccggataccaggggtctcgcggccatgcagcaccacgttctgcagaatggatttcttcggaatccggtagagaattgccatatagcggtccgttcccgcgaggaaccgctcggcgagccacacgggcgccacttcaaagctgccgatatgaggggtgataaaaagaatggggcggcctgaggcgagcgcgtctccgatgatccgctccgcctccgccgtggctgacacgtgcttcatgagagccttgcggggcttgccccagatccacgcggtttccgccgcctgctttccaagctcacggctgacagcaggggaataggcatcggaatcgtaaccagcctgcgcgagattctccgccattttccttctgtatttagccgagcagcgccagaccaatgcgccaagcgccccgccaaccgggtgcactatccaaagcgggatcatggatagaagccgaaataacagccgcatataaataaccattccggcgcccgacaggcggccgattgctcctcagtaacagcaagacttgaaagtgtcttatcttaagcctgcccgaaagtcaaaacaggtatattatttcaggtcttcgccgagttaacaggacaacttgcggggcgaagactgggacaacgtcccatatttattcaatttccgctaaagcgtcggtcgcatgccctctgatttgattttgcgaaggcgctgtattccaaatttgggagcattcgatgggcagcaattatctttttacgtctgaatctgtgagtgaaggccatccggacaaggtggcggaccagatctcggacgccgttctcgatgccattctcgagcaggatccctacggtcgcgtcgctgcagaaaccctctgcgccacgggactcgtcgtgctcgctggcgaaatcaccacctccgctcaggtcgattacatcggcgttacccgcgacaccctccgtcagattggctatgacaataccgaatacggcattgatcaccgcggctgttccgttctcgttggctacgacaagcagtcggccgacatcaagcagggtgttgacaaggcttctgacgacccgctcgaaaccggtgccggcgaccagggtctgatgttcggctacgcgtgcgacgaaaccgacacgctgatgcccgccccgatctactacgcacaccgcctgatgcagcagcagtccattctccgcaagaacggcacgctgcccttcctccgtccggacgcgaagagccagctcaccgtgcgctatgtggatggacgtccgcagtctgtggacaccgttgtgctttccacgcagcattcccctgaaatgagcgacggcgacaagatgaagcccgagttcacggaagccgtgatcgaaagcatcatcaagccggtgcttccggctgaatggatcactccggaaaccaagttcctgatcaacccgaccggccgcttcgtggtcggcggtcctcagggcgacacgggtctcaccggccgcaagatcatcgtcgacacctacggcggctcctgcccgcacggcggcggcgcgttctccggcaaggacccgacgaaggttgaccgttccgccgcgtacgcctgccgctatgtggcgaagaacatcgtcgctgccggccttgcccgccgctgccaggttcaggtggcctacgctatcggcgttgcccgtccgatgaacatcacggttcacaccttcggcaccggcacgattccggatgaagagatctcccgcatcgtcggtgaatccttcgatctgcgcccgaacggcatcatccgcatgctcgatctccgccgcccgatctaccgcaagacggcctgctacggtcacttcggccgtgaagagccggaattcacgtgggaaaagaccgacaaggttgagatcctgaagtccaaggccggtctgtaaccggagcggctccttgccgctaaacttaaagccttaaaccagataaggccggcactcgttggccggccttgtttttttactgttatcggtttgtacggaaaatcatttgagatgaaaaaacgcgttctcacaggcatcaacactaccggtaccctgcatctgggcaactacgtcggggcccttcgcccctccattcagcagagccggtctgacgaggtggaaagcttctactttctggctgacctccacgctctcatcaagtgtcaggatcccgtgcgcctccagcgctcgagactccagattgccaccacgtggcttgccgcaggcctcgatcccgaacacgttactttctatcgccagagtgatattcaggagattccgctcctcaactggctgctggactgctcctgctccaagggcctgatgaaccgcgctcacgcctacaaggctgtgctcgaagcgagcgtcgagagcggtgaggatccggatgcccgcgtgtcgatgggcctcttctgctacccgatcctgatggcggcggacattctgatgttcaacgcggatctcgtgccggtcggcaaggatcaggcgcagcacctggaaatggcgcgcgacatcgccacccggttcaataatctctacgcgccgaaggatcatcccttcttccgcatgccctacgcgctgattgatgagaagcaggagcttctccccggcaccgacggccgcaagatgagcaagagctacgacaacgtgatcccgctctttgaaggcggctcctccgcgctctccgacatgatcagccgcatcgtgacggacgacaagaagccgggcgaagcgaaggatccggattccacttcgcttacgcagctcttcaaggcattctcgactgacgaagagtacgcccagttccgcgccgaactcacagacggtctcggctggggtgaggcgaagaagaagctcttcaatcagattgaggccgagatcggaccgatgcgtccgaagtacgaggagtacatcaacgagccgcagaagcttgaggagattctccttgccggcgctgaaaaagcccggaagatttccgctccgttcctcgaagaactccgcaacgcggtcggtctccgtccgttcacggccttcaaggggtccgcgcataacgctccggtgaaggaaacgaagaaaaagtccgctgccgcttccttcaagcagtaccggaacccggacggaacgttcggcttcaagttcacggacgccgcgggcactgtgcttctcgaaagcaccggctgggcgagcggcgctgaggccggccgggcaatcggtcagctgaagaaaaacggcattgcggctcttgcggctctgccccttgtagagcgcgccgccggcatcaccgatcagcagcttgctgacgctttcgcatctctcgcttaacgcatcacataccgcccggaaggaatccgattccttccgggatttcgtattccctttacctgacaggcattctgatatgaaaacctacagccacgactttgaagtcgccgacatggggctcctcgagtggggccgcaatgagatccgcatcgcggaaaccgaaatgcccggcctgatggccatccgtgatgagtacaaagacgaggcccctctgaagggcgcccgtatctccggctctctccacatgaccattcagaccgcggtgctgatcgagacgctgctcgcgctcggcgccgaagtccgctgggcttcctgcaatattttctcaacgcaggatcacgcggccgccgcgatcgctgacgacggcgtttctgtcttcgcgaagaagggtgagacgcttgatgagtactgggaatacacccaccgcattttcgagtggccggacggcggcttctccaacatgattctggatgacggcggcgacgcgacgctgctgcttcatcttggctgccgcgcggaaaaggatatttcggttctcgataagccgacgagcgacgaggaaacggctctcttcgcagcgatccgccgccacctggccgctgaccccgcctggtactcgacccgcgcgaaacatatccgcggcgtttccgaggaaacgacgaccggcgtccaccgcctctatcacctcgcgaaggagggcaagctgctcttcccggcgatgaatgtgaatgactccgtcacgaagagcaagttcgataacacctacggctgccgcgaatcgctggtcgacggcatcaagcgcgccacggacgtcatgattgccggcaagatcgctgtggtcgtcggctatggtgacgtgggcaagggctgcgctcaggcgctccgtgcgcttgccgctcaggtctgggtggtggaagttgacccgatctgcgccctgcaggccgccatggaaggctatcgggtagtgacgatggactgggctgccgataaggctgacatctttgtcaccgccacgggcaactaccacgtgatcacgcatgaccagatggtccggatgaagaacgaagcgatcgtctgcaatatcggtcacttcgacgccgaaatcgatgttgcctcgatgcgccagtatcagtggaacaacatcaagccccaggtggatgaaatcctgctgccctccggcaaccggatcattctgctcgcggaaggccgtctcgtgaatctcgggtgcgccaccggtcacccgagctatgtgatgtccagctcattcgcgaaccagacgctcgcccagatcgagctctatacccgcacggagcactatccggtcggcgtttacacgctgccgaagatcctggacgagaaggtggcgcgtctgcagctgaagcgcttcaacgcccagctctccacgctgacccaggaacaggctgactacatcggggttccggtgaccggcccgttcaagggtgaaaactaccgttactgattctcagagcttcgcggccggacggacatcccgttcggttgcgatccactgaagcagaatgtcgtgaggctccgcttcgagcctccccgtcgcgttgcaggcctcataggacaccgcgaccgtgacaggcgcgggctttatcgtcggcagcgtccggtcgaaccagcccgcaccgtaacccagccggcagccgatatcagagaatccgatacagggagccagcagcacctgcggcacaaccggaatcttctccttcggaaccatgatgtggaaaccgctttccaccatctcgactcccggagtccactggtagtaccccatctttcccttcatcacaaccggaagagcaagcatgcggccgggcttctctgactgccaggcgcccagcgcctccatcagatccggctcactctgaatcgggtagtagagacccactgaggaaaactgcggattcgcttcaagccatcccacaatgttccgtgccagttctttcgccgcctccgggcgagtggccgcaatttcctgacgcactgcgagcagctcttttctcagcagtttcttatccattggtacgctcctcctctaaagattccggcgcctatcggggttagccgccgtcttcgtccggcgccgatggttaaacttattctatggtggtgaattatcaaatcaagtgcaaagtt

SEQ ID NO: 1311 - DNA, 6728 bp, Unknown
  gut microbiota DNA sequence
atcaatccctttctatcgccccttaggatttttatttaacaagtcctaaatttggggagcagttcattcccggtgaatggaatctgcctctttcgctattcagacgcccttatataaagagggcgttttttattaaagcgagatgccgttcgactgttcgcccttcgcgggagtgccgagcttatccttgaagaaccgcacgatacggtcgatcaccggctgctggaaccagggaagatcgccatgcttcgcgttcttcacgagaacgaacttcacgtcgtcgttcttcgccttcagcgcggtgtagagctttgagctctgaagcggggagacgagaggatcaatcacgccgtgcatcaggaggaacgggggttccttgcccttcacgtggcgaatcgcgctcgcgtaatccgcggccttcggatccgagaggatcgagccgccaggagaagtgccgaaggagaagccgttcacgagaatcgcttcggtcgcggacggcgacttgtggctctcaaccaccttgggcgagaagccttcaccgatatccttgaggtccgagatgccgtacatcgaaacgacggcctgaacgtcagaggactgatcgagccagtcacccttatcaaaggccttttcgccgttcgtcgtgccgagcatatcaacgagatagccgcccgccgagtcgccgatcacgccgatgtggttcgggtcaatgccgaactccttcgcgtgggcgcgaaggaaccggaccgctgccttgccgtcattcacgagacccgggaacttcgtcgggatcggacggtattccgcggccgcgacaacgaacccggcccgggcgagggcgtaacgcacctcagtgaacttctcatacgctgccgaagtgaagccgccgcccgggaagtagacgatcgcgggcttcttcgcgttgttacgcgggatcatcagcgtcatgcggagaccctgaacgttacggggggtcttcacctggctgtaaatcacgcccgacatcgtatcgatgatgccgtccttcacgggaaccgtaatgatttcggcgccctgggttttaacgacttcagaggccgcgtcagcccacgcggtctgtaccgtcatcgcgagcgcgatggcgatcggcagaatgattttcttcatacttcggtaatgttttgtggttagttgatgaatagacggctaactattctaagcataaagggatagggtccacccctgagccacgctttgcaacgcctctttacgtaaactttcagtaagctttgatggaataccgaggcgcgtgagagggaggtgagccagatgacgactgaatttgagcggatgcggcagggcgaggtttatgacttcatggatcctgagatccacgcgagtctcacgcacgcgcggaaggcgtgcgccgcgttccggaagctcgacacgctgcacagcgcggagtaccgcgcggcgctcctcgacctgatccccgggtgccccgagagctcgatggtgagcccgccgttcctctgtgaccacgggaacgggatccggatgggagagaacgtcttcgtgaattacggctgcgtgttcctcgatcaggcgccgatcacgctgggtgactgggtgaagatcggcccgaactgtcagctttacaccgtgaatcaccccgtgaactatctcgaacgccggaagacgattgagaaggcgcgcccgatcacgatcggtgaggatacgtggctcgggggcggcgtgatcgtgtgccccggggtcacgatcgggaaacgctgcatcatcgcggcgggctctgtcgtgactcgggacattccggatgactcactcgccgccgggaaccccgcggtcgtgaagaaaacgataccgcgggagtaatctcttcttcaccttctatatagagaacgataaggaacagaaagcatgaagcgcttcgcaatcgcggctgccctcactctgacactcttaggcacggggaacgcggtcctcgctgcccccgtggtgccgctgcagacggacgaactcgaatccgggaagttcgctgacgcgaatggctgggatccccgctgggtggatcgccagaacgggttctaccggatgatcaaggcgggaacgggtgacaccgcgtacgtgatggaaacggtgtttacgggcgggaagctccccgcgaacccggacgccaaatccgccgtgaacacgttccggattcagtgcggggcgaggaagatcgcctataccggtgtcacgttctacgcggaccgttacgggaaaggcgcggcgctcgcgtccaaaacctaccctgaatcctgggttggcgcggatccgggttctgtcgcctctgtgctgatcgacctgaaatgctcgaagtaaaggggaacccgcgtccctgtttatcggtgtttcacggcgatgcctaaaaattaggcagtgtgccaaagttgctgttttataaggaaaagttattgactcactcaaaccttttccaccacaactgtggatagccataaaaaaatgtttcacggatgaccggaggattgtcgcgattctccggtttttctttatgaatcaaggctctgacggttttttgttactgcggtcagatgagaatcattctattctcttgaaaagacagccttttttagggcgtcagagaatggacccctgaggcgccttttgtccttgaaaatccagacaaaacagaggtttaccctgtttttcaatgggatatcttaagcgcggatgaagccgggatatcttttgttacacgggccgtttgtttgttgcaaatccgcataactttttttcagggtcggtcggtatagttctccttaaccgaaaggaatgaaggaattggaacccccttcattctgagccccctccgtctctgggcacaggtttgcagttggatcaagacgactctcctttgaatgacaagtagttgattttcggcagatttttttgaaatctgccgattttttttgcctgcgcgagggggtgaaataagtgccgccgcgctgaaaaatttccgcttccagctcggagtttatacgcgttccccgcggtaacgaatccagggttcagaagagcccgttacgcgcgatgccagccgtaaaagcggccgtgctcagccgtgatttcggcgtgatcgtcttcggtgaggagaatcatgttgtcaggggtatcggcgccgccctcagatagaggcacgatgtggtgaacctcgtacccgtccgggacgccgtcgtagccgttctcttcgaggaacgcgtcgcgcgaagcgaggctccgcgtgatgtcctcgctctcaatgtgatcggtatcctcgagttcgcccgccttcgctaaatccgataggtcgccgctgtcgccatcaaacatgccgtcttcggtcgggatcgaagagaggtcagaagcgaggaggccgccagacgtttcattcccaccgtcaaaccccaggtcatccgggaggactgaagagacgagtgagccgcccgccgcgaccacgagacccgctgtcgcgagacttgtcagacgctcggtattctcgtccgtcaagaacgggcggtcagaatccatggcacaggcgccgagttcgtcgagaagcgtcgcggcggttttgacctgggattcaatgccggaaacggctccggaaatccggcgttcggcgacgttttcaatgggcgttaaatcgagccgggtgagaccggacacgatttcctgcgcgtctcccaccgcggcagctgccccacggaccgtgttcacggctacgccccctgctactgaaagggtaacccccgcgacttttaccgtggtgtcgagaatatcgtcgaaaagtcccatctgtttctccgcgcgtctttttcgcgcttctgttgtctaacctgataaatacattctatcggccagaacggatgaaatcagcagcggcaatgttgtcatcagaagaacggtgaaggcgaggcctttctcctgatccttcgcttttctgaaggcgacggagttaatggcgatcgccgcgggcctcagtttcttcagacacaaaaccgcctctctttaagttacttgcctctcgtttccgcctttgtaaaagacaaaccaatccttcagaaaaaacgaattgtggtcacggtatctcctccgtaagattaagcgtgacttaagaaagaaccaaaaataacgaattaaatcagcgccatgcctcttatcgggaggagggggaacgattgcccggcgacacgggaaagagccctctcttcagcctgggagaagggtcgcggcgctctgcagcaccttaggagagaacgatgaagagaacgatcgtgatgctcgcgctcggatttctcgcggccgccgccatggcggctggagaatccccggcagccgtccagaatctcgcggaccgccatatcgcgcgcggattgaagtgtgaatcttgccacgcggacgcggcgcaccccgcgccggtcaaaaaagagaagtgtctgtcctgccacggcggaagctacgaaaaacttgccgagcagacagacagcctcgaaatcaatccccacgattcccatctcggaaagatcgaatgcacgaagtgccaccgggggcataagcccgcggtgctcgaatgcgcccgctgccacgatttcagccgcgagctgcatatccggtagcgccgccactgacaaaagccggacctgcggattcgaaaccggcttaccggcgcgctgccgatttttaccttgtcagaaggagagaagaccatgactgctatttccaagcggacatttctgaaattcgcggccgcgggggcggccgcggttcccgcgtcgccgctgctcgcggctgacgccaaggcggaaccgaagactcactgggacaccgagaccgatgtcctcgtgatcggctacggcggagcgggcggtgccgccgcgattacggcgcatgacgccggggcaaaggttctcgtgatcgagaagatgaaggatgggggcggcaatacccgggcgtccggcggcggcttcatcattccgaagaacgcggatgaggcgtaccagtatctcgagaagaccttccttttcgcggataacgaaatggatggggcgctcgtgaggacgttctgcgagcgggcggtgaagctcccggaattctttaagcggatcgcgcccgcgtccaagctccgcgtcacaggtcacgcgaattatccctatctgccgttcgcggagaacatcacgaagtaccgcgtgggaggccatcagccgggcggcatcgagctcttcaaggttctcagaaccgcggtggagacagaccggaagatcccggtctggctcggaagcccggcaaaggaactgatccgcgaggggaacacggtggtcggcgctctcgtcgagcatgacggaaaactcgtccgggtcagggcccggagaggcgtgattctcgcctgcggcggctatgaatacgacccccagtcgcttcagaatttcgcccaggggacgaagatcctcgggctcgggaacccgggaaacacgggtgacggtctccggatggcggcctcaatgggagcgcgtctctggcacatgacctcttactcctgcccgctaggcatcaaggtgccgggatgcaaggcagcggtatttgtcacgatgatgacgccgaactacatcatggtgaatcaggacggaaagcggttctgcaacgaagcgggggtcgatttccatggctttatctatgccgtgaatccgctgaacggggtggagcataagtatccggcgattccctgctacatcgtgatggatgaggcggggcggcttgccgggcggcccacgcacttcaagtatggatacgcggcggggatcgaaggctatcactggagcgaagacagctcggctgaaattaagagcggtgtcgtgaagaaagcggatacgcttgaggagcttgcgaagcagatccacgtgccggcagacgccctgaaagcccaggtcgcgaagtggaacgccgatatccgggcgggccgcgacaccgagttcggtcggaagatcaagaagaccgggaagtccgcgtttattggaaccgatgtgccgacactctcggctcccttgtctgagaagggaccgtattacgcgattgaggcgtaccccgcgcttcttaacactcaggggggaccgaagcgcgacgtgaaggcgcgcgtgatggatgtatttgaccgtccggtcccccgcctctatgtcgcgggagagctcggatccatctggggctcgatctatcagggctcttctaacgtctgcgaggcgctggtttatggccagatcgcgggtgagtccgccgcggccgagaagcctctcagttaagaattcacgccgggcgattcccttttcccaggtctctcctcagccagggaagggggaaccgtccgggagtgaactctttcctactgtcagccgacacacagatacagatcgataaagaagaagtgaatcgataccacgctgaattcaatacagaaaccactcggaaggaagaaagtttctttaaggcctgtgttgcaacagacataattttgttgcaattcgggttctttctttgcggagaagaggaataagcttttcttacgcattgaggaagacacaaaaaatcttctttaacgggtaccgcgcgccgcggtccctgaaagcgaaggcgacatctctccgatggattgtgaattttcccgtgccggtctctcctgagcgccggcatttttttgtcgg

SEQ ID NO: 1312 - DNA, 1694 bp, Unknown
  gut microbiota DNA sequence
attatgaaaaaaatgtaaatgatcaatatgactgggggtcggataattttcgctttggctgattcggaatcagtggatccaggctttctgaagatgaattggctttgaagagacagaaaatcagtatcgacagagtctggcggaatgactcgttttcggcattactaatttggatcattaaagcaggcattaaaaaccccggaggttttcacaccttcggggttcactgttagatttttttgatttgaaatcaggaataggtcgggaagcgatcgttcggtccgtagaccgttttccgataggcgtccggaatatcgcggtgctcaaggagttcattcaccgcttccatgacgtcctcaacccggatttcccgcatgcattcactgatcccgcagcggccgcatccgcgctgttcgcagaagtggcagcgcccggggctgatcacgacgcggctcgcgtcgttttcccacggtctccagcggccagggatcgtcgcgccgaagagaatcacttcaggggtctggagggctgccgccatatgagctggcgcggagtcaaccccaatgaggagcttcgcgtcatcaatcagcgcggcaaaggtcttcatggaaggggtcttgccgatcagaacaatcggcttcgcgactttaagaagcgagacgatcttttcaatcatcgttcgttcttcgtctgacggccccgaggtgatgacaatcttttcaccctggctcgcgaggcgatcaagcatctcggcggtccgttcctcggtccagcacttgaagaagaaccgcgccgctgggtggacgagcacatagcctttgagcccaccgacgagtttcgcggcctcagcgcgggcttcatccgggatcgtgagcttcaggcccggcacttcttcctccggcaccacgacaccgagcgcccgaaggtgatccatgttgaactgcgcgatgtggcgctcacgcgggagcacaaggctcgccatgtgggtgaagctcttgttatagaagttcagccccccgaagtgcttcgggcaggagatgctccgcttcggcttcaggatgcgggcgagccacatgccgcggttatgcggcgtgaggtgaaggagcgtgtcgtagtgattcgctttcagcgtcttcagaagattgatttcggctccgagctgcttcttcacgcccatcttcttccacttctgatcgatcgtgtagacgttatcgagatccgggttcccggtcagcatctcacgcgtgctgtgatacaccagagcgtcgattctcgcgttcgggtacttcttccgcagaaagccgatgagcggcgtggtgaggaggacgtctccaaagtagcggagttccgtaatcagtatgcgttcgagttccacagcggtgcggtccggattgataagaaagagggacggcggggcaggagagatttttggtttcttctctgtccgcagagtcccccgattttaatagatacgggaaagagtgacggcggatatggtaccgcgcttctctcgtcaatagatggtcattgtccaaacaatgagggctagaagattatttatgccatacaccgcaaatgaaaattgtttgtttaataggatcagatcaaggttagaagctctctgatgctgttaatgacatccagataatctattccggccgaatggcgaattatcacttcaagtgcaaagcctg

SEQ ID NO: 1313 - DNA, 6566 bp, Unknown
  gut microbiota DNA sequence
cttcatgatctaggatgaattgagagatattttgatgggttttaagcaatgctttacgggatttattctaatcacctgtgccgccttcattgatttcagggcttctgcgggaggaggtccactctgaaggtgcggtcaggcccctgtcttttagctgactctgctctcaccgtccccggtatgcggcaatgcggttccccgacagcataacaagaaccaaagaaacaaagcccccattactcatgatgattcatgaacaaaaagccgcctacgtctttgctgaaaaatcagttcttcacggcggtaaaaaacaagagccctgaggacaatcttcagggctctcgttttctgacgctgaccagtcaggtcaggtcattgccttcttttactgctgaccgctttcacgctgctgaatcatgctgagagcggccttcatggctcccgccacttccgggctggtacccggatccgagatcagccgtttccaaagctgcttcgtcttctgctgacgggcggcgttgcagtacctgtagccgaccatcatggcgtacggcgcgtcagattcgtgaccatcccgcgcgagcgcgtccccgaaattaaaccaggccgtggcccgattcgggtcgagcgccagagcggcgatcagaacgtaagcggcttcccccgcccgattgtctttcatgagcgcgaaaccgagattctcgaccgcttccacatcggtcggatccgcctttacggcatccgcgaacttatcgaccgcggcgctggcgtctccactatgaacaagcttcagaccttcggcgttcagggcccgcgcggtcttccggtcccccttcggaggaaggggcagctcgcggatctggttcgcgtaggtctgaacgaacggagacccttcactcatgctccccagcatcttcgcgacattccctgacgtctcagcaagcggatacggcgcgatggcctccgcgacatttggggcaagccgcacagtcgcctgctcaggctgcggagccgagtcgctttccgaagacttctcgggttcggacacagcgggagagctcgcggtttcggctagcaccgcggttttcggcgcgcgcgccagagcggacgccgtcacagcgggaccgctccccgtcgtttccaccgctccaggtcccacgatacaggccagacccgcgattgaaagaatcgggagaatgaacttgtcgttcgccgtattcgcgatgaacggcttctcggggagcttgtagctcttagagatttccgcgagctgctcctcggtggcgtgcgacgtatcaatatccgccgcctggacctgcatgagaaacgccttccggagtttcttcgagtaggagctcatcacgaacttccggatcagggcataaagcgcggtaagaaggagcgcggctcccatccagcccgaggcgtgcgcggcgtctttcccgaagagatacgcgattgagaaaaccagggtgagaccaaacgggatccagccatagtaagaagacttctgcttcttatcgtctaccggaagaggatcccccgtgaaccgtgtgggatccacgccgtccacccggaccttatattccttcccttcgtactcaaagacactgagaccgaccgggaggtaaagcgtttccgtctcgtaagactgagagccgctccagtgccagtccttctgctcgtcgcccagcgcgttggccttcacttcagaggccaccagggcggcaacccgatcttcgacatacgtctgataggcttcacgctccgaaagcgcgaatttgtcgttcgggaaccccgtcatgaatttggcgtcatacggcacgagtttcgaccggtcctgatccgcgagaagatcagcgcagttcctgtcgacctcgttccccgcgtagccgaggagactgaaggggccgctcacggtgccgctcgccggacgccagtccgtcacagtgcggctgttgctcccggacccttcgcggcggttatagccaaaggacgccgtccagtttgcgtggaattcgccgtgatagaggtagaacggcacgtacttcagccactgcttcgtgatcgtcgctttctgcacgagatcatccggcgtgaactgaccctgtgtcatatacacacgggtggcgttcgtgagggcatccccctggatctgaagcgggatgatgaggtcggtatcggtaatatcttccggattcacgacctgagtcgggattctcaccgtattcccgcagtacgcgcagaccagcgtctcggtgccgggcttatacgtgagttcggatccgcatttgtcgcagcggatttttaggtcagccacgctgttcaaccaatattaaagtattttttgacgttgaattatctaatcttgtgcaaagttactgattaacgaaaagcatgctccttactggaacactcacagttaactggcacttcttaaatcacttattcaacagttttcagactttatcgggaaaacttctgttctattcgcttgataatggaacagaccgccgcaaactgttttctttatgcattcattgcagcaatctttgtagtatttcttaaaatcagaaatactatcagctgtaaatttccatagccgtttatctaaatggcaaaacggcaaattaaatattcttacaggtatcccacgtaaaaaaagcgccctagtcgcagatactaattgttcttgatagtctaagggagatatccaaagttgatcccaattctttttgacatatcccatttgctccatgcccatgaaactaacttgaaaaacaaaggggatgttgcgatagataaagtgactgagctctgataaatccggtattgtctgctgatggagaactacacgtatttctacgggtatccctgctttaccaaggttaagaataccatccagggtctcatcaaaagcccccttacgctgcactatgtagtcatgtttctctgggttgaaagaatatagaggaacccccacactgaggtttctaagtatcccagatactgattgaacggtcttccagtcgctaaaccgtcgagcattagtcagcatgtgcacgtaacaatccggagctctcgaagctaaatcccgcagtaaaagcggcaggcgatctccgatttgggtgggttctccgcccgttatgctaatttcttcaagtccctcagggagaagagaaacaacctgccgcagttcttcgaagataactgagtcagtttcctgaggaggctgcggacacatcaagcaatggctgttgcacagatctgtgacatataggctgttagttcgtgagtttttcttgaatagaaaaactaaacgacgagtatgaagatcaaccctaaagacatcaccaacatctagatcgtcaaaatcagaaacagaaatatatttccgattgggatctactgtatcgccatctcggtaaatgactaaaccaaaatcggacggggcttcaccatcactgaatatagcgcacagagctctatcttcctctgcatggtttttatctgaaatcttaaagattccatctttttccaatgaagtggacaggtaattcttaacagctggcatgatcaatttccactttatcaaaatctaattcagacaaggaacaatttcttatccaagaccaaaggattctttctgtctcagcatcagcaccgctaagcaagctaatcagataatcgaaaattcccatatttttcttacagaacgaacttgaggctctattgccataagcatcattctgtgtcgcatagtgccttatggggtcagctccgcaatatgggacataggcgcagtcggagcatccagcaagcccttctgcaacgcctactgaagctatgagctgcatagcatcgcctagatatatctcttcataggtgttctcaaacgcattccccaatctaaacatcggatcacccatttcatacagcatacgcgattcatccgatgcataaatatcaccgtcatagttatagaccgtcactgagaaaccattccctgtgggggattgcaaatctacaaaaccgataggccagggggtcagcattttctttaggataagagttgagtagccctctggaaattgctgaatatttttattgacgtgaataatatagtttaggctttttttataaaaatctataaattcctccatggaatatccaatagatttttcagtctttaccgcatagccatacgggttcaaggctctaataaaaatagagcctagattatttttaaggtactcatcaactatttcagtaggatacttaagactgtctttagttgtagtcatcagagcagaaacactggatattcccaacgcttcctgtgcaagatgaatattcttgactacaacgtcatatgcggcagatttattgcttctcgcacggtttaaattgtgaagatctctaggaccatctaaggatgttgaaatctggatgttgtgtgccttacagaaatctattttttcgttatcccaaagagataagtttgtgcacgcaacataggttagatttttatttttagtcttgttaagttcttccgaataaagaactatttccttaagagcgtcaaaatttaaaaaaggttctccgccttgaaattcgaccgtaatatcaggagacggcgaatgcatcatcaattcaacatgttttcttgctgtctcgatgggcatatcgtagcttcgggaactacaggcatcttgtctagacgcttgacagtagacacaagcggaattgcatcgaacagttaaaacaaaaatgtgcagcttggtaaatccttgaataaaggattttttagtccacaattccgaagacagcaaatcttcatgggtcttgttgtcatcagctaaaaagtgccttgcccgaagaatggcatatttcggggacacttttgaaagtcgtttttttgtgaaatccgcaaactcttctttgtccaaaattaaagaatcaccaatgagattggacaaaaaaacttgattacccagtcttttaaaacgaaaaggaaggaagcggtattgaccgtcttccttcctgaagaattcaattggagagaaattattatctgtagtcataattcgtgtttttttagaaacagctcaagagaactatcaagactaaagttcaaaaaagataaaattatctccctggcttcttcatccgttctattctcgacagagatagttagcttttgaacattgggagatactctttcagtccttacctttgcgtagtctgcatacgctcttcgagcttccatcaaagcaagcttgtcatatatatcgttatgcagaacaacgctaaaggtggtcatagctctatagagattatttaggtaaaacttcggaaaaggctcggcgtacaatgctttcccgctcgactttggtctcggcggatacaacttcccggagacaaaagtccaaaacggaattacaaaactcatcagcaagcagctttagttcggcatcagaaagctgagtcttccctctgaaacaaactcggacaagttctttcttctcatctctccatgagagaaaaagataacaccggtcagtaaaccaataagcagctctcttgatcgcggtcagcggatagatctcaacctcgaaatcaataaacgcacaccgtccaagctcgtcttcactaaaagacacaaatggcatagaaaaaccttaataaccccttaccacctactggaagtatggctgctatggctagcgtgagagctatgagagctgtgcgagtagtgatacgagcttcccagaccgaaatcagactgaagcatcagcagcggactctgagaagaaacttgagtgacagcatttccagcatcagacgaagtctgagcagatgcagcagtaggagtaagtgcaatagccgcagccgcgagaacagcagcaaccacatttctcattttacgaccgacgtttgcaacgacagcgcttttacgtacttcgggcaacttcagcatgatgtatttcctgcacggtaaaataagttactgcgaactataacataaagtgcgttttttggcaatttcagtttcaggaattatacaattgctatttctgcaaaataaatagtaattacatgatttatttgaataaatatgtatttaattccatatgagcaaacttaaaaccgcataaaatcctcttcccgtgattcttctggaaataggcgcttgcgtttaagcagtgtttcgtctgattagaaggctgaacaatcttccttcttttgatcgtcgttttaaggggagcaccgcgcagcgaacggccagtcgtttgtacctgatatttgtatcgaccccattgttcacaggcctctttctctaaccaaaatttctttagggagaaagctacgacaatcaagaaaacgaggatcctttaagaactagtcgtacgactaattcttattcgaaaatttccggaatcgaagctaaaaattaagtctcggatgggctttaagatctttctaacgctgatgccgtgagggtgtgtaattttttgtgggcggctcgttcaaggttaatcgatgtagggggtgattcggtcacc

SEQ ID NO: 1314 - DNA, 29199 bp, Unknown
  gut microbiota DNA sequence
caggctttgcacttgaagtgataattcgcctttaaaaatattaacttccccggcattagaaggtatttgtcttgatccaaggctaagcctactgaaacatcctccgtagcgtatgtgtggtagggttaccgaaattgtaaagactttgtttttgttttgatgaatgtcaaagatttacattcggtttctgagacatgatgaatctaacctttcggcaaacccgcgaaaacagggaacggaaaggctactgattctgaaaccattaaggggttctcatcatgtctgaaacaatcgcccagcgacggcatatgctgatgcgctacgggtcgatgattgcggggccgctgctctgcgcactgatttatttttcaatgccatcgacctatagccttgcagatggttcggtcgcgcaattctcttccgcgggccgtgcctgtcttggcgtccttgtctggatggccatctggtggtgctttgaaacagtgcctatcgcagtaacttccatgctgccgatggtgctcttcccgcttttccaggttaccaaggtcagcgccgctatggcgccttacgcctcggataccgtgttcctcttcctcggtgcgttcatgctcgctggcggcgtgatgcgctggggtcttgaccgccgcatcgcgctcgtcgtgatgagtttcgtcggcacgactccgaagcggatggttttcggcctgatgctgaccaccacgttcctctctgccttcatgagcaacacggcaacggctgccatgatggtgccggtcgcgatggctctgatcacgctcgtccactcgacgaaggcggctggcgatcctgacgcggttacgcacgaacgtaatttctcgctctgcattctgcttgctcttgccgacggcgcctcaatcggcggcatggctaccctgatcggttcgccccctaacggcatttacatgcgctttatggagcagacctacggccaggttgtgagcatcgcgagctggatgaaggttggtgttccggttaccctgctgctcttcattgtctccttctttgttcttaccggactgatgttccgcaatatgggcggatcggttcctggcggcaaggaatgggtgcgaaacgaactgcgcagcatgggcaagctctccaccggtgaaaaggctgtgggtctctgcttcctgatcgccgctgtcctctggttctccggcgctcagctccgcggtatcaacatcgacggctggcagcccttcaagtacctcacggatgctgtgatcgccatgggtatgggcattgttcccttcctgatcccggttgaccgcaagggtacgatggctatggactggaagaccgcaaatgaagcgatttcctgggacgtgctgctcctcttcggcggcggtctgtctctcgcctctgctattcagcacacgggcgttgcccagctgatcggtgctcaggttgctgtccttgctggctctccgttcccggtcgtgctcttcggtgtggtcttcatcgtcaccttcgccaccggcgttacctcgaataccgccctggccgcaatgatgatgccgctgctcgccgctgtcgccaatgcccttggccttccgccgcagccgatcctgatgggtactgcccttgcagcttccgcagccttcatcctgccgatttcgacgccgcctaacgcgatcgtcttcggtaccggcaagatcaaaatcgcggatatgttcagagcaggtattctgatcaacttcgtggcaatcttcgtgatcaccggcgtcatgctcctgcttgactgatcggtagaaaactgaagcattaaaggcaaagctccggttcccttaaaaagggaccggagcttttctttgttcatcgcggaacatgcgctacgatacctcaccgcaacttatttccaattaccagaaaaaaagaaatgaacgcaacgaccgataacaagcctcagcactccgccgccacactgacgacggtcctcctttcacgccctgaattctctgcgaagcagtatgtgcagaatctgaaagctgactggggttttgaaatccccgcgaccgacatcggagaggagaacggctctgtcgttacgatgatcggcggcatgatggtttctgtcttcatgaccccggttccggtcgaagacggaaaggctgagcgtgaggcgctcaccaattacctttgggacggcgctgtcacggccgcaaaagagcataaggcctacgttacggtcaccgtgcagcataacaacacggatccggtcgttgccgcgacgctcgcggtgaagctcactgcttccattctccggcaggcggcagccaccgctgttcttacctgcggaaccgtgatgtctccgcgcttctactcggaatccgccgcctccggctgtgaagggcaccgcgttccggtgatgaatctcgtttacttcggcgtctacaccgagaacgaggggcagaccatgaatggctataccttcggtctctcgaaactcgggtgcgaagaagttgaaatcctcaattctctccgggagccgcaggaaatcttcgaaatgctgactaccgccgccacgtacatgctcgactatcacgtcaagctgaagaacggcgatacgatcggcctgaaggaaggagaaaacttcgccatttccgaagggaagggccaggcggtcgacggccagtctcttaagatcgccttttaagagaatttccgcatcatgacggagtccgcggaagaaaagtctgaagactggctttcccaggcgcggactcttcgttcacagaatctctggcacgcgcttcttcggctccctgtaccccattccgctgagtcagatcctgaagtctgtctgcttctcgccgaagccctgctgaaggaccagcaggacgccagcagggatgctgcgctgcgggccctgtcacttcttccctcccctctcagaacgcctgcgcttcacccgcgcgccctgctcctctcgggactcgccagactggccctggatcagtgggatgctgctgagtctgctctttccgaagccaggtcgctgcttcctcccgagagcccagccggaaacgaggcggcaaaggcgctcgaagaaaccgcgagccgcacagtccttccgctcttccgacatccttttgccgcccgtgcggcggaattctgggaagcggccgcggcgggagaagacccatcaccccttctggtccggattttcggcgatcaggggtttcctgcctgggcagaatccgacgcccgcagcatagccttctcctccttcggggtccgggagaccgcgattctgctcgacgttctcatcaaactcgctccggatgatgctgaacgagatctgacactgactctcggaataccggcatccgcggcccctgtccgtctgccatccggcgggcttctgccggtacgggacgcgctctttagggtaaatggattttcagatgacagatgcgcttcagtctccatccactcagaagcactctcggtcattcaggatcccgcagaacgcgccgcggcagcctttatgacagccgcccgggcgatcggagaaatccgtgcaatgcggtgcctcaccgcgtttcctgccataacttctgatgaggaagaggggcgttttctgagcgctcaggcgttcgccgccgccctgagaacccgattctcagaaaaggactgggaaaaactttctgaccccgatcagcttctcgaaagtgagaccagataccgggttccggattcagccagtaatgaaccgcttttttcaggtcttgaggaaggtgcaacccgtttacccggtttttcccgggctttcattcagggatccgcgggcgacacgccgtttctcgcggccggagctgtctgcggtgcgttcctcatctccggcgaggtaacagggaatgagaaaacctgccggaaactccttcgtgaccttggaaacgaaaccgcttttttcgtcccgctcgggttcctctatggaagagcgggcatccggctcgactttctcgcgctagccccagatgtcttcgatatcgcggaagcctatttctcaaggcacttccggagaggcagcgtccggttttcaaggttcaggcaccgaacctcggcttcatcccggtctgaaccctcacagcttcctgttgagatttaccggcagctttagcctgctgcctttttcgcttccttctctaccctcgcgccatcgagaatcaggatcagaatcgcgccgatgatgagcgcgataccggcgattgtcggaagactgctgtcttcacccagaaggaaaataccgaggcaggctgctcccatcggctctgcaagcgaaagcgttgccgacacaaccggcgccgtcgttttcatgccaaggaagaaaagtccgaaaccaagtccccccgcaataccaaacgcggccgagacgagaagcccccggggtgaactccagatccagtcaatcggaaagagcaccagaaccggtgcgagcatcacgctgatcatgcagagtccgatcatgatgcccgcctcaggctgcatatgagaggacacctcaggactcgcgttcatatagataccgtagaccatggcgcccaaaagcggcacgatgacccagccaagattcccggcctcaaagcttttgatattgagaagcccgattccgaccactgcgatcagcgtggcgacgtaccagattggccgcggtgaatgaccgagcacgaatttcgccacaatcgctgacatgatcggtgtcgcgccgacacagaccacggtgcccaccgccacaccaagcttcagcgctccgaaaaagaagaagagctgataaagacacgtgcagcaggcgcagataatgatggcgcgccagggaaggtccgctgtgagcttcgggagttttccggtcgcggtgcaccacagaaaaaggaagaaggccgacgttaccatccggacctcggcaatcacccacggggtcgctccggccggagcgagcgcctgaagcgttcccgtaaccgagaagcagagcgcgcttaagagaataagaatcggaccggcaagacgggactgcatggaaacctcatttcgttcttaaattccgccgggcatttcgccttccggggaagcggaatttttgtgttatctgatgattctaaactccgatcaccgccatatgggacgcagagctggttctccaccggcaggctgctcccaaggtgatgcaaaatagacctatctcttctggagggctctaatttccatgcgcatggtatccgaaaaccgccgtatcttcgatgcagaacgggagcagctgatcgaagcattcaaacgcgatcatgacagcgcaaagcttctttcgtccacaagcgctgccacagaccgcgccgtactccgggagtttgccgcacacaccctgccggacggcatcgcgcttgttgcagtcggcggttacggccgcgcggaaatgttcccctactctgaccttgatcttctcgttctcgtgccgccgggtctgacggaagaggaacgctctccaattcagagctttattacatcgctctgggatctcggtctcaccgtaggcgctaccgaacgaaccgtgaccgagtgcctcgctgccgcaagtgacatcacggtctgcacctctcttctggagtcgcggtttatcggcgggagccgtgcgctcttcgatgaattccagtgtgaattcacgatgcagctggtaccgcgcgactttttccgcgacaagatgctcgaaatgcatcaacggcatgcccgggccggtgactccccctacgcgctcgaacccaacgtcaaagagaatcccgggggtcttcgggacctgcaggtctttatgtgggtcgcgcgggcatccggtttcggaaaatcccttcaggattttgccgctcatggactgatcacaacgaaagaggcggcagagctccgccgcgcgatggtttttctgcagaaactgcgcgtttacctccatatcgaagcccatcggcatgaggaccggctgctctttgatctgcaggccgcggtcgctgcagacctgggtttcaaggacagcgaggcattccgggcttccgaagctctgatgaagagctactaccggaacgcgaagtccgtgattcagctttcactcatccttcttcaggtgctgtctgaaaaatacacggggaaaaacgcggctccgatccgcccgatcgattccgaattcggtctccggggggaagagctggatctgctgcgccgcggggtatttgatcgtcacccggaggcgatgctgcgggcgttttacctgcgggcgacctggcccgggatttcgcgcgaaagcacagcgctccttcgggcgctctggcatacactccgaaaccctgacgtcaatctcgcgccgacagacgaaggccggaagatctttctcgatatcctgaagctggataagggcgtctaccggacactccggaacatgaatacctgggggatcctagatcatattcttcccccctgggcccggattgacgggcagatgcagcatgacctattccacgtgtacacggttgatcagcatacgattcaggtgatccgcgggctcaggcacctggtgtacgccgaacacgcgcatgagtttccgcttctttcgcagctgatggcggagctccccgacacctggcgtctgatcgtcgcggcgctctttcacgatatcggcaaaggccgcggcggggatcattcgaaaatcggtgaggaggaagtgcgggaattctgccgcagttacggcattaccccggaggacaccgagtttattgccttccttgtccgcgaccatctcactatgagtcatgtagcccagaaagaagatatctcggaccccgcggtgctgcagcggtttgctgaccgcgtggggacttccgaccggctgaaggcactctatctgctgaccgtttcggatatccgcgcaactggtccaaaggtctggaataactggaagggacagcttcttgagcggctctactttcacgcggccgcccttctcggcggtgccgccccgacccgcagttccattctggaaatgaggaaaagcaccgcgcttgatatcgcgatggcgtcgggtctcacggaagaagactgcacgaagctctgggaaaagctggatgtcgcctatttcctccggcataccccggaagatattgcctggcacgcgactgagctctgccgctcaaacggagaattcccgcttgtccgtgtccggatgacaccgcatcggatgtatgaagtgctggtctgcgcggatgatgaaaaggggctcttcctgaaactcgtgtcagcccttcagaagtcgagcctctcggttcttgatgcccggattcacacaacgcgtgacggcaaggctctggataccttcctcgcgatggacgccgggaaacggccggagccgcaggaagtttttgaaatcgcgtcctcaaatatcctagactccctttcagggcggcgggcgctgccgccggtacgccttggaccgctctcccgccgctccaagcacttcccgatccgtcctcaggtgctgatcgaaccggatgcgagcggcaccacgtacctgctgacgctctcctgcaacgacagactcggtctcctctacgccatctcaagcgttctctcccgtttcggcgtgaaccttcagaccgccaagatttcgacgctgggcgagcgggtggaggatatcttccagatttcgggcgacattcttgcggactcgaatgtgtgccttaagatagcagctgaactgattgaaacgattgcgcctgcggaaaagtctgccggtgcttcccgcattacaaaaaggtgactcaacccatggcaagcgccaaccctctcaacctcttcgcagcccagagtctcgaccgggcagcccctgaactggcttccctctttcaggaagaaaccggcacggaagtcattgtcaaactcggacactcaggctttctccgtactgaaatcgaggggaaccttccctgcgatatcttctgctccgctgataccggacatccgaaagccctgctcaccgcgctgaaggccacaaagggctttgtctacgcccggaaccggctggttgtcgtctccagagaggagcgtcggtttatgcggagcacctggctctcgctgcttacggatccctcgatcacaatcggcatcagcacgccgaatgtttcacccgaaggcgactgggccaaggtcctctttaaaaacgttgccaaggtctacaggagtgaacctggcgcctccatcatcagccagcacgcgatccctctggtcggcgggaaccatacggcagaagatctgcggggggaaaccgccgcaggcttcatgctgcggcacggagtggacactgccgtggtctacgcaagcgacactgaccggatgaaaaaggaaggacttgtgatttatgaaatcccggacgaagtgatgcctgagattctcttcggggcgtgccatccgagatcagggaaatgtcccacgaagaattgcgacgcattcgcggagtttttgctttcagacaaagctcaggcagttttccgtaaattcgggttccttccccctaccgaaaaatccgtgaaactctagaataccgccctcaaggaattcttttttatatcagacacaaacatgaaccgcacgacgcttctcaactgggttcttccgattgctattcttctcggagccgcggctccgcacagccacgccgcaacgctgaccgggcaggttgtgaaggtggcggacggcgacaccgtgaccgttctcgcgcagaatggcacccgttaccgcgtgaggttccttggaatcgacgcgccggaaaagaatcaggcgttcggtcaggactcacgtcagaacctcgaccgtctggtgtaccggaagcaggtcacggtcgactataacggcaacgaccgctatggccggatcgtaggcaaagtgctgctcgatgggaagaacatcaaccttgagcagataaagagcggcagcgcctggttctaccgccactatgcgaaggacgtggcccctgcggatcgcaaggcttacgaggcggctgaggacgctgccaagtccgcgaaactcggtctctggaaggacgcctctcccacgccaccctgggatttccgggcatcggaacggaaggccactgacacctcaggccgccacggcaggcactgattctcatatttccagattcctgatacacagaagccccgcgtgaaaaattcaccgcggggctcttttctcccgaaatcagtccttatttattccgcttcttccactctttctttgagagcaggagaaccgtatcctcttcagcgagcccctggagaccatgccccgcggggacacctccgacgtcgcccgacagataggctttttcgcgcttcggaccttccagtttcgacgcctttttggaaaccccggagaaccggctgataccggaaccgccatcgagctccttattcaccagccacaccgcgtcagacggaaggcttttatcccgaagtgtgaccgcatcgtggctcgagcaaagcagctgcgcgccatgaggattggtttcagttgcctcaaaaagtgaaatcacatcctgaacaaggctcgggtgaagactcgcgctgagaccatcgatcaccgcgacgccgccttctttcagcaccgggaagagtttcgaatagagagcgagcatcttctggctgcccgcggattctgcttccagcggaagcgtgaacgtgagaccgccgggtactgaatggctgacagagagccgggagttcgccgcgccgctcccgcgcttcagggtgagtcccgtgatgctggggtcaagcgacgccaggtacttcgtcatcctgtcccggatctctttctgatggaagaacccctgcggaagctcaatcgctgcggttcccggaatctcggaatcctcaaacctgaagccggtgaagaactgcttcagggaatcaagcgccggatcatcactcttcagaagatcgctgacggcgagcctcgactcactcagattccgcagaacctgtttcgcgtccttatcggaaagcccgggaacttctgtctttttcccattgcggctgaataccgtggattcggcgcctgattccgtccgggtcagcagttcctcgcggacctcgcggccaaggatcgccgcacagtaggtaaaaaaggattccggggagttcccaaaccggaaccggaagacggtcggacggcggcggctttccacatcgagaaggaacgggacggtctcagaaaccttcccctcatttacggattcaatcagaaaacggagagcagcaaaaaagttggattttccgcttccatttgctcccaggaaaagcgcgactggcagagtcttcgcccccttgcctttctttcccttttttgactttgcgctgctcaccagcgacaccgctgccggagcacggaaagatttgaaattctgaatttcagcttctaggagcgtcatcgtcaggatcttcctatgagaatgaaaagtgtcacaccgcgaagggcgtgatacatattagcgcagtaagaaggcgctcatcctgggagggaccttttcttcaagccatgcggtgaaatccgccgcgagctgccgggagagcgtgagtctcgctttccggccggcacggcgcgcgagcatttcacttagaccccgcgcataacggcagaacgcgatccggtccgcctgatccgcgttcagcgccgcgaaaagccagagttcgaccgccggctgcaccgcgagttctccctgaatcaggcgggctgacagagcctggggcggttcggcaaaagacgacgcatactcagccgcgtcagcgagaagcctgacaatatccggagttccggctgcttccagtgctgtcgcgagcggcagcgcggccagcagcgcgtctgccacccgggaggctgactccggatgcatggtgtcagaaaaaaggcctcgcgctcggtccccgtatgcgctgagaagctcggccttcaggaaggctgctttcaggcctttgacaggaagaccttccgtattgaggaaatgcttctgttcggacgcgggccgccgcctcacaaactcaaggagagacgcaagtgtcggccggccttccgcgtccagccacagcacagggatcggctgaggggcggcgagttcaggcaaaagctccggctgcttcccgggattctcggcctcctggcgcagtttctcgataacctccgagaggtcgtaccccgccatgttggacgacgcggcgagcgccggagaaactctttcagccggaatcagacgcacgagaacgggctgcctgagagactcaatcacctttctctccagccggtaaaggcccgcgtcacggagcagctcctcccggtactccgaggcatggccctcccgatacgctttttcaagaccgaccgctctcagataccctgcgaccacgaggagcggttcctcctccgcgtcagacccgctgcccggggaaaagagatctcctggatcctttaccgacagcagcctctccgcctcaaccaccgcgtactgacaggggatccgttcgctgccaggcgtcacaagaaaatcgacccggccgcggcacgaatccgcgacacgaccgcaggacgccaccggcgccccaatcgcgataatccttgaaaagcccagtgctgcgtagcccgggttctccgacacggaaaaaatcaccgcggcatgctcaggcgtcgtcgggtccggcggcggcagctgcatgctttccgggagactgagcagtgtctctatcccggatcgggtaggtttcggatcagatttctgcaccggttccatggagagtagcggataggttaggaaggaaaaggcgactttcgcgtcaggggtcaaagatacaccatgcggcggcggattgccgcctgatgccgggaaatgcagggattactcacgcagaagggccggagaggatcccctctccggcccttcttctcaggaatacgtcaggaagacgctattagaacttgaacgacacaccggtgtaaacggaagtcgtctgggtcttcgtgtcgtcgatcgcaacagcattcttgaccttggactggccataggaagcgccggcgtagacagacgtacgcttggaaagcgggtagacgtaacggacagcgacaccgtagtactgaacgtcagcgctcgccttatcaccgctttcgacagcggagtcacccgtttcgccgtcaacgtagtagagaccagccgtcaggtcgccgccggcaaccggaacgatcgtgccgaggtgagcaccccagcccttgaggcccttgcccgtcagaccgaggtcttcgtagttctggccggcgacttcatcccagccgcggaagtactgacccatcgcgaaaacctgagcaacaccttcgaagttgtagttgccgccgagggtaaccagctggccgtccttcgtaatgggcgcagagtcgagcgagctgcggtcaatgaattcatagccgagcacagcctggaagttgccgttttcgtagttcacggcagcgccggcatagcggtcagcagagctgcggccttcagtaccgtcagccttggagttcgacttgaaggagtactgggcggtcaactggagaccagcaaacttcggagactgataggtgagggagttatcgataacgggggtagcggccagaccgaacacatcccagtcaccgccgtcgaaagcgtcgccgacagcgaagatctggtcataggtgccgatggaagagcccagagcaccgatgcggccggcggtcagggtgccgtagcggccagagaggctcacctgagcttcacggccgaagagacggccgtcttcatcagcctgagtaccatcgtccgtattgaacttgtcagcgagattgaaggagacggtggtgttgccgatcttctcttcacccttcaggccccagcgggaggtctcattcacgctggaagtcatgctgagttcgtcggtcgaggactggccggtcactttctggtgctgatagccgaggccggtatcaacaatgccgtagagcgtaacggacggagccgcaaaggcggcgccggcaaacgtagcaagcgtagctgccgcgatgaggtgctttttcatttggaaccctaaattgagttaaaaaattaaggcgtctcgccttgaacgaagaggatattactacaagagaatgattatcatccacgggatgaccgtattattttgattccctttcagtgattctgcgtcaattcaagggattatgaaaaaattaagtgttgcttttttgcaacactctagggaagaaaggcaatactttgacccaaacgggtaatacctaggcgagtacactgacctcttcagattgtttcagtgatcggaaaggatgcatttcgaatggaagagttgaacgaactgttctataaggacccctacctgaagtcattcgcagccactgtgacttcgtgcagtgaagggaagaacggatttgaagtagtgcttgacgacaccgcgttttacccggaaggcggcggccagcctgcagaccatggaacgctcggtgccgctcaggtgaccgatgtgcgccgtgtgaagggcgtcattattcattacaccgataagcccctcgaggcaggcaccaaagtcgaaggaaagatcgactgggaacgccgtttcgataacatgcagaaccacaccggagagcacgtcctttccggccttgtgcacgcgaaattcaagtacgagaacgtgggtttccacatggatgacgatatcgtcacagttgactttaacggtccgatgactgaggaagagctgaaggcgattgaaaaggcggcaaacgacgcggttgcagctgatgtacccgtcgaagaactcttcccctccgcctctgagctcgagacgctcgactaccgaagcaagaaagaactcacgggacgcgtccgtatcatcgacattccggggcttgaccgctgtgcctgctgcggcactcacgtgaagaagacgggggagatcggcatgatcaaatgccttaccctctcgaagcaccggggcggcgtccgaatcgaatttgtctgcggcggcagagctctccgcagtttcgcgaagaaggttgaggaagctcaggccgtgtctcagctgctctccgcgaaaccggacgaaatttcagccgctgtgagaaaagtgctcgcggaagtccaggcccgggatgcgaagatcgctgaacttaacctccgctacttcagaatgcgcgcggatgcccttccctcaggcggaaagttcctgcttgctgaagaggaagggctgacaccgggagatctgaagaccttctgcaatctgctcacggaagaaaagaaggccgatgtctgcgcggtgatcgctgcggtgccaggctccgatcctgacaccgcctggaactacatgatcgcgtccgaaaccgctgatctcaagacagccggcaagccgctcaaccaggctctgaacggacgcggaggcggaaacgggaaattcctccagggcacctacaaggccccgaaggctgaaattgaaaaggcgctgaacgcggctttcaacgcctgacctgcaggcaaaaagaaatccgggcggtttcccgtccggatctttgtctgagaggaaatgccggactgtatgaaaacagttccggcatttttcttcccaacagcttcttagttgtgcttccggctcgtaccggcagagataccaaggaggacagccgcgccaagcacggacttcgtgaaagcaccagcgatgaacggggtgacgccaagcgccatgcccttcgcgaagcccatcatgaccgcgagccaggcaccaccgataatcaggcagagaatattgcccgcgagcattgcgatgaatcccttcacaaagctgcggccgctgaaaccgtgctcaaccatccagccggtgagcatggtgcagatcgggaaggagaagaggtagccgccagtcgggccgaagaagcgggcgataccgccgaccgcacccggagcgaaaaccggaagaccgagagcgccctgcatgagccagaacagcacggtgagaccgccgagtctccagccgtacactgcgccgacaaccgtaatcgcgaacgtctgcatcgtgatcggcaccggaaccatcggaaccgtgatataggaaccggccgtcagaataagagagccgaaaagaacagccacagccttgaagaggagcgactgcgcttcgagccatttagcggtcgaaaaaacagatgcggatgaaaccatgctctgaaactccattcattaagtatgaaaacaggggtagtctagcaacaagaaatttccgtgtaagaaaaagcgctgaaaaggttgtcccctctcagcgctaatcctcagaactcttgttcagcccttgaaaatgggcagatccgagatcatgccccggaattccggagcatcgagcatctgatactcgagaactccgacaccgaccacgtcaacggccgcgctcacgcccttaagcagagtgcccaccttcttaagcgaactgagatcgggatccgaaaggtcaaccagaccttcctcacggtagataccggagcggatatccgctgaacccacggagtccaaatcgatgtgaatagccaggtgcttgatgccggacgctttgagccagtccagaaccgcggtattgcccgcgtcaagcgcttcctccttcgcgaggccgatttccagatgatggaactggatatcttccgcgggaggcacctcgtcggctcgcgtgctgacgaagaagaaccgggagggaggaatcgaggtcttcatcagccccggaatctgcgccgcatcaccggtaaacgtgctgaacagcgcggcgcgcttacgccagaaacgctccggcgttaccggctcacgatggacatcgagccacagaacaccgaatccctcgtacttttcattcaggtaatcaatcggagcaacgcaggccgcgccgtccgtcgagaacgcgatcacgcggtccggtgccttggcgtccagaacttcccgcgcggcgttgtaacacaccttgaagtcttccggagaaagaatggtcagggctcgcgccgctacaacttcattctgagtccgctccgggctcacatctccaggagtgatttcaacggtctctgaatgctcaccctgaggcgcaatgcttgccagaaaccggggcacgaaccccgatcccggattcgcgccgtgctgccaatccggaaaaatcagacgaagcgtcttttctgcacttgccatggatagctcctttatgggcacgatttctgttatgtttttcccgagggggatgtcgttcccaaatctgttagctagaacatttttttacttcctgcacaatacgataataattaatttggtgggaatttctagacgcccatagccctacgcttttcggggtaccaaatttacgggttcggacttttcccgggtacggtcccgaaggagccttgcggaattaagaatcacaaaaaccgatccgccgttatggaccagagctcccactaccggccccatcagcccgagcattccaagccccgtcgcgaccagattgattcccatcgcgaaagtgatattccacttgatcatccgaagtgttctgcgggaaaggcggaagagatgcgggacctcatcaatcgagtccttgacgagaacaatgtctgcggcctcgatcgcaatatcggatccgacgcctcccatggcaataccgacgcgggatgctttgagagccggggcgtcattcacaccgtcaccgatcatggcagccggtttcccgctcctctccccttcccgcaggaattcaagtttcgtttccggaaggcagttcgcctcaaagcgggggatacccgtttcttccgcaatacgcttggccgccacagcgttgtcacctgtcaggagcaccggagaaacgccaagcgccttaagctccgcgacagaacgggaaactgagctccgcacgggatcgttcagcgcgataaatccggacggcactccattcaccgctatatagatcactgtgtcaccgagatccaggtagcgcttcgccgcagactccagttctgaggcacgggggtctcctctatccgcgatgaacccgatcttcccggtccgaactgacttcccaccaaccgaagcctcaacccccttcgcggggatcatacggaagtcagataccgctgggaacgcctcccggtggtcattcttccagccattcacaatcgcttttccgagcgggtgttcggacagcgattcggaggctgccgccagctgatagagctccgtatcccgaatttccgaatttacagagtggacagtttccacgcgggggctccccgcggtcagcgtgccggtcttatcaaacgccacctgtttcacatcagcgagacgctcgagcgcatcgccctccttcaccagcacaccgtgccgcgcggcgtttccgattgctgccatgaccgcggtcggagtcgcaagcacgagggcgcaggggcagaaaacgaccagcacggttaccgcacggatgatttcgcctgacgcgaggtaagcaatcacagcgcaggtaagcgccatcacaacaatccaggtagcccagcggtccgcgacacgcacgatcttcgcttttccggcatcggcgctcttgatgagggccgccattctggcaatcgttcggtcatcccccactttggtggctttcataaggaaggtgccaaaccggttgacggtcccggaaatcactgtgtcccccggaccccgatcaaccggcaccggttcacctgtcagcacagactgatcgatcgatgtgatgccgtccagaatctcgccatcaacgggcaccttttctcccgggatcacccggacagtgtcacctgccttgacttcctctgccgggatgacggtttccgtgccgtccgggcccacaatccgcgcggtttcaggcgtcatcgcgaccagacgctcaagtcccgcctgcgcccgcttcaccgtgagttcctcgaggagacccccgatctgcataatgagcgccacttcgcccgccgcaaaatactctccgatcgcgaccgcggcgataagcgcgagcgataccagcacatcggcccggatatcaaattcagtaataagcccaatcgcggcttctttcagaatcggaagtccgcagaaaacgatggcaatccaggcgggatcaaaacccgctacccggacgcctgcaaaagaggcgagaagaaatgcgccgcttacgatcaggatggcgatctgaatgatcgcctcacggtcaaggatctttgtgtgctgcatatgccggtacccgtataggtatattcaggagaataaaaattattcccatttcgggaatacgggtgtgactataccccacggggtatcaattttcaagacctgcgcgtgaagtgctccaccgcatccgcaaattttttgatcgtttcttcggcgtctccattttcaatgccttcaaggacacaatgctgcaggtgcccttcaagcacaatctggccgacgcgatgcatagctcccttcacagcattgatctgaataaggatctcttcgcagggcacatcctcatccaccatcttgtcgatcgccttcacctgaccgaggatcttattgaggcgtcggtgaagattcggtgcatccatgcattcgcgcataaaagtaactccttcggaaaatccggttaagtatagctgttgaatcaccgaaaattgattgcaaaaggaaaccgctctatttaaaagaaagcgcggaaggaatccacttccctccgcgccctatatttattcagcagcgtgcggtctcaggacacaccgacgatacctttgtcatccgtatccggcccgatgaacccgggggttccggcgggagcaggctttcccgtttcgggtttcggagactttgaagcgtccgatggcttcttttccccgctcttcatttcagcaagaacaccctcggctaccgccacggcttcttttctttccgccatggtcataccggctgtcgccttcgcaaaagccatgaccgtctggtcagcctttactgacttgcgaatgatctcaatcggcttcagcgtcttctgatcctcataggaacggaagggcttatcagccttcggcagaatcagcggccgcaggaagaggcccatctgtactctttcatgctgcagttctttatgaagtgacacgaggagcagtgcgatcacgaaggagaacggaagcgccgaaataatcagcacgttctgcagggctccaagaccgcccgaaagaagcaatacgcaggtgagagcggaaagcagcacaccccagatagccttcgtgcggagacgaggttccagatttccgttttcactcagcatgccgagcacgaacgacgccgagtcggccgaagtaataaagaacgagaacaccagcaccacggcaaccatcgagagaacccgcccgaagtcgtaatgagcgagagcgccgtacagcacggtttcagtcggcagattcgcgagattcacaccgccgatctgcaccgcggtcgtgagcgaaccaaagaccgcgaaccagatgcagctgaagatcgtcgggatcaggatcacgcagagcaggaactcacggatcgagcggccgcgcgagatacgggcgataaagacgccgacgaagggagaccaggaaatccaccaggcccagtagaaaatggtccaggacttgatccagtcgtggtgactctgatcaaacggcgccacgttgaagctcatgctgatgaagttctgcaggtaatcgcccgttgaggtcaccagcacattcatggtctgagcggtcgggccgatcgcgagagccgcgagcacgaaagccaccgcgaggatgacgttcgcgttcgaaagccaccggacgccgcgggaaataccggagagcgacgaggcaataaagcaaaccgtcgtgatgccaatgatgatcagctgaaccgttgagttattcggaatgccaaagaggtaattcagaccgccgttaatctgcatggcaccgaacccaaggctcgtcgcaacgccgatcactgtggcaaggaccgtcagcacatcaactgccgttccgagcggcccggtagcgtgcttgccgaaaagcggcttcagagtgacagagaaaagcgctttttcctttttacggaaacggaagtacgcaagcgccagagccacaatgccgtacaccgcccaggcggagaatccccagtggaagaaggaatactggaaagcgtctcggagcgcttcaacagaacccacttcaggtcccggagtcgatgtcgcgaaatgggcgagcggttctgctgcgccccagaaaacaaggccgatacccataccggcagagaacagcatcgcgatccatgaagcccgtgaaaacgtcggcttatcccccggatttccgaggtggatgtttcctatcggacttatcatgaaaaccatgcagacaatcacgatgagtgcgacaagaagcagatagaaccatccaaaatcggttgaaatggtgtcgcagagctgggaggtggccgcaaggaactgagagggccaggcgagacacgctgcggtaaggccggcaacaatcagaagtgagagcaggaagacaggggtgagctttttcttttcagtcgtggctttgacgggatccgccttttcctcttctgtggcgactgagccaaagccggtttcccggtcttcctcgttactcggcgtgtgaagcggataaaggtcgtgaaaatcccgatgcagctcatgcatctctgtcttcaactcctcagatatttttttgtttttctgcattaagcaaaatctcctttagagttgaacaggggactgctttcttgttcttcaggctccaggcaacacccactgcggggtccagcggttcagtgacccgaaaagcgccgggctgataagcggaatgttccgcccgaaatgaatgcgtcgccgtgatgcggtcaggcaaatcacctgaaggtgaactctgtgcttttcgatacccgggaaagaactttttcccgtcagaatcctcagctgacagaattcaattaagaggcagctaataatgacggaagcaaaatgactgcttccagaattcagaaaccggaatgtttcccggttcaaacggcattcacggtccggagaatcagaggttccttattccgtgaataaacttgcaggttttcctggcacccgctgacgctatttccgtgcggatgcagtacgcaatatgcttgtgggcaattggcgccgggaggcgcttgaagccgatggggtaatctctttttcccagccggcaattcctgcagacagacttaattgtaacacagattaattatcaatgcgagggtttttcctgaaagatattttattcaggcaccatcccgcgtcatttgtcattatttgttccatatcttctgccaatcaaataaaacaggatcactgtatctttttttctcttatccaaggcgataattctgcgtatttcccggtattgcttaacctcaccacctgggtttcccgcctttataaaaggtcagtaagccaaataataatgatcagctctcagattttctggtctacaaatttttaagaatatcggagatctcaaagataccttcctcaatactgcccactgctctgccgggatattgaaacgaatactgccagctgccggctttgtttccgctcttaatccacaatttgcatacgaattttattttcgtatgaaacaaggtatactgctacccgcctgacaacagaacggcgccaaagttattccgccttccgggagcaattcatgaaaaaactgcctgttcttctcgctttatccgtcatctccgccgcgcttcttgcgggatgcggcggcagtggaaaaacagacagcaccgagcttcgttatgcctccatgaaggacatccggaacatcaacccccatctttatctcggggaaatggcggcacaggccatggtgtttgagcctctcgtggtcagcacaaaggatggcatcaagccctggcttgccgaaagctggaccatttcacctgacggccacacttataccttcaggcttcgtcagggcgtcaaatattcagacgggactccgtttgatgccgaatccgtcaaactgaatatcgaagcggttcttcagaataaggtccggcacgcctggcttgatttcacgaacgagatcgcctctgtcgacgccccctcccctgatacggtggttcttaaacttcatcacgcttactatccgacgctcactgaactgagtgtcacgcgtccgttccgcttcatttccccgaaatgcatgaagagtggttccacaaaggacggcgttacctgtctcagcggcacggggccctgggtgctgtccgagcataaacagaaccagtatgcggttttcacagcaaatccctcttactggggcgcgaaaccgaagctgcagagcgttcgctggacagttatgcccgacgcccagacgatgctgatggcgctgcagaagggggaaattgatctgatcttcggctcagacggcgatcagattacgagtgacaccttcgcgaaacttcagaaggaaggccagtacgcggttctcgcgagtgatccgatcgcgagccgcgccgtgctcctcaattcaaatccgaaaaacgcccccgtcaccgctgatcccgctgtccgtcaagcgattcagcgcgcggtcaaccgcaaggcgatcactgaaggcgttctgaatggacttgagtcaccggctgaaacgcttttcgcgaagaatgtcccaggctgcgatgttccgctgaagccccgtccttatgatcctgccgcagctgagaagatccttcggtctgacggctggcaaaagggttctgacggcatctatataaagaatgggaaaccctgtgaggtcactttctggttcaactccaataacactcaggaaaaggcaattgctgaggccattcaatccgacctcgcgaaagtcggcatccgcatgaatatccggggggaagagaaacaggcttatctcgaccggcagagaaccggaaaatttgacatgcagtactcgctctcctggggcgctccgtacgatccgcagagttacttctcaagctggcgtattccggctcacggcgacttccaggcgcagaccggactccccgacaaagctctgattgaccgggaaattacatctctcatgacggaacagtcagaaacgaaacgcgccgccatgatccgtgacattctcacccggatacatgactccgcggtctacgttccgatttcctactcccgaaccaaagcggtttaccgtacctcactctcgggtgtgggattcagggtgtcacagtacgaaattccgtttgaagacatgttcttcaaaaacgccaaataaggagagagactcccaatgctgcggctgattctgaaacggctcatctttcttatcccgattcttatcgggatatcgatgatttcgtttttaatcacctctctttcgccatccgatcccgccgaggtcgccattcgcgtgaacgccatggtgccgacaccggagctcatagcggaaacacgatccgaaatgggactcgaccgcccgatagccgtccggtgggtggattggatcacctccgcccttcatggagacctgggccgcagctgggtttccggacgccctgtcgcggaggaattttccgaggcgctccccgccacactgaaactcgcggccgcagcgctcgccatcatcattccgctctcagttctatgcggcgcgatctgcgcatcacgcgagggcggcaaaacggatcacctgatccgatcagtggtcttcgccctttcctctctccctgacttctgggccgggcttctcctgatgtggctcttctccgttttccttggatggctgccgacaagcggcatgacccggtcggattcgattattctcccggccgtgacgctgtcactcgcctatatcggcacctatgtgcgcctcatccgggcggaaatggtggaaacgaaccatgccggctgggtgcttttcgccgagagccgtggtctttcccggaccaggattcagcttcataaactgctgaattctctccggggcagcgcgaccgctctcgcgatgtcaatcccgaagctgatcgccggggctttcgtggtcgaatgtatttttgcctggcccggaatcggcagactctgcgtcacggcgattttcaaccgtgactttccggtgattgaagcctatgtgctgctgatggcggtgtgtttcatccttttcaacctggcgggggacatcttcaccgcctggcttgacccccgtctgagaaggcagggttcgacgctctgaggagggatgaaatgaatattctcttcaggcgattcagagaaaaccgcggggcaaccgcggcagccgggctcatcctcgcgatcgcggtgattggggttcttgccccggttctgccgctctccagcccgactgaaatcagtctgacggaaaagctcctttccccgtccctcactcatcttctcggaacggattctctcggccgggatctgctttcacgtcttatctgggggatccgctcaacgctcttcacgggcgcggctgccatgctgatcacatgccttgccggtgccgcgtatggcgcggtttctgtcattctgggcggcagagccgaatccctcatgatgagagcggcggatatctttatgagttttccgtcagccgtccttgtactcgcgatcgtcggaatcgcaggacccggtctcggcaatattctttttgcctgcgccgcggcgaagtggccctggtacgcccggatgatgcggaccatcctccgctcgatcatgcagtccggatatgttcagtatgcccgtgcggccggtgcctctcggttccatattcttttctctcacctgctcccgggcgcagccggggaatttttcgtcctgatgacgattgataccggagccgtgattctgatgatttcatccctctcctttctgggtctcggcacccagcctccgacaccggaatggggaatgatgctgtcagaagcgaagaatgttctctcgctctacccctggcagatgctccctcctggactcgcgattctgaccacggtcgccgcttttaatttcctcggagactcactccgggatgttttcgatatgcggcatgtcactccggagggagaccaggcatgagtgagctgattctgaaaacggacggtctgcagataaaagccccaaacggccggactctcgtaagcgaagcctcgtttgaagtgcgttctggtgaatgcatcgcaattgtcggcccgtcgggagccgggaaaaccacatctgtcctcgcttcgctgggtcttctctcctcgcggttcggcctctcggggtgcatctcctggctcgacggtcctgccgttccggcctcatcctcccgtcctttccgtctcgggcgggacgctgtgctgctcactcagcagccgatggaagcctttgaccctctgattcggatcgggcgccagattgaagaaactctggagaaggcctttccgggcacgggaaagtctgaggcgcggtccgccatcctcgccacacttcgccgtctgggttttgatcggcccgaagacgtgatccgtcgtttcccgtgtgagctttcgggcggcatgctgcagcgatgcatgacagcgatcgtcaggcttcttaaaccgcggctgatcgttgctgacgaaccgacatcggctctcgatattctttcctcctcgtctgttctcacggaacttctcggtgcgcagaaagaaaccggggccgccctgattgtgatcacgcatgacgtggcgtctgtcctgtcgatcgcttcccggatttatgtcgtcgatcggggaaatacggtcgaaaccctcattcccgggaacctcgcgggcgcggagcaccctgcttcagagcggcttctctccgcgctcaggactctgccggaagaccgaccggcattgcctgcctcatccactccatttattgaagtgaaggatgtccgcaaaacctatgccggcccaggatttcttttccgcgggaaagtcaccaatgtgctggaccgagtgtccttcactctgaaaaaaggtgcctgcaccggacttatcggtctctccggcgccgggaaaagcacgctttcacggattcttctggggctggaaaaagcggattccggacaggtgcttttcgatggggtgacggttcacgcctggaagaaggcgcatccgggatcgctcagcatcgtgctgcagaactatacagactccgtaaaccccaataaaaccgttggggaaatcatcgaggagcctctgcggatcgcgggcctgaataccggaatccagcagaggaccgaggaaatgctttcaaaggtcggactcaccgaggacttcgcagcgcgattcccgcatgaactctccggcggtgaactccagcgggtctgcatcgcgcgggctctggctcccgccccccgcttcatcatttttgatgaagcgctttcagggctcgacgctgctctgcagcaggacatcctgcagctgctccgcagccttaaaacccctgagtcaacctggctctttatcacacacgatctgacggcccttcggtcaatctgcaccgatgccgttcttctcgaggatggccgcgcggcgcttcagatcgacacctcggcaattgacacgtctgagaatccgctcctcaggcagcttgcctccctttttaaagaaaaatcccggctcacggccggactcacactgaaaggcagaccatgatttctgaacagctgaccgaaaaaaactccataaccgcatcccttatccaggcgtttgatcgcgatattgaagaggaaattactgaatactggaatcgccgcgctgaaggattcgcaaaaacgaggctcgctgaactttcgggtccggtgaaatcccgctggatgcatgaaattgcctctgctgtgcttggcacatcccattctctccgtatccttgatgtgggtaccggaaccggtttcttcccgattatcacggcgccgctcggccatcgggtaacggggattgacctatcgcctgaaatgattgccgaagcgaaagccgcggcggctcactttgacgtcaacgctgaattccgggtcatgaacgctcaggcactggacttcgaggatgaaacgtttgatctcatcctcacccgcaatctcacctggacactgcctgacgcgagaaccgcttacagcgaatggttccgcgttctgaagaaaggcgggcgcctgatcaatttcgatgcggactacggctctgtgtcctttgagtccctcactcatgacctcaaggatcagggggtcgagaacgcccataaagggctatcggataattccctcgctgaatgcgaccggatcaaagacagcctcggaatcagcgatgaacgccgtccggaatgggattttcaggtactgactgaaatcggttttgaacgtgtttcccttgacaattcgctttctgaccggatctacctcgagtgtgatgaaacgtttaatcccgtccgtatgttccgtattgacgcggtaaaagcctgaacggatctctctgtcacaggaactgactcatgaattgccgactcgctgccgcattgagtgccgcccttctgatcccgggaacagccttttcgtccggtctgacactttatggtgtcgttgataccggacttcgctactcccataccgcctctgaaggcactacagcagacagcctccagatgatgagcggacagaatgccggttcccgtttcggtttcaaaggcggagaatcgctcggcagcggctggagagttgggttcaaactcgaaaatcagtttgaatcggacaccggaaatgaaaaaggcggccggctcttccaccgccagtcgacagccgatgtcagctctccctacggcacagtcactttcgggcggatcggcaccttttcttccgcggccggaacgtacgaccttttcttcgggaccggggacgcttttgatggcggagacgggctcattaccggcccctattcctttgacacgcgccgcaacaacacggtgacttatgagtccccgtctgccgccgggttgacggggtacctccagtactccttctcccaaggcgatgaagctccgcatgagagcgggaatgagcgatacctcggtgccgccgcggcctatcgtcggggagccctgaacgctgtcatcacggcggaacgcgtccgatacgctgccattaccggctttggaaaacgggaggataaacaggtctatgggcttgcgggaagctacgactttgggactttcaggcttctcggcggtctgcagtatgtcaccggagcggataatcttgccggtctctggcttggaaaactcgcggatggatcggcagattacggccgcctcagcggggccgcggtgggactcggcgcggtcattcccctcggaaaaaacaaagttgaagtgatgacaggatatgcctccggccgttacggcaaagaattcgcgcaggcaggcgaaacgtacgatctgacaggcttcagcgccgcgatccgctatcactatgtcttcagcaagcggaccgagatttataccggcatcgggtaccagcagtacaaaaaggactttgacacggcgccgggccggaagacccggattacgcaggttgctgccggaatgacacaccgtttctgattacgtatttatacattctgtgaataggaatccacaggatggatacctctgcggatttctgcagcaagaaaaatttcacttgaattacgcgcgaaaaaaaccgcggcaaggaagaggcgcatagtcgcaactgaccctttccgcggttttaatctgatgagccgcagtttatcgggcttcaagcgctttgatcctgcgaacggcttccggcggcagctcaatcattaactcaccgggctgcggcgctgaaggtgccggaaattctcttccgtcttcttcataaaagtcgatcgaagtgaccagcgcgtcgagcgccatctctttcagttcttcaatgctttcagcctcggtcaaagcctccggcacatcccggaatgagccgataaaacctccttcaccacctgaattcccgatttacttatacata

SEQ ID NO: 1315 - DNA, 235 bp, Unknown
  gut microbiota DNA sequence
gcgaagatgcggaggtgctgcgccgacgcagggaaacgatgctggaggctcgcagaaaccacccggagcgctggatcggcgattccgtgctgaactgcactccgatcggcagggtatggctcaaccccgaaaatggacagcttgaggaaaagcgtttgccgggggctgcttgaacaaacactgcaacctatttttttacgaacaatttcggcgaaagatcatttgacactcaccg

SEQ ID NO: 1316 - DNA, 3734 bp, Unknown
  gut microbiota DNA sequence
ctcttccgatatgaagccgcggacatgaatagccgtctgctgaagagaggctttacgtcggacttcaatcagttcttcgggagaactgaagcggaattcccctcctgggaagacgccctgaaatcggcgtttgccgcggctcttgaaaccgggtccgctatagcctttgaccggtttgaagcgctctgcggcgcggtaccggaattccccgcagtgcttcgggaagtctttcagtccgtccgatccgcctcccccttccctcttatcctctctggcggcggtgtcgcctggatgagagaaacagtctccgggttcaagagccccctttacggtcttccgaatacgacgatcgagctctcggcgctttcggttcgcgatatgccggctttcttccccgggtggacgcagagcgatcaattcactgtctgggcgcttttcggcggcattcctggtgttctcgcgctcttcgatcgggaggactcgttcgaagctaacctctcacggctcctcacccgaggcagtgtctttgacttcgcggtgaggctcgcgacggaaatcccattccgggaaccccggatctaccactccatcatgtcggctgtcgcttatgactgcgacaccccggggaggattgccacgtggatcggtgaaaccgaggcgaaatgcggtaaatacctctcaggactcgtccggtcaggcctcgtcacgaagatattcccctgcggagtcccaaaggacggcagaaagggcctttaccggctttcaagccccgcgctgaagatttggtaccggtgcctcttcatgggttcaggaaacggtgccagcgggcttaaaacgcgtttaaacgcgattctcaatgaacccctcgctctggcatccgcggaggctctgacgcgtctcggacgccgttccaggctccgttttatccctgaagaaagcggcctattggagggagctaagagcgcctccggtacccttttcgccctgtcagacgcgtcgaaatcggattggctgatcgggctcgcgtcatctgatccgacccccgtgacagagaaaacgctgcgggggttcgcgcttcacgcgctgaaaggccgggatgaccgccgcacggaccttgcggcatcgagcctcgcggggtacacggatgaggcccggaatttcgcggaaaccgctggaatccggcttctcgaactccccgatctcctccgataaaaaaagaccgtcaggtgatttctgacggtcttcgcttcagagccttttactcttcagtcttctttttcgcggtccgcgtggttttcgccttgacggtcttcacggtttttgcggtcttcgtgttttttgtctccgctttcaccgcggttttggaagcagccgctttcttcgctgttttcgcgaccgtggttttcacgggtttagccgttttcgaggttttcgccgcggccgtggttttcgccttggtggtccgggttttcttcaccgcggtcttcttcactttcggcgtctcttccacgatttctggttcgagaatcggttccatcgccgcggcttcagcagccatctgttccgcgagttcagccgccgctttctgggccgcccgcttcgccgccgcgtctaccttaggcttacgaggcttgaacccgagctgtttcagccacggcacatagactttctgcacaaaagcgggttccgcgaggtgcagtttcagccattcgacaaattcctcgatcgaatggcccttcggagcgaacttattcgcgcgaagccagttaaaaaattcgtgggacttgtagcccttcttctccgcgtacgcctcattcgcgccgccaagcagatccgcgtagtacgacacctggcgcgcggtgagcacggcctggtgatcatcgagttccagcgaatccatgacagaagtcttgcggcggcgggatttcttcgaatcatcgtcatcccgcgcgagctgcacatgattcttcggcgacaggtggaatttcagctgtgtcaccttgttgtgggccccccggatcagctcaagttccacgctgaaacgcgtgaattccgagctgttgatctggcggatagcgacgtcgagcacccgctgcttgaagttcccaaaccgcgtataagcgtcttttaaatcaaggagattgcggagttcctcaaacgtcgtgaagaacgtccggtccggatggttctggtactgaaggcacatcgtgtagatgcggatcgcgaacacactccgcagacccgtgagttccatgagattgaactcagtgaactgctctttcaggcgctgaacaaaggggataaaggccggcgtgaaacggaatccgatctgaccgtgcccttccgcgtacgtgactgacgtgaggaagtggaaacgctcgaaaaccggctttgtcggatcctttcggaagaggtcgtacgaactcttgaacgccgcctgcagttccgggaaattctgaatcgaccgcatctgaatcgtggcgaatccgttgaagagcgaatccgacaccttgcgaagcgccgcgtacacctcctgctttcgggtaccgagagccatgatgtcggtggcgttcacgaagtaagtcttgttcggatcaatggcgtcgacgttggacacattcgcgatcgcgctcatcaccacgcgcagctggaaaagatccaggtgatacgacgtgagattgagcggattcgaatagcgaacaaccttcgattcaacgtattttgtcttcggtttttcagccatagcccagatccacaaggaaaattgacaggtacggtaaacgttataactcaaatccccataaacaaaacgagccgaaaggtgatggcctttccgctcatttttttggtgggaacctgtgcataacggtgacacttccgattacatagtactagctgagagaagaaaattccagccgaaattcataaatctgccccctcccttcaaacccgaaaaaaaggggctggtacggaagacgttgcagcagcggtacggcttccgttatcgaaaggtacggcagacgctgcaccaggggtacggtaaacgttgcttctggccaccctctatatagaaaaagaatttaaaaagataaaaagtaagaaaagaacagagcctgtggataacccaaagacacaggctttttctttaaaaatcgtcattaaggtacggtaaacgttatagaaaagcagaaaacgaaaaagaaaaaggtacggttaacgttatacctgtcaacagacactcacactcaaaatcacctcagaaccgaaaaaaacatcaaaaagcctgtggataagtctcaaaaataacccagtacggtctatgttatccgtgaagtacgggaaaagttatcgaagggtacggcagaagttacctcaagggtacggtaaacgttgcttctgaggcccctctatatagaaaaggttttaaaaagataaaaattaagaaaagaaaccattcccgcaaatttctgtggacaacctaagtgaagtgtggtagcgggtacggtttccgttatatctgactgaaaaaacaacagaaaagaaaaatggtacggtaaacgttattcaatatttctaatgtgctttcaataagatagaacgataaaagcggatagaaaagagaagaaaaaagagaaacggctgcctttatcccttcactttatgggtacggtatccgttatcagtgactaaaaagaattgaaaaaacaggtatctaacaaatcaaaagaccaaag

SEQ ID NO: 1317 - DNA, 4431 bp, Unknown
  gut microbiota DNA sequence
gtgtcctaaaaatgggagtcagttcagatctgcctcttttttcgtttctctgcctcgcggcaaagccggattacttcatccagggcgccttgtcgtccacgagcttcgcgtccgtcatcgtgaagccgccgaggctgtgagccttcgtctggatgcagatgtatttgagagaggaatccgccgcggcgcggatcgcgcgcttgccagccgggtcgatgcggaagctgtcaccggccttgatcgggagcgtctcgccgtcgatccagagttcgcccttcccttcgagaacgatgtagagctcttcgttattcgtgtggacatgaacgaaaggcacgccgccgttcgggggaaccgtgttgatcgacacctcagcgcccgtgagtcccagcgcctcgtgcagttcaacgcggggagcgggttcagagtggacgagcttgtaattagccattgcagtatctccagtgtatttattcgacatcttattattagatgtctaactattaatcagactgaaaaattcagtcttgccgaattcctacacgcctgccgccttcttaagcagcagctctagcgtctgggcttcttcaggggtcaggttccgcgtcatttcttttgaaagctcttctgacacctcgtagaacatgggttcgagcgcgcggcccttatcggtcagccacacttcagtttcccgccggtccttcgtgctcctgcggcgttcgacgtagcccgccgcgatcagcttatcgacgagcaccgtcaccgtcggcttcgttctgtgagaccccgccgcgatatcggtgcttgtcgccccgtcgtgacgcagcaggtaattcagaatgtcgccgtggctcggcacaatatccgtcaccccgcgccggcggagctcggaaacgagaaagcggttcgcgtgagcaacaatgtgacccgctgactgagcgataaagttgattgccataaccgatatattagttagatatctaactaaatgtatgcgtaataaccctaattaaagggcagagtcggataagagattgggggcgttttcggcggggtatctgccccgcgtttgtctcagccccagagctcgcggtaattacgggcgaagagatcgagccccttctggacgcgctcttggtacgccttttccgcttcaagcaccgcgtccggaatgggatccaggcttcccgcctctgacttctcgtaccacttcacgagcggcgaatggcgctcatccttcttgatttccttgaagctccagatcatggcgtccagcacctcgttccacgccttctggctctcaaaggcatcggggaacgtgcggcgggaagacttccggaacttcttcagccccttcagaatcacgggagcgagcgtgtagtagaggctccaggtatccaccttcttgaatttgattttcttcattccgaattcggactttttctattggatatctttttatcctagcggatttagggtggcgctgcccggtataccggagttcccgaactctctttacaatcgctctcatcagtttcgcgcttaataaaaagaaagaggattcccgcgatggaaaagaagtcgcttgtgatactcgctacgtcgcactttgcgaccgacctgaatcttgggtcgctccccgccgtgctcccgtttttcgtgacggtctatgggtttgactacaagtcggtcgccgggctcatgttcgcgtcgagctgccttagcaccatcgtgcagccgtttttcgggtggctcgccgataaaggcccccgccactggttcatggggctcgggctcctgatctgcgggatctcgttcgcgctcgccgggttcttcacgaactactgggcgattttcgccgcgatcctgctctccggtgtcggaagcgcgatcttccaccccgaggccgcgaaactcgtgaacgcgatttctggcgcgaagcgcggcatgggaatgagcgtcttttcagtgggcgggaacggcggcttcggcgcggggccgcttctcgcggtggcgctcatcacggcgttcgggctccacggcatggcgttctacgcgatcatggcgctcgcggtcggggtgccgcttctactcttcagctccagaatcaaggtgccaaacgaaggcgttaagcctgtgaaagccgcagcggcggtcgcggaagatcctcaggcgaacgactggaagtcgttctcgaaactcacggtctttatcgtccttcggtccgcctgctacaccgggatcaatagcttccttccgctctactgcatttattcccttggggcctctcactccgccgcgagcgcgacggtgtcggtgcttgcctttgccggcatcttctgcacgttccttggggggccgctcgccgaccgcttcggctacgcgaagatgatccggatcgggagcctgctccttgtcccggcgatcgcgcttgccgtgctgccgcataatattttctgggtctacgcgatgctgatcccgatcagtctcgcgtttaacatcacgtattccccgtttgtggttctcggacagaacttcctcgcgaagagtgtcgggttcgcgtccggcatcacgcttgggatctcgttcagcgcgggcggcattctcgcgccgggccttgggtggttcggggataaattcgggatcgcgttcacgatggggctcctcgtggtgctcgcgctcgccgctcacctgatttcctacttcattccgaagaagcccgcggggacaccggcttccgaagtgaaaccgaaacccgcgaaacccgccgcctgaccggaccgggtttcttcccaaataaaaagcctctttcttccgatagaaagaggcttttttgatggccttgagcgcctaaggggattgaggcgctggttctcgctctcagtcttccttcagccggcccttcgcggcgttgggcttaataaagtgctcgagctgccaggcccagagcgcttcggatccctcgtgcgtccgggcattccgcttcatcacctgcgagaccttcacgccgtgctcgttccaggcgcggccatccgtcgccgcgttcagcatcatcggctggaaccggtcaagcgaccgcgcgaatttcgcttcaggcgtttcccacgcctcaaactcttcccagagagcgcgcattgtcttcccctgatcctcggggagcttcgagaagaggcggtccgcgccgctcgtttcccgcgttttctgcgtcgccgcgcccgccgcgtcgtacgcgaacgtgtccccggcgtagatctccacgaggtcgtggatcaggagcatctggatcacgcggccggtgtcgacttttttgttcgcgtattcggaaagcaccatcgccatcacggccatatgccacgcgtgctcggcatccgtctctttccgcgactcatccgcgagatacgtttcccggacaatcgtcttctctttatcaatctcaaggcagaagtcgagctggcgcttcagccgctcttccttctccgcaatgtcgttcgccacacctgtctccgatagatacccgaccccggggctgagttcttttttctctatcccggcaccgaagccaacattttagaaatcaaatcgatagaatggagccatttgctcaaaattttgagcggctttaaaaaccttaggtgagtaatgtcagcaaaactgaagctccgggcggatacgctcagctgctttttctattttctgatggtgggtgtctactacgcccttttcacgtcccggcttccggccatcaaggcggaaaccggaatcggagacgccgaggtgggaatttcgcttctcacgctcgggatcgcatccgtcactggtctcattttctgcggccgactgattgagcgtttcacgtcgcgccgcctccttcaggtgtcgtcggtcgccctctgcctcatcgtcccgttcgcgggtctcgccccgaacgccgtgacgctttacctcgtgacagcgtgtctcgggctcgcgatcgcgatctgggatgtctgcatgaacgctcaggcgctgctccttgaaatcgagacgcatggccgctatatggggaaaatgcaggcgggctacagcttcggctgcatcttaggcgcccttgtcggcgccctgttcgcttacttctcgctctccccctttgtcacgttcctcgccttttctcttacgacgctcttcttttggagcttcgcgttccggcacctgaaggatgacctcccgaggcagaaaacggagaagcggggccgcatgccgctctttatctatttctgcgggttgcttgagatcctcgcctttacgggcgaaggctcgatcggcgactggggctcgatcttccttcactccgcgaagggggcgacggaagccaccgcggcgctgagtttcggtgtctgcgcgctcgcgatgacgctcgtccgcacgcagagcgactcgcttcgggaaaaaatcggg

SEQ ID NO: 1318 - DNA, 983 bp, Unknown
  gut microbiota DNA sequence
agcgtgacaatgccgagggagttcatcacgaggtccttcgtgtgttcggcgttcgcggtgatgccgtcaacgcacttctcacggagggcgatcatggcgttcgtcagaaccttcatctgggtgaagacagcgaacgaaatcaccggttccatcacgttcagttcaagctggccagcggaggcagcgagcatcacggtggtgtcgaggccgatcgcgaggaaggaagcctggttcgtcacttccgggatcaccggattcaccttgcccggcatgatggaagagcccggctggcgcatcggcaggttgatttcggaaagacccgtacggggaccggaggcgagcagacgcatatcgttgcagaccttcgtgagcttaacggcgaggctcttcgcggcggacgagatcgcgacataggcgccgcagtcgctcgtcgcggcgatcaggtcgtcgctgttatggaagtcgatgccggtctgttcagcgaggtacttcacagccttcgccggataatccgggtggcaggtcacggtcgtgccgatggcggtgccgccgaggttgatcacgcggaggtgcttctgcgcgtccttgatcacttcgatttcgtcttcaatcgtgcggccccagccgtggaattcctggcccatggtcatcgggacagcgtcctggaggtgggtgcggcccatcttcaggacattcttgaattcgtcagccttcttgtagtaggtctgaacgagctgctgcagggccttgaggaggtcctcagagcggtagtacatcgcgaggtgcagagcggtcgggtacgtatcgttcgtggactgaccgaagttcgcatggtcattcggcgaaacctgcttctgggagcccttcgggagacccagcttctcgcaggcaatgctgcagatcacttcgttcgtgttcatgttggtcgaagtgccggcaccgccctggagccagtcggtaacgaactggtcgcggtacttgcc

SEQ ID NO: 1319 - DNA, 21312 bp, Unknown
  gut microbiota DNA sequence
aacattcttgaattcgtcagccttcttgtagtaggcctgaacgagctgctgcagggccttgaggaggtcctcagagcggtagtacatcgcgaggtgcagagcggtcgggtacgtatcgttcgtggactgaccgaagttcgcgtgatcgttcggcgacacctgcttctgggagcccttcgggagaccgagcttttcgcaggcaatgctgcagatcacttcgttcgtattcatgttggtcgaagtgccggcaccgccctggagccagtcggtaacgaactggtcgcggtacttgccttcgagcagctgatcgcaggcgtagatcagggcatcagcgacgttcgccggaatcgtgccgagttccttgttcgtccgggcagcagccttcttcacctgagcgaaagccttgatgaagtactcgtcttcgttcatcgaatgctcagtgatgtggaagttttccttgccgcgcagggactgaacaccgtagtacacgtcatcaggaatctcgagatcgccaaggaaatcatgctcaatacgggacatcttctactcctataaaaacagggccgaagctctgtgttaaccagactggcttccgggaaccggaccgccagcgccgggcctctcaccggagtaatccttccacttccggcgggtggttacttttatctaagataaactacttatgcggcatactatagtactaatttcctatctagggtgtattgcctattaggtatgtgacatagatcaaatgagtaccaccccgaataacgaagacacaaaaaaccccagaccttgcggtctggggtttttcttaaagctaaggcttcagccgattagatcgacttgatcgggatcagcttcttcggggtcggcagaaccttatcgtagttcttgataccctgttcagccatcttgcgacggatgaaggcgatctgcgtgcgcagcgggagctgcttcgggcagaagtcatcgcagccgaggagcgacatgcagccgaagacgccggagtcatcgcccatcacttcatagaagtcagcatcattgcggtcgtcgcggggatcgagacggaagcgggcgatcttgttgatcgcgacagcgccgacgaagtccggacgcatacggaacgtgccgcaggcagcaacgcagcagccgcattcgatgcagtggtcgaggttgtagaggtcttcagcaagctgcggatccatcggaacctcagtcttgcgcatatcgatatcgatttctttcgtgtgaacccaggactcgatacgctcagacatattgcgcatccacttgccggtgttcacggaaaggtcaccaatcagctcaaagcccgggagcggggcgagcgtgaattcgctcggcagatcgcgggtcagcgtacggcaggcgaggcccggcttgccgttgatcagcatcgcgcaggaaccgcagatgccagcgcggcagacgaagtcgaactgcagcgtcggatcctgttcatcacgcagatcgttcagcgcgatgaagagggtcatacggtcgccttcttcgagctcataagtctgcatgtgcggaacactgtccggatcctgcgggttgtaacgcaggatgctgatcttaagcagacggtgcttggtttcagtttgggttttgctcattttttctgtctgctcctaattagtcagcaagaggttcgtaggtacgttcattgcgtccacgaagacgcttcgggagcttgtcctcataaggcataagggcattctgaattgcaaagcgatccttgccttcggcttccatcttggcccggatgtcgtccacttccttctgacgacggacagattcggggttctcgatgtagttcttggcaccgtaaccgcggaagcccggcgggagttccatcgtcgaaatgtcgagatcctcgtaggagatatccggcaccgtggacttcggatccttccaggtcgtgatggtacgcttcagccagttcacgtcatcgcggcgcggatagtcctcacgggagtgagcaccgcgggattccttacgggcgagagcgccgcaggcaaccgtcagagcaaccttcagcatcttgcgggtacggtaggcgtacacgagctgcggattgttgccgatgtcgttcttcacgctgatgttgtaggagcgttcgagcagctgctggagttcatcaacagcttcgctcatctgcttctcattacggaagatgccgatcttgctcgtcatgatttcctgcatgcgggtgcggatcttgacggcgtcttcgttaccagtgttgtgcaggaagccgttcagctcatcctggaccttacgggcgaagtcgtaaacgatggaggtcgggaggtcgatctcgttctcaggcttttcgcagaagtcagcgatgaattcaccgacgatcatgccggcaaccacggtttcagcaacagagttgccgcccagacggttgaagccgtgcatatcccagcaggcgcactcgccggcagcgaagaggcccttcagctgacgggattcaccgcggtagtcggtacggatgccgcccatcgtgtagtgctgggccggacggaccggaatccactctttgatcgggtcaacgccgaggaagtagtggcagatgtcatagacttcacgcaggttgtgcttgatgtgatgttcgccaagcagcgtgatatcgagccagaggtgatcgccatacttggagtgaacacccttgccctgagcaatacgttcttccatacggcgggagaccacgtcgcgggaggcgagttccttcttttccggttcgacatcgggcatgaagcgatagccatcgacgtcacgcagcagaccgccgtcaccgcggcagccttccgtcaccagaataccagccgggaaaataccggtcgggtggaactgaatggcttccatgttgcccaggccggcaacaccggtctcgagggcgagagcagcgccgatgccttcgcagatcacagcgttcgtggtcacgcggtagatacggccggcaccgccggtagccatggcggtagccttggccacataggccatcagctcaccggtcacgaggtcacggacgatagcgccgtagcagcgcttgccgtcatgaatcagggcgagagcctcaacacgctccatcaccgggatgtgctcggcgatcacgcggtcggacacagcattcagcatggcgtggccggtaccgtcggaagcgaaaacgcagcgccacttcttcgtgccgccgaagtcacgctggcggagaaggccctggcactctttgcgttccgtaatcgtcacgcgctcgccattgataatcacctgatggtcgccggcggtaatacgggaccacgtcacgccccaggcagccagttcacgggcggccttcggagccgtattcacgaacatacggcagacgtcctggtccgcaccccagtcagaaccgcggacggtatcgacgaagtgaagatcttcgttatcgccaaggcccttgatcatgttgccgagggaggcctgcatgccgccctgagccgctttagagtgagagcgcttcggggggcagagggacaggacaatggcgtcctggccgcgacgctgcacagcaactgccatgcgaaggcctgccagaccggcaccgatcaccagtacgtcggtgtagatgattttcatgtttgcttggtctcctaagatgccctgcagcgatgacctttcagtcatcccgcgggtcatatttttttagtggcagtctctaagcaacccgagactgcctctttcagccaaacggctgaaaggtacttcctgttaataaaagaacagaaacctgtgtttgccggacgtatccggctttccggcctcatccctacttagggagagaaagacaacgggatccttcaccctaaagtagctaccaccggactttcacaattcggtaggtattctacccacctctctgcgattttcggctgaagtctagtgattacctagccattgggactactaggaataacccgtattatagcctcagctgtgtctcaaagtcctcgtattttcccatttaaaacgcttaatatcaagtgaaaaggcaagatttacgaaaaaaaccgtatcctctgcgcctctattctgcaactagttatcatccactacatccggattattcatacctcttcaggtttatagggtatccacttaatacttacggcgttgttttaccgtcaggaaatgatgttttccgcgttttcttccttacagaaacgcatccggaagctcagggcataattagaagactgaaggaaaaccggccttgtcaggccggcagcgtcttaacctaggatcccgcagcatgcccatttccacattcagaccgagaaaaaaaggagaaaagcttcccccgcttaaggagaggctcgcccggatcggccttgtgaacgactgggactatgtgcttcatcttccgctgaggtatgaggatgagaccgcgatcacgccgatcgctgacctggtgtcggggtcccctgcccagattgaaggcgttgtgattgacgagcgggtgtcaccccggtcgcttaccgctgtcgttgaagataatactggcgtgcttcaggtgcgcctcatccactttttcccctctcaggctcagcagctgagggtcggagcccgggtaaggctttacggtgaaccgcgctccggatggaatcagacgcttgagatggtgcacccaagaatcaagcgcgcggttgaacggactgacgatctcccgacaacgctcaccccggtttatcccgccggggaaggtatcacgcagccctggctccggaaacggatcgcgcgggcactcttggacgttgacctaacggatcttcttccggaatctatccgcacgaagctcaggctgccgccgcttcgcgacgcgcttcagtatctgcatcatccgccgcgcggcgcgacgctggccgatctggacactcattcctgcccggcctggcagcgtctgaagcttgatgagctcctcgcgcagcagatcacactccggcattcgcgcgttctccgcgggaaatcggttgcccctgttcttgcggagcccaagtccggccggattacgccagatctgatccgcggtctccccttccgtctgaccggagctcaggctcgggtctggaaggaggttggagctgatctcgccctcccccatccgatgaaccgcctggtccaaggcgatgtcggctcaggaaagactgtgattgcggcgctcgccgcctgccgcgcgattgagtgcggctatcaggcggcgatcatggcgcctaccgagattctcgcggaacagcacttccgaggcatttcccagtggcttgaaccgcttggaatccggatcgccttcctcacaggacaccagaaagcctccgagcggcgcgccatgctggaagatatcgcgagcggccgcgcgcagctggctgttggaacgcatgctcttattcaggatgccgtgagctttcataagctcggtctcgcaattattgatgagcagcaccggtttggcgtttcgcagcgcctggcgctccgtaccgcggcggccgacggccttacgcctcaccttctgatgctctccgccaccccgatcccgcggacactcgccatgagttacctcgcagacttcgatgtctcggttatcgatgagttaccgcctgggcgtcaaccggtatcaacacgcatcatgccgatatcgagaaagcccgcactgattgaaggtatcgggcgcgaagtttcccgcggccaccaggcttattgggtgtgccctctgattgaagagaatgaggagctggatctcacagccgccaaggaaacgtttgaggaaatcaagtcagccctgcccggcgtgacggtaggccttgtgcatggggaactgccacagcaggagaaagacgccgtcatgcaggccttcaaggctggagagatttctctcctcgtcgcgacgacggtgattgaggttggggtcgatgtaccgaacgcctccacgatggtgatcgagcacgccgagcggttcgggctcgcgcagcttcatcagcttcgggggcgtatcggccgtggttcgcttaaaagctggtgcattcttctatatggagagccgctttccgaaaacggaaaggcgaggcttcaggtcatccgcaatacaacagacggttttgaaatcgcgcgtaaggatcttgagcttcggggacccggtgaattcctcggagcccgccagagcggtgtaccgatgctccggttcgcaagcctcgaagaggatggtgagctgctcgatatggcgcgcgaactcggagacgaatggctgaagaacgaccccgataccgcgcttcgtcacgcaaaacgctggttcgcgggccgcgaagggttcctcgaagcctgagcgtcggaatcagtggccgtgaccgtagtcacgcggcccgaaaatcgcgcttccgactctgaccatcgtgcttccgcactggatagcgctttcaatatcgctgctcattcccatggaaagcgtgtcaagaccgagaccggccgcattggcttcatcaaagagcttcttcatggcgcggaacggcaccttctgcttctcgggatcctcttccggagtcggaatcaccataaaaccgcgaagcttcaggttaggcagcgccgcgacatcgcgcgcgaactgcagtgcctcttccggcttcacaccgctcttcgtttcctctccatccacgttcacttcgatcagaacgttaagcggaggcattccctcgggacgctgggatgagagtctctccgcgatcttcatccggttcacgctctgcacccagctgaagtgttctgccactgggcgagttttattggactgaagggggccgataaagtgccactcaagcgacagttccggatgattcgctcggaaccagtccaccttgtcgcagccttcctgggcatagttttcgccaagagaaaggagtcctagctgagccgccgcgagcgccgcctcagcgggaaacgtcttgctcaccgccagaagcttcacctcttcgggcttccttcccgcctcgaggcatgctttttcgatccggcttcgaacttccgccactctttcttcaatcccaggcttcagcactgacatagcgactttcctgtcctccattcagtcacggaaaactcagtctacatgggtcttccgcggggattagcctgaaggggcgacaatccgcctcatctgaaatccatttgcggaagaaaaattttccgtaagatttaatcgtttaaattcaatcagctgctgtcataaaaaagctttgcggctgattatataaagataccgcaagggttattacctaaaatagatccacttttgcaactatttcaggttcatagaataaccttcgctccaggtcttaccatcattcaacctggtgtcccggtattttagcggacgccccaacgcattactcgttcaaaacagaaaatgaccatcagaaaaaaaatcgtattgacagccgcggctgctgccgttctttctctctcgggtcccgctttcgcaggcggcttccagcttaacgagcagtcgattacgggtctgggccgcgctttcgctggcgaaggcatcatgggggatgacctctcggctacctggtataaccccgccggcatgacactgctctccggcactcaggtccagctcggcggtgtggaaaatgccatggacatgtcctataagggcactgatggttctacggaaaacggccgtaagcgcatttccccgattcttcaccagatggtgacccaccagttcaatgacaagatctggggcggacttgccatcgtgatgccgttcggcctcgctgactcctataaccagaactgggaaggcgctgaacgcggctacgacgccaagcttcttacgatcaacatcaacccgtcagttgcctggaagatcaacgacaagttctccgttggcgcaggattctcagctcagtacattgacgccacggtgtccatgaagcgtaacctcctcggccagaacgtgtactcgcgtcttgacgcggatgactggggctacggctggaatatcggcggtatgtggtctgccaccgataacttccgcatgggtttcggctaccgctccgccatcacgcataaggctcacggcacggtgaagctcacgacggatgccgctggccagaaggccatcgttgccgctgctcagaacgcaaaactgaatccgggcagtactcaggctgcgagcatgatcgcggccatgcgtcaggcgaatctgtcgttcgctgacgtcatgggcattgcccagtcgggtgccatgacgctgaatggcggcgcccagatggacgctcccgcgaacgcgaatctcacgttcgtttggaagtactccccgaagatgagactctcgggctccatccggtggactgactggagcagcttcgacaacctgatcatcaatgcgggcggtctcccccacagccagactgacgtgccgatgaagtggcgcgactcctggttcttctccctcggctatgacctcgatatcacgccgaagtggacgatccgcggcggcgttgcctatgaccgctccccgatctcgaatccccgctaccgtacggctctgattccggacgcgaaccgcatctgggcgacacttggtgcgacctaccgtatgaacgagcactggcagttcgatatcgccgcgactcacatccacggtatcggcgagcgtaatctctacgcttcccaggacgcgaactcccaaaagatcggccgctttgacaagctgaactgctacatggtcggcgcgggcgtcgtttaccgcttctgatcctcagattcaggggccgtctcttctgcggcctccttcggataaaagagaggcctcatggttcaagccatgaggcctctctgcttcctcagtaaaatacgcgcactatggaaaaaattctccttcacagctgctgcgccccgtgttcaggcgcgatccttgagtggatgatggcaaacggttacgaaccgaccgtctactactacaacccgaatattttcccggaaaaagagtatctgattcggaaaaacgaaatcaccgagtacgcgaaaaaacttggcgtgccgattattgacggtgactggaatcacgacttctggcgcgagaaagtgaagggacttgaagatgagccggaacgcggcgcccggtgcctgcagtgcttccgcgtgcggctgtatcagaccgcgaagatcgcctccgaaatgggattctcccgcttcacgaccacgcttgcctcaagccgctggaagcgtcttgatcaggtggcggaggccgggaactgggccgcatcccagttccccggagttgaatactgggaccgcaactggagaaaaggcggtctgcaggatcgccggggcgccctgatccgcgagaatcacttctataaccagctctactgcggctgtgagttctcaatgcggggactcgcggaacgcatggcccgtcagagcgagcaggcgaaaaaggacgaagaggcggcgcgcgaaaagatcgacgccgctcttcagtccatcagcaaatccgcctgaattacggtgccggaacgtgcggtacaaatgacgagggatcggcaaagtaggcggcaacgccgaatccgatgaagacaagcgccgccacaatgtgaaccgtacggaccggaatgtatttcgcaaaccggtcaccgatgaagaccacgggggcgtccgcgaggagcatgccgaccgtggtgcccatcatcacaggaatgacggtgccgaccttcgccgcaatcgcaatagtcgcgagctgggtcttgtcacccatttccgcgaggaagaagaggatcagcgtcgcagtaaaaacgccgtacttcttccatcggctgtgttccgcgtcgatgtcatccttatcggggatcatcatccagatgcccatgccgatgaaggacacaatcagcacccaacgcaggatttccggcgtaagccacgcgttaatccagtagccaagcatggcggcgagccaatgattcaggagtgtcgcgcagagaataccgagcacgatcgggataggttttctgtagtgagcggccagcgccagagcaagaagctgggtcttgtcaccgatttcagagagcgcaatcgcgcccatgctgagcagtattgtttcaagcatgattctggggtcgggagattgaaggatccccgtagatcctgagccggtcctgacagacagaaaccctgcaggcggcagagaccggcgtctcatcccacgcacccagcagagtctctggtcttgccggttcagtcttgatatctgaatcctgcgccatggcttctggagccaagtgtgttgacgcaggtcgctgccttgccgctcttagtggcggtccagggtctgcagcgcggctactccccaaagtaggaaacggattgtaccggaaaatggcgttcccggataaaaaaacggatttattccatcacttcctctctcaccctattggactcaccgccctcacgacttacaatagggggcgttttgtactcagaaccggagcgggtcacaggattctccccgggttttttctttggactattaagaaacatgactgaagttcgcacccgcattgcaccgagccccaccggcatgatgcatctcggcaccgcccgtacggctatttactgctgggctgttgcccgccactttggcggcaaattccttcttcgtatcgaagataccgatcaggaacgctccaccccggaagcgacccaggtgattctggactcgatgaagtggctgaacctcgactacgacaaccagggcgctgtggtttatcagatgcagcatctcgaccgctacaaggaagtggcggattcgcttctcgagaagggccttgcctattgggactactgctcgaaggaagagcttgacgcgatgcgtgaagcccagaagctccgcggcgaaaagccccgctatgacggccgctggagacccgaacgcgccgcagagctcggtcttgtgaagcctgaaggcgtgaaaccggttctccgcttccgcaatccggatgacggcgacgtaacctgggaagacgctgtttacggtccgatcaccgtgtcgaacactgagctcgatgacctcgtcatcatgcgttccgacggcatcccgacctacaacttcgcggtcgtggtggacgatattgatatgaagatgacgcacgtgatccgcggcgctgaccatatcaacaacacgccccgccagatcaacctgtaccgcgctctcggtgttgaacccccgatcttcggccacctgccgctgatcaacggcccggacggcaagaagctgtcgaagcgccatggttctgtcgctgtgacggagtacaagaaggccggctatctgcctgaagcgatctttaactacctcgcccgtctcggctggggccacggcaacatggagaaattcacccgcgaggaactcgcgaaggtgtttgtgctctccgactgctcgcgcgccgctgcccgcatggacttcaagaagcttgcctggctgaatggtcagtacatgaaggaagcggacgacagccgtctcgccgatctcgtgaaagaccgtatcgttgcccgcggcggcgatctctcgaaggcggatctcgtgaaggtctgcgcgctcctcaagagccgcgcccagacgctcgaggaactggctgacgacgccatggtgttctatggcccctacactccggtcgcggaagacatcgcgaagtcgctcgaaaatggcggccgcgaagccgcaagcctcgcgctgacaaagcttgaagcgctccccgagtggaaggctgctgatatttatgctgtgctgaagtccgtctgcgatgagcagggagtgaagttcggcgtgatcgcgaccccgatccgcgtgattgccactgccgccaagaaggttccgcagatcgatcagacgctcgaaatcatcggccgtgacgctgtgatctcccgtcttcgcgaaaacctcgcctaaatatgggatgaaaaccgcagttgggatgtaaaacttgcttttctgagattctttcggtatagttttacttctcaactgatgagttttctgaacttgtcgggatcgttaagtccctatcgtctagaggcctaggacataaccctctcacggttagaaccagggttcgaatccctgtggggacgccaacttaagcaagttaagttgtccagtgagaaatagcccgtttaaaacgggcttttttgttgcctaaaaattctgcacgttggtttcaggcggcaagcgtcgcaatactcaggtcttctcagcgatttctttccgtattcaaatactcctgatagcgctcactgagaaagtccctattaggctggaatttctcaggcatctgaaggctttgatgattaagctgcgccaggaattccgcagcagcgctcccttccgcgacagagcgaaggagttcgcgggaaaactcacacttcatatcaggtgagatgcctaaaagatttttatcgaacgcacggtgcatcgtcacgctgagcgcgatgccgttgctaggctgcagtcgcatctctgaggagtccttccacggtctaatgtgcgctgcctctaccaggcttctctccgacagccccgttatagcgcacttccatccgtaggacgaaagaaccgcatttctgaacatatcctggtgcaggcgagtctttgcaagataaaaccgctccgtcttcgccatcggatcgggaaccttaatcgatttaaaaccaggaacgtaaacatcctcagaaatccctttctcctctccaatccgctccgcggcgtcaaagagccgcgtcagatccgctgtctgaggatcatctccgatgtagcgatgccacacagcctcatcaattttgctgccgtgactcattcccgagacccctttccttgcgtgtttcggatcaagtctcatcaaattgctgagtttcagagcaaccgcatttggcgttctatcaatctgctgagcgagtttgatcacataaggattgccatgcgtgtactgccccgacgacatctgaacgtaaagcaccaaggccagggttacctcatcctctgtccaattacgccggacggactgttctatagagagtgattgcataggatgagccaataaaagactgaagagagatcgaataccgatttgattatcgtctaggttcattcattatgctgcaccatttcgcgacattctatacgtatggttcagatgtaggccatctgatatatgataacttttttaataactatatagatacaaataaaggccgcttttcagcagcctttatttttcttcctccagcgcttcaatctgatatcagatcaaagccaccggattcgaacaactgatattactcagccttcggggaagcaacctcagcggcagccttcttctcggccttcacagccttcttggcagccttcttcggggccttcttagcagccttcttggcggccttcttcggggcagccttcacagccttcttggcagcggccggagcggcagccggggcggaggcggtggcagcagcggcggaagcagccggagcggcaacgtcagcagcctgggcggaaacggcgaaggcgccgaaagcgatcatggaagcagcgagagcgatgttcttgatagacatttgaaaaagtcctttagttgaattttttagggcgagaagcacacagctttaattaggtgatgccgcagtgcttgccgcaagatcgaatagtatcccgcaagcgctattcccgggggtaggacaagtactaccgggggatcatataaacacgtgaccccccgtcataacccttataaaatagggataaaaacgatctagaggctgggtttataccaataaggtatgttcttataaagaatatttttaataacgaaaaaatactattgcagaagtcccatccagaagggaatcgtggcaagggccgcaattgtctgaactgtcgtcaaatccgctactgccggaccatttcctcccattcggaccgctaggatataacaggaatttgcagtcggcagcgctgtgaacgaaaggagtgctcccatctcgaccggagtcagatgaaagtacagaccaacggcgaatgaaacagcaggaaccgcaatcaggcgttcaaccgtagcgagagaaatcagctttccatactttctgaaatcctcaagcctgagtcctgaaccaatcgccatcagagcgagtgctagagaggcggatcccagactcttgaataccgaagtaacaagcgcgggcatctgaagcccggtcacattgaagaacagcccggcaagggtcgcaataatgaggggattcgtaaagatcgacttcagtattcccttgatcccggatccttcagactgagacgctgccgcgagatctgctacggctaccgcattggaaatcggcacccaaacgcctaccagcagagcaaaaagcgccattccggtgtttccataaagcgccagaaccaccgcgaagccaatataggagttgaaccggtaaccgcactgacggatgctggcgtcggtcagccgatcggccggagcgagttttgacacaatccaggcgagcaccatgccggccgccattgatcccacaccgcaggcaagatagagactcgtctgagacactgtcagctctgcccgggcgacactgttaaagagcagcggaggaaaaagaacgtagtagacgagtttttccactccttcccaaagcgaccggggaaacatccgcagtctcgagagcagaaaaccgagagcaataagaatgaagggctgaataatgactgagaagaaatgcatggttcgaagccccctgccccttaagcaaatatacctaatcggttaattcttaagtataggtcagtctgatcagcagaatcgagatcagaagcgttctcttcagtgacaaaaatccccgggacttgcccggggattctctggtttccaataaatgatctctactggaaagattcggcttcggttactcagcctgagcaactgccttcacaggagccggctcacggagcttcgcaacacagtggtaaaccacaagcagcgcaagcacaatcagagcaaaggcaaggatcagctgcagaccgccaaccataaagacaaacgtgccattcgcgatctgaccgaaaatccgtaccacagcctcaaccagagcggtcatcgtaacgatgaacatgaaggtcatcgggacataaagcatccagcccttacggccagtagccttaaggaacactgcgagaccggtcagcacaagagcggaaaggagctggttcgctgagccgaagagcggccacaccgacatataacccgccatgcagagcgcaaagccgcagaccagcgtaaggaccgtggagaagaccacattcgtgaagatcttctggataaaggtcttttccttccccggagccggctggaagagttcctgaagcgacatgcggccgatgcgggccacggcatcaacagacgtcagggcgagagcggaaacgcacattgtcagaatgcaggcagcaatatcagccggaacaccgaagatgtcctggaggaaaccggcaaccgagtgagagaacgtctggaacggagtacccgcaggaagagcgccgttcgtagccgccgcgcagaccaccacgagagacacgataccaagcaccacttcagcgcacattgagccgtagccaacgagacgcatatccttctcgttgctgatcatcttggaggacgtaccggaggaaacgagcgaatggaatccggacacagcgccgcaggcgatcgtcacaaagaggatcgggaagaggtccatgttcttaaccgtaaagcccgtcacagccggcatattgagtgtcgggttcttaatgaatacacccagcacgccgcagataatcatgccgatcaggagataagcagacaggtagtcacggggctgcttaagaagccacatcggcatcacggaagccgcaaagaggtagatgaagacgatatagcgccaggtattggcgtcagcatagatcgggtaagcgatgccggcccagaccatcagcaccatcagaacaagaccgacaatgaactgaacaccggaattcggcttcacatacttcatgaagagaccgaagagaacggcgccgaccatgtagatcattgaaatcgacgcggctgcggcattcggcacctgaagatcaccggtcttcgagaaaccgttgaaagttgccgcgaccatgtcaccgaaggccgcaatcacgagcagcgtgaaaagccagcagaaaagcaggaagagctgacggccggtacgtcctacataatcctcaataatggcaccgatcgacttgccgccgttcttgacagaagcatagagggagccgaaatcctgaacggcgccgaaaaacacgccgccgatcagcatccagagcagcgcgggaagccagccaaacatggcggcaataatcggtcccgtgacagggccggcacccgtgatggatgtgaactggtgggcggcaaccgtccacttggaagcaggcgcatagtcaccgcccgcattttttacagccggagtcggctgcttaggatcaataccccatgtcttctcaagccacttcgaatagatgaagtatccgaagccaagagcgacaaaggcgatcagcatgacggttaaaccgttcattttattttcctttgaagcaagtgcgaaatctgcagccgcctcccggaggttgcttttggtcccagcgcaggtggtcgcttggataaaaagatgagtgatttctgaatcaggagaggcggcggtctttttggaagaaggtttttattctttcaatgtttaaaaatatacacattcgcacatcgatacttctaagaaaaagtacttaattgattgcactgcggtcaagtatcacgcccaaaaagtcccttgaataccgtgtttgcggcaataaaaaaccccgagagaaggaaatctctcagggtgttctgtttatctctcagctatttcagccaagaatcatcgaatcgggaatatccgcttcgccgttcgaagctttttcgaagagaccaagaagatcctgaaccgtgagcttctttttctcttcgcccgcgatattcacaatcgcgcggccgttatgcatcatgatgagacggttaccgaaacggagagcatcccgcatgttatgcgtaatcatcagagtcgtcagacggccctcatgaacgaaacgatcggtaatcgcaagcaccttctccgcagtcttcggatcgagggctgccgtatgttcatcaagtagcagcagctcaggacggcgaatcgtcgccatcagaagcgtcacggcctgacgctgaccgccggagagcagtccgaccttgctggtcagccggtcttcaagaccgaggtccagctcagcaagcatttcgcggaaatgctcgtacatcttcgagctctcactccaccggagtccgagtctctggccgcggcgcattgccatagccagattctccgcaatctgcatgccggctgccgttcccttcatcggatcctggaaaacgcggccgatgaaacgagcacgcttatgctcaggcattttggtgacatcggtgtctccgatgatgatgcgtccagagtcaatcgggaatacaccggcaatcgaattcagaacagtcgacttgccggcgccgttactgccgatcaccgtcgcgaagtcaccatcctcaagcgtgaagctcaccccctggagggccttcttttcattcggggatccgggaaaaaatgccttataaacgttttcaagtttcagcatcaggaagccctcccggtgagacgggatgccgctctcagtttggactgaataagcggcagggaaagcgcaatggcgacaagaatagccgtgaagagcttaaggtcgttcggcggcatgccaagctcgagcacaatggcgatcacgagtcgatagacaatcgagccgagaaccactgaaatcagacagttcttaaagctccgggtgccgaaaagcacttcgccgataatcaccgaggcaaggccaatcacgatggtaccgacgcccatgccggcatcagcaaagccattgctctgcccgacaagcgcaccggaaagagccacaagcccattggaaagaagcagaccaaggatcaccatggaatccgtattcacgccctgagcgcggctcatctgcgggttatagcccgtggcgcgcagagcgagtccaatctcagttccgaagaaccagtaaacgacggcgacgacgagaagcgccgcgatcagaccgacagcaagggtcgtctgagcttcggtgagacccgcggacgcaccccatgaataaatcgtggtctgcccgagaagcgaaaggttcgcgcgtcccatcacgcggagattgatcgagtacagaccgatcatcgtcagaataccggagaggagtgcgggaatcttcagctttgtcgtgagaagtccggtcactgcaccagcgacacacccggcaagaacagcaagcacaaaagccgtaaccaaggaatgaccggaggtgatgcaggtagccgcaacagcagctccaagcgggaaagtaccctcaaccgacaggtcagcaatatcgagcacacggaacgtgatatagacgccgagcgcaagcagtgaccagagaagcccctgggcaatggtggaaattagtaaatctaacatcgatcaggtgctcctttctgcacaagaacctgagttacctaaaaagaaatcctgcgcggcctcagagtatgaagccgtgcaggctttgaacaaaagcagagggcggaacccctgcggaattcttactgaatgatttcagccttcgacttcacggagtccggaatctgaatgccgatttccttggcggtcttcgcgttcaccatggccttgaactgctgctgatagcggattgccatgttttcaggcttcgacttgccgtcaagaatatccgcgcccatgtcgccggcaatcttgccgagctcatagtagtcaatgccaatcgtggcaagaccgccgttcttcaccatattgggttcaccgcagatcaccggaagcttcgcctggttggtgaccttgatcagagtcggcatggcgctcgcaagaacgttgtcagtcgggatatagatcgcctggaccttgccaacaaggctgttcgcggcctgctgaatatcgttcacattggaaaccgttgcgatcttcagggtcacgcccatcttctgagccacggtcttcagagcgttgacctggacctcagaatttacttcgctcgagttatagatgacgccaagcgtcttcagattcggaacaaagtccttgatcagctgagcctgctcagcgatcgggttcatatcagagctgccggtcacattggtgccgggcttctcgttgctcttcacgagacgcgcggtctgataatccgtaatagcggtaccgacaatcgggatcgtcttcgtcgtgttcgcaaccgtctgggctgccggagttgcaatagcgaagatcagcgcggaattgttagacacaaagcgctgggcaatgttcttcatattcgactgatcggcctgcgcattctgctggtcaatcttgatcttcccgccatccttatagccgcgggccgccagctcatccacgatacccttattcgctgcgtcgagagcctggtgctccaccagctgaatgatgccgacattcagctgaccagtcggagcagacgctgccgctgaggatgcgctgccacccttatcaccgcaggcagcaagcagtacagccgcgccgacgcaggcgagcgcgattccaatcgacttcatcttcataaggggctccttcgagggaatttattgctgatatctgaaatgtatcggatcttgtctgctgtttcagcagatgcatttggttattatgcacgtctgaaagcgggttgtggaaattttggaatttcccgcaggcatgaaaaaacaccaggatgaatgacattcctggtgttttattttcagttcggtctgatcccgtcgccgcgggatcagattcagaaactgattagttgttctcggcgaacagcggggtcgagaagtagcggtctccgttatccgggaagatcacgacaatcgtctttccttcggcctcaggacgcttggcgatttcaatggcagcccaaagagcagcgccagcggaaataccggagaggatagcttcagtgcctgcaagcttcttaccagtcgcaaaagcgtcttcattagtgaccgtgatcacttcgtcataaacggaggtatcaagcgtcttcggaatgaaaccggcaccgataccctgaatcttatggggaccgggcttgccgccggaaagaaccggggaggtggtcggctcaacagccacagccttcacgttcggattcttttccttgaggtaacgtccggtaccagtcagcgtgccgccagtgccgacgccggcaacaaagtagtcgacaacaccttcagtgtcacgccagatttccggaccagtggtttcgtagtgagcctgaggattcgcgggattatcgaactgaccagcgatgatggagccaggatccttctcatgaagttcctgagccttcgcgatggcgcccttcatgccgtccttacccggggtgagaacaatctcagcaccataggcatggatcatgttgcggcgttcaaccgacatcgtatccggcatgacgatgacaaccttgtagccatgagcgcggccaaccatggcaataccaataccggtgttgccggaggtcggttcgtaaatcgtggcaccgggctgcagacggccagacttttcagcgtccagaatgatggacttagcgatgcggtccttcacggaaccagcaggattgaaggattcgagcttcgcgagaatgcgggccttaagaccaagctccttctcaagcttgctcagttcgacgaggggggtattgccgatcaggtcggacacagacttataaatagccaattcttttctccaaaagcaaggcgtttcattcacgcctgccaaacagtgatggaatacggatgactcagctcatccgccagttggtaacaggtgtttgggcttaaacccgagttgttctgtcggatatattatcagcgggtttttaaaaaagcaaaaatgattttctgtggaatattttcgctttaaatgtgaatgattacggtttttgaaaatttattaaatacttatttttcaataatttgatattaataaacaacaaaaatatccattttaaaacgacacaaataagcgcaaaaacagcgg

SEQ ID NO: 1320 - DNA, 39311 bp, Unknown
  gut microbiota DNA sequence
atcaatccctttctatcgccccttaggatttttatttaacaagtcctaaatttggggagcagttcatttcagtgcgcttttttttgtattcagtaaagatgaatcgcagccggcaggcgtagtggaacccgattctcattacctttttcgtctcacgacattatcatgaaaagaaacaggattgagaattgaagttatgacacctttttactatgtcgccctgtctctcatagcgctgtatctcgagatccgggcgtatcagattcttcgcggaaagaatccggggctgcggatctttctcgcggttctcatcgcgctgtcgatgggactctacccctacctcatgatgcttggggtcacgcacccgtggccgaacgcacatgaagctctctcagtgatcggggtctttttcagcacagcggcatttttttctgttttcctgctgattctggatgtcatctggctgatttccttcatcatcacacggcttttccgcgggcggcgctgcggaaaccgaatgccgcttaagctctatggaggacttctcgcgctctgcgcggtgttagcggtctggggcggatggaacgtgaagacggatcctccggtgaaaaatgttgccgtcaccgtaccccggctccctgccgatctcgatggcctgaaaattgtgcagctcaccgatattcacgtttccccgctttacgaaaaagagcggtttacggatctcgtgaagaaggtgaatgcccagaatcctgacttcatcttcattacgggcgacatcgcggacggcacgccgcagtcacgccgcgccatcatgccgttccttcacgatctgaaggcgaagatcggggtcgtgatgattccggggaaccacgattactatgtggattacacggcctggcgccactactacaaatcgatcggcgttccattcctcgaaaacggacatgtcgaattccgtaagggtgacgatgtcatcacggtggtcggcatgacggaccgctccggtatccagtacggatacccgggacctgatattgaaaaggcgacgtttggcgctgacgcgagcaacgcgcttcgtatcggactgatccaccggccggaagacaccgccaaatgggctgatccgcgctgggggcttgatctcctgctcgcgggccacacgcatggcggtcagatcttcatcatgtatccgtctgtctggctccagaaccacggctacgtccgggggctttaccacgtcgggaatatcccgttctatgtgtcgcctggcatcggctcctggagcggcacaccgacccgcatcggagcgccgactgaaatcacgcttctcacgctccacagccccgaaaagacgcactgaggctgctgggcgttccaacgaaaaatgccggcgttctttttaaggaacaccggcattattgttattctttgtctttcgattgctttctacgccgccgcgaatgacgccggaagcacgtaaaagaacaccgacaggaactgcagcagtgtgccggcaaaaacgaagacgtgccagatcgcgtgattaaacgggatccggttcatcacgtaaaagaaaacgccgactgaatacgcgaggccgcccgccacgagaagccagagaccgcccgcgggaagagccgcaacaagcggcttgatcacgagaagcacgagccaccccatcgcgagatagatcaggcagttgataaagtttccccgcttcatgagaatcggctgcaggagaataccaacggccgcgagcacccactccgcaatgcagagcgtccagccgagcgtcccctgaagcgtaatcaggcagaacggcgtatagctccccgcaatcagaagatagatcgatgagtgatcaaagacctgaaggatctttttcgcttttcggttcgtaattgcgtgataaagggtcgatgccgtgtacagcacaatcatcgaagccccgaaaattgccaccgccgttaccgcaaccgcagactggctgcggagcgcggcaagcgtcaccatgagaatcagcccaaccacggagaagatcgcggcgacaccgtgcgtcacactgttcgcgatctcttcgccgaggctgtagctagcagtctgatcagccatctatattgatttcctattggaaagccggatggcatggctctgatttttcttcagaaccggaacatgaatcgccgtccgacgtgtttcattctggacgggatgaccgcgggaaaagcccccgctttttaggtaaaaacccgatgatctataacggaatgttgccagaagctcctgcggcaatgtttcgtcacaggatctccacttccggggtgagctcgattccgaacttcgcattcaccgcatggatcacttcgtcgcagagcgccttcacttctttcccggtcgcccctccccgattcacgagtaccagcgcctgtcgatcccagaccgcggcgttccccagaacacggcctcggaatccggcggcatcaatgagccacccggccgcgagctttgtccgccgtccccccagagggtaagcaacgagctgcggataatcttcaagcagcgccctcgcctgcagctcaggcacaaccgggttcttaaagaatgagccggcgttcccgaattccttcgggtccgggagcttcgatcggcgaagcgcttcgaccgcgacgagcactgagcgcggcgtcacttcctttccttcaagcgcggcggaaagccccttatagcccgtcaccggggtccagtccttttcattcggaagccggaacgtcacggagacgatcacccagttctttccttcctcactcttaaacactgagctccggtaaccgaagtcacactcttccgtggaaagcgtccggaattcaccgctttcaagatcaaaaatctccaccgcatcaatccgctccgcggcttcaatcccataggccccgatattctgcaccgcagcgccgccgactgaccccggaatcagcacgaggttctcgagccccgggtgcccggattcagtcatccggctcacaagcggactccagttttcaccagaccccgctctgaagcgatactcaccggcgtcaccccgcgggagttcctcaacccccgttatacggttcagggccacgagcccatcgaaatctttcgtgaacagaatatttgacccggccccgataatgaggagcggttcatccttctctctcactgtccgcagcgcttcaagatcctcacgggactcaagtctcaccaggcgtttagcccgggcttcgactccgaaggtagtgaagggagaaagagaaatctggtgttccacacgcatggtcaaatcttctgaaagaatgaaaatccggggcagagccccgggaaaagttctttataacgcagtttgccggaagagggagaggttccgcggagcatctcttcccctatcctgcctatttcctgagccgttcggtcacccgccgcaccactgagtcggtatcgaggccgcacagtctgaaaagcgcatcaatcgagccgtgcggaaggaaccgatccgggactccgagctgcagcaccggcacttcggcatcagcctccgccagcacttcaagaacgccgtcccccgcgccgccttcaatcacaccctcttcagcggtcacaagaagatccgcgcgccgtgcagcgtcaagaatcgcctcacggtcaagcggcttcgcgaaccgcatatcgatcagccccgcacgcagctgcttcaccgcgtccatgagccgccaggtcatcgcgccgaacgcgaggaaaatgacccgctgtccctcagggacatcatccgggagtctcaccgcctcaacactcttcccgatcgggatcgtctcgccgttcaccgctgtcaccggagttccgggccccttcccgcgggggtatcggacggcggtcggtgtgtcgaggctatacgcggtattcagcgcgagccggcactcgttttcgtctgacggcgtaaacaccgtgaaaccggggaactgcctgaagcaggcaatatcaaagagcccgtgatgagtcggaccatccgcgccaacgatgccgccgcggtccaccgcgaaaaccaccggcaggtgctgaagcgccacatcgtgctcaatctggtcataggcacgctgggcaaaggtggaatagatcgcgaccacgggcttcatgccgccgcaggcaagacccgcggcgtaagtcacggaatgctgttccgcgatcgccacatcccggaaccgcttcgggaaacgcttcgcaaactcgtccaggtcagagccttccgtcatggcaggggtgatcgcgtacgttctcggatccttctccgcggtatcacagatccagcggccgaacacgttggagaacgtcggagccgaactcttcttcgcctgcacgccggcctcaggatcaaagtggctcacgccgtggtacgtcgtaggatccgcttccgcaagctcgtaccccttccccttcttcgtcaccacgtggagcacaatcgggccccgctgtgtcttcagattctgaagcacgcggaccaggtacgaaatatcgtttccatcgatcggcccgaaataattgaggtcgaacgtggagaagagggaggaaggaggcgacacaaaattcatcgcctgcttctcaaagcgtttcgcgaattcccagagactcggaagatgcgacagcacctgcttcgaccgctcccgcgctccaaggaacgcaggagttgaaacgagcttcgtcaggttctttgaaagcgctccgaccggggctgagatcgagtaattgttgtcgttcagaataatgaggagacggatctgatccttccaggacccggcgtcattcagggcttcaatcgccatgccgccggtgagcgccccgtcgccaatcacagcgacatgccaccgttcggtagcaccctgcagataagacgcgaccgccatgccaagcgccgcggacaccgaggtagacgcgtgccctgtgccaaaggcgtcatacgggctttcggagcgcttcgggaaccccgaaatgccgcccgtctgccggagcgtcgccatcgcttcgcgccgccctgtgaggatcttatgagcgtaagcctgatgccccacatcccagacgatcggatcatccggggtattgaagacatagtgaagcgccacggcaagctccaccgcgccgagactcgacgccaggtgaccgcccgtctgcgagactgagttcacaatgaagtgacggagctcagccgcgagcaggggcagatccgcgctggaaagcttccgcagatcctccggggaattgatcgccccgaggaaacggtaggggtaagcgtcccgggcgttgatttcgcctgccgtctcagttttcttttctttcaggtctgtactcatcagcggtcccgattgacaacatagcccgcgatttccgcgagccgcttcgtcgagccggcataacccggcagtgattcaatctgatccagagccgcaagcgcttcgctgcagctctgctgggcaaggcttctggccccctcaagtccaagaagcgacacataggtgggcttctcttctgcttcatcctttccggcggtttttccaagagtctccgcgctgcctgtcacatcaagcacatcatccaccacctggaacgcgagtccgattgcacgcccaaaatctgagagcgagtcgagaagcttccgctcatccgtttcagggatgtctcccgacaccgcgcccatcagaaccgcggcccggatcagagcaccggtcttcatcgcgtgaagccgccgcagatcctcaatcgcgatcgcggcattccggcttccggtaagcgacagatcgtacgcctgaccgccgcacatgccgcgggatccggccgcctccgcgagaatccgcgtaaggcgcactgctgaccgcggctcaaccggagcgtccgcgatcacccggaacgcctctgcctgaagagcgtcacccgcgagcaccgcttcggcaaaaccaaacttcgcgtgggtcgatgccttgccgtgccgcagaagatcgttatccatgcagggaagatcgtcatgcacaagcgaataggaatggatgcattcaagggaaagcgctgctgcgtcagccgcctcaggcttcgcgcgggtaatcgcggacgccgcgtagcaaagcagcgggcggacgcgcttccctccttccaggatcgaccagcgcatcgcttcatgcagcccctgcgggaagacatccgaacccggaattcccgcttcggccacactttcaaaatgcgcctggcgttccttcatccagtccctgaaagacacttcagacatctgtttctccttggcgttcattgcgtcagaaaggaacgtcgccgaaatcatccgaagcggcaggcgaggcggcagcggaggccgcaggctcagcccgcgacgcgctgtcaggccggaggtctgacgccttcacaggggagagctttccctcttcatccagcttccggatccgttcctcagcgcggtcaagcttggcacggcacgccttcgtgagcgcaatgccgcgggcatagctttcaaccgactcttcaagtgtcagtccgccctgctccatacggccgactagcgattcaagttcgctcatcgcttcttcatacgagagcttctccgggtccttctgcgccttaaccgacatccgcacaatcctcaaaccaaaaagaattcaccatgggggtattttaccgggcttgatgggtatgcaacacgctttccggagccaatgcgctccgggacactatgtgaaatcggtatcctgaaggatcgcagctattctcacctgaccggcatcgctaaaatgtaaaaatctttgccgccggcggcggctgtttccggttttcaaaggttttccccatgcagtctctctggatgcttctcgcgtcgcttttcttcgcccttatggccgcctgtaccaagtggggtgccgcagactacggaactttcacgcttgtcttctaccgttccgcgattggctgcatcgcgattgccgcctggatcatcgcgacgagacgggaaatccggacgcattacctctggggacacttcaagcgctgtttcatcggtatcgggaacctcgctttatggttctggacgctgggcaagctgccgcttgaaaccggcatgacactgaactacacaagcccgctcttcatggcgcttttcgtcgtcgcggtctcctataaaaagaagctcccggtcgcctggagcctgatcgccgcgattgctgtcgggtttgtcggcattctgatggtacttcggcccactgtctctgcgggacaggagcatatcgctctgatcggtcttgcctgcggcatcctttcaacctgggcgtatctgcaggtccgggatctgaataaactgcacgaaccggtctggaggattgttttctacttcacgtttttcggttccctctttgggctccttggctcgttctttgagccgggcggcatttcggttgtgccctctttccgtggtatcgcggcgctcgccggtaccgggctcttcgggctatttgcgcagctctgccttacgcgggcgttcggcgccgggaatcttctccttacctctgtgcttcagttctcggcgattgctttctctgccgtaatcagcgcggtgttcttcggggagtcgattccgccagtcgcgattcttggcatcgcggtcatcatcgccgctggctccgcagcgacactcctcacgaagagccacatgaaagccatcgatcacaagtagagaggatgcggcgggccatgcacgcgcggcgctaaaatgtgcgccttcattgattaaattcttcacccgcctgccgcggagcttcgcatgcgatcattctggatgctcggggcgtcgttcttcttcgcccttatggctgcctttgtgaaaatgggggcaagccacttttcattctttgaactcgtcggttaccggtcgcttttcggtgtgattctgattggagggtggatcttcgccactcaccgcacaatccggacgccttatattttcggtcacttcaagcgaagcttcatcggcaccttctcgatgacgatctggttctattcgatggggtttctgccgctcgctacaggtctcacgctgaactacacgaacccgatcttcatggcgctcttcgtatttgtgatggtgctgagacggcacgcgaaaattccctgggggctgatcatcgcgaccattgcagggttcgccggtgtcgtcctgatgctgcatccgactgttgaaaccggacagatcaaaccggctctgatcggcctctgctccggattcctcgctgcctttgtgggacttcagatccgggaactcgcgaagcttcacgagccgacctggcgaatcgtgttctactacacgtcgttcggcacgctctggggctttatcggtcacctcatcgcgcacgggagcttctccgccatcaatatgcagagcctcctcccgctcaccggcatgggtatctcggccaccatcgctcagctctgcatgacgcaggcctacggcgtgaagaacattctcgtgtcgtctgtccttcagtactccgcgattattttcgcaacgatcttcggttacttcttcttcggtgaccggatttcgcttgacgcgggcgtcggtatcgcgatcattatcgcggccggcatcgtagcaacactttttatcaagaaaaatcaggcaaagcacggctaaggatctcgcgcggggacttcccgcgctatcctttaccgatcagtaactttttccagaaggatacccggaacgccatgactcttcgccgttcgatttttgccgcggccattgccgccatgatctcgaccactgcttttgctgcccctggcgccgccgcgtctcttgccggcacgagctggatgatggagcttccgaagggctcaagctgcgaggtgccgcctgagattcagttcaggaaagacggctcaattgccggaaacgcgggctgcaatgacttcaaaggaagctggaaggcggatggcgactcgctttccgtgaactatcagccgaccacggaccgccgctgcgcgaaagcgttcctcgaacctgaggccgccttcaccacggccctgaagggcgtgaagactgtgaagaaggatggcaagggacttcttcttatcaatgccgaagggaagactctgcttcgcatcgtgccgtcagtcgccggcgcctgcgactgagacctcgctcccgctttgaagcaataaaaaatcctggaattttttaagttccaggattctttttttcagcgaagaggcggaaaaccgcctcttcccgcaagcgagcaattagttattgttcgccgggctgtggcagatcgtgcagttccagcgctggggggcaacggtcatcttgccgtctttgcccttcacccagtggttggccggcatttcagtgccttcctcacccttctttgccttgccgatacgaccgtagtcgtcggcgtggcacatcacgcacatgttcttgtccttcgtgatttccatgcccttcgtgtcatgcttgatcaggacattcacgggaccggcggaagccgccgtctgagtctgggcagcggccgcgttgccggcgagcgccacactgaacatagctgcaataccgctcagaaccgcagccttaagagcttttttcatcatgattaattcctcttttccgcctccggatcccgccgactggcggcggagaaccggaagctggttacggttagatatcaggccttctcaacacggattgcgcacttcttgtaatccggttcaagagagagcgggcaggtcgcgtcgaggcagagctggttcatctgaacgttctcgtcaaagaacgcagcgaacgtgataccgcgggtaaccggcatacggccgccgatgcaggccttcgcgaacaccgtggcgcggcggctcgtgatcttgatgcgatcgccgtccgcaatgccgcgggccttggcgtcagccgcgttcatgtagagcatgccttccggcagggccttatggagcgccgcgacacggccggtcatcgaaccggtgtgccaatgctccatgaagcggcccgtatcaaaccagaggtcgtagtgcgaatccggcacttcaaccgcttcagcatacggacggaagaagatcttcgccttgccaggcagcggcttcggagtcttatccgtcacagcgtcgaggttgccggaaggaatcgccttcatcagcgggccgtagaagaggaagtccgcgccgttgcagaacgggtcatacatgccgttgaagcggtaagaaatgctcttgccgttgatgtagggccagacaatgccgtgttccttcaccacttcatcgaagtgagcgatctggtgagcgccctgagtgaactgccagtactcctcgtacagagccttttccgggaaccagccgtcaccgagatcctcagccgtgccgcagtgaacacccttatagagcggatccggccaggcaaccttcttcgcgaaggcattgtggaagaccacatcgtagagcgaggcctcggggtcgatacccatcgcctttgccttgtcgagcacattcgggagggtcttgccgcccggcagcttctgctcgcaccagcattccttcaccttgaagcgcttcgcgaattccagcatcatccagacgtcagacttggcttcgcccggagcctgcaccatctgagaccagccattcgtacggcgttcgccgttgccgtaagcgccccacttttcgaagatcatcgcagccggcaggataaggtcagccgcgttcttagcggagaacgtcgggtaggcatccgccaccacgatgaagttctcgggcttacgggcagccttcagccagtgcgtggcattcgggagggactggaagatgttcacgacctgcgtccagaggacgcgcatcgagccgtcttcaagaccgcggaccatcttcatcgcgtcgaagcccacctggccattcagcgtgccttcaggcagaccccagatcttttcagccttggcgcggtgcgcgggattcgcgaccagcatgtcagacggcagacggtgagagaacgtgccgacttcacggcaggtaccgcaggcagaaggctgaccggtgagcgagaacatgctgctgcccggcttcgcctgcttgcccatcaggaggtgaatcgcgtagagctgctcattgatccacgagccgcgctggtgctggttcgtgcccatgcagccagtcgacagcacacggttcgccttgtcgcagtaaacgtcagcgagcatcttcagcttcttcgcgaagtcagaagtggactcgtcaggattgcccttcgcgacgcgggaaacgaattcaagcgtatagggttcaacacccttcttgaagtcttcgatcgtgatctgccagtgattgccggcggggccgcccgcattcttctgctcaaccgcttcacccggagccttgcgctgggcgatagcttcatcctcagagaggaccttcttcacctgcttcgcctgggtatcacgctcagccggataggcaaacttctcggtcggacgcatgccgtaaccgatgtcatacggaccggtcgcgaagatgcagtgcttctcgatgaagtccttgtcgtagcagccgcggtgcatgatttcgcgaagaatgtagttcgcgatcgcgaggtccgtgttcggcttgaagatgatatcgacgtcagcaaaacgggaggagagcgtcggatgggtctggatattgaagatcttgtaacccgggttcgcgcgcttcgcggcaacgatgcggttccagagcaccgggtgggcttccgcggggttgttgccccagaggaccaggttctgcgtgatttccagatcgtgatagcaggcggacggctcgtcaacaccgaaggtctgatacataccgaccacggcggaagccatgcacagacgggcgttcgggtcgatgttattcgagcggaagccagccttcagaagtttcacaacggcgacgccttccggaatcgtgtactgaccggaaccgaaaatgccgacgccggtcgggccgagttcctgataggccttgcgccagtgcttctcgagctcgtcaaacgcttccttccaggacacaggctcaaacttgccgttcttatcgaacttgccgttcgtacggcgcatcaggggctgcgtgagacggtccttgccgtagataatctcagagttgtagtagcccttcatgcaggtgagaccgcgattcacttcgcagtccggatcacccttcgtggccacaatcttgccgttcttcgtaccgaccaggaggccgcagcccgtgccgcagaaacggcacacgcccttcgtccacttgatgccctgctcagcggcagcggcttcattcgcggcaataacagtgatcggaatgcctgcgatcttggctgcggaagcagcgacgccagccttcatcagacggcgacggctcacgcggaccgcagaaaccgggttctggttctccatttgcttctcctctttataccccgcagagcggcttattaagtgtgtgccgctttctgtcgggtggcgtccgccagagaatgctgcaggagtctcccgaactcctatttccccgggtttcagccgttgataaaactgctttaaatactgctttgtaaattactgctgttcttcttccgtatcttccaggttcgcgaccagagagacattctggatgccgggaagcgtgatcaaatccttgaagagatccgcctcgctctgaatcgtttcaccttcaatcacggcaataaagcgttcggcgtcaggatcccggtgataaatctcgagacccttcccttccacgctttgcacggctttctccagttctcccggatttgccgtgacgagtacgcctgaataaaacatctttcttttgtttccttcgtgtgagatgaacacatccggcagcctttattcctcgtgagaaaccgaggcgctgccacagggaaactctcctgacagagcccttgtccgagctctaccccgtagtgaggagcttccttagcgctgcggacttaagccggcagtcctaaacagactccctacggtaggtttatgaaaactgtattttaaagacagtattactccctgagtagtctctcagggatttcactgaagcgtatcgaaattgatactttctaccctatatagctatcacagttaggttttgggattaaagtcttatacgtttctttattcaatttattcatagcgttaataaaaaaggagtcccgaaggactcctttccccagacctgtccggtctaatgagccgcctcccaattctcacctacgccgaccgacgcaatgagggggacacgaagtgttgcaactccgtccatgatttcgggaagcttctctttcacggtctccacttcatcctccggcacttcaaggacgagttcatcatgcacctgaagcaccatgcggctcttaagccctgaggtttcaagccacttctcaaccgccaccatcgccattttgatcagatcggcggccgtcccctgcatcggggcgttaatggcctggcgttccgcgccggcccggaccgcggcccgtgagctcgtgatatccggcagccagagacgccgcccaaaagccgtttccacgtatccgcgttcatgcgcgagcttccgggtcttttccatatactcacgcaccttcgggtaacgcgtgaaatactgatcgatatagcccgcggcctcgccccggctgacaccgagattctgcgcgaggccgaacgcgctcatcccgtagatcaggccgaaattgatcaccttcgccatccggcgctgatccggcgtcacagcgtccggcgcgacaccgaaaacttctgaagccgtggcgcggtgcacatccatcccgtgccggaaagccgaaatcagcccgggatcttcggaaatatgcgccatgatccgaagctcgatctgggaatagtcagccgaaatgattttgcagcccctcggagcgatgaaagcctcgcgcaccttgcgcccttcctcagtccggaccgggatgttctgcagatttgggtccgaagatgccagacgcccggtcaccgcggtagcctgtccgaacgtcgtgtgcacccggccgtctccctcgaacaccatcttcgggagcttatcggtgtaggtgctcttcagtttgctgagagctcggtactcaagaatcgtcttcggaagcggataagtgagcgcaagttcggatagcacatcctcacccgttgaatagccgcccgaagccgttttcttgcctgccggaatcgcaagcttctcgaaaaggatgtgagagagctgcttaggcgacccgagattaaatttttctcccgcctcactccaggctttctcttcaagcttctcaatctcctcccccagcgcctcactctgacggtggagcagctctgtatcgatcagcgttccggtccgctccatacggaagagcacacgctcggtcggaagttcgatctcttcataaatgctcgtaagcttctgccccgggtcttccgcgagcttcatcgtgaaacgggcatgaagcgcccggattgccgcagcctgctcgacaccgcaccgggcagccttttcgggttccacctcgtgagtcgcctttttcgacgcgccttttccgaaaacttcttcagttcccggaatatcgcggtgcagccagcgaaggctcagacgctcaagctcatgacggttatgcgattcaagcacgtagtcttcaagcctcgtgtcatcgagcctgccggccccaggcgcgagaagatggatcccttcattcgccatcacgtgaagcacgaatttggcgctgtgcgcgactttcctcgcctttccctcgagccagggcttcagcccctcaatcaccctctgctgctcaggagtccgcattccagactcgcctgtcagcggcacataccagctccccacggggcctgcgctgatcgcgagtcccgtcagacgggcgcggagcggttccgtgctgtccgtaaaaatctgcatccccgcggggatctctgaattctctgcggcggagagcgcttcaagcgcctcgccgagcgtcggctcatccacaatcagcttataggcaaccgggtcctcagcggacgtcggcgtgagcggcatcagatctgaatccaccttcggaggaagcgccgcgaagagatccatctgagccccgggctgcggtccctcttcgcccggcttcttcacagcccgggcgagctgcttcttcgcgcggcttccgcctgtcttcatttcccagcggcgatagagcgcctcaagcgtctcctcatccggatcccggatcacgagatccgcttctgtcttcacttccggaatttcaaccgcggtacggattgtgacgagatcgcgcgctttatcaaggaacggaagtccctcacgcaggtattcgccgatcttccccttcacttcagaggcgtgctcgcggacaccgtcgagactcccgtactcagagatccactttgccgcggtcttcggaccgcacttattgatcccgggaacgttatcgaccttgtctcccatgagcgcgaggtaatcaatgatccgggaagggggaacgccgaatttcgcggtgacgcccgcttcatcgagcacctcgtgactcatcgtattgatcgtcacgatttcgccgtcctcaacgagctgattgagatccttgtctccggtcgcgataaagctcttgataccgcgggccttcgcccgggtggcaagggttccgattacatcatctgcctcaacgccttcctgaacgatgagcttccagcccatcgccacgacaaactcctgaatcgggcggatctggctcgcgagatcatccggcatcggcggacggttcgctttgtactccgggtagatgtcagatcggaacgtcttccccttcgcgtcaaaaacacagacgccgaagtccggcttcacgattgcccgaacggctcccagcattgagacgaaacccttgatcgcccctgtcggctctccggcactcgttctgagatcgggcagcgcgtgaaacgcccggaaaaggtaattcgatccgtctattaatagcagcgtctgtgacatggtctgttcctgtgaaacgggatgccctgaagatggcgtccgggaacaactctaaacgggtttcccgttttctgcattgcttagccacgaaaaaggccatccggctctgtcatcccccgtggagcatggcacaataatcctaaaagccgcgcactatgcggcgcacgaacagccgagttccccattgggcccccggtgcatttcaaaccccaaggagggatttcatgcttaaacaatttgcccttgcggttatcgcatccgccgctatcgctcttccggcgatcgcggctccggccactcccgccccctccgcggatgccgcggccaaaaccgcgaatcccgaggacgctaaccccctgcttccgacgaaagcggatatggaaaaggcccgcgctgagcgcgaggctggcaaggctcctgaaccgcctgccaaaaacactacgattcagcaggtgcgcgatcagaataaccgtgtggtcgagtacatcgtgactccgggttccactcatatcccgtatacgattgagaaccgttcagagcgccccgctgacgacacgccgggcggcaacccgaagagcaccaccggcacgacccgtcagattcatttcggctggtagccccctctttcacggacagacatcatggctgtatttactaccgttcctgaaatttccgcgaaagactttatttcgcgctggccggccggagccttccgctcgatcacaccgattgcgtccggcatcgaaaacacgaattacttcgtggatacagacaccggccgctgggtgctgacgatttttgagaagctcacggataagactcttcccttctatctctcgctgatggagcaccttggtgaaaaaggctgcgcggtcgcgcgccctctccggacgaagaacggcgaccttttcgatcactatgacggaaagcccgctattctcacgaaccgcctgccgggagaagacggccgggaagtcacggctccgacctgtgcctcgatgggtgaaacgcttgcccgcatgcatctcgcggttcaggacttcaagctctggcaggagaacccacggggtcttgcctggtggatagaaaccatcccgagaattcttcccattgtgccggccgacatccgaagcgggctcgcccacgagcttcaggctcagatcgcccttcagggaggagaagcttggaaagcgcttcccgccggagcctgtcactcagacctcttccgcaataacgcgaaagtctccgatatcggtaccgggcacgagcgcgttaccggggttttcgatttcttcttcgcgggctgtgtccccttcatttatgacctcgcggtcacgatgaatgactggtgcaccgatatgaagaccggggaattcattccggaacgcgaaaaggcgtttctcgacgcgtacgcctttgtgcgtccgctctcgggactcgaaaagcagatgtggcgcggggcgctctgcgccgcggcattccgcttctgggtgagccgtctttctgacttctatgaaccgcgggacgccgcgcttctgaagcctcacgacccggaagagttccgccgtattctcgtgaaccgccaggtctgtgatctttactggcctgaagcctcgaccgactgagcccatgagactatttgaacaaatccgactcggcacgggctggttccgcgacagtctgaagactgtcaggctgcagcccctgtccttcactgctgttgtcatcgcctacgctggcatcatggggcttcttggcctgatcccgatcgtaggcattgtgttcgcggggttcttctggccgttcggcaccatcatgattgccggggcgggccgcgatacgctcgcggggaaaattccgagcacgcggccgctcgccgaatccttcgccaaaccggatacgcgcctgcgtctcgtccgggccggcattctttattcgatcgttctcgtcacggcagccgcgatctggcagttcctcggcgcggatgaaatcgcgcagtggcagatcacgaaagatgaccgcgtggtctggagctccgcgcttcagcatattccgtacggagccatcatcgcctccacggctttctacattccgtgcatgatggcaatgtggttcacgccgctcctcatctatctgaagaatatgacgatcggaaaggcgcttttttattcgttcaccggctgtcttaccaatctcgcggccgtgatcacggcgctcttccttgccttcttcactttctccgtgatgatcggctgcgcctcggtgctgctcggtgtcatgggagccggatccatcgcgatctttgttctcctcccggtcacactcctcggaacggcaattttttacggtacctactacccgatgtggcgctccgtcttcagtgaggtgtctcacagcgacaccgcgcctgactacgagatgcccacgcgggtctgattccggcaatcttctggagatcatccatggcgtctgtcaaccagggtacggggaggaaatcctcccccgcgtccttcacatccatgacgccgcctgaagcccgggcggcatacgagaagctggccgccgcgacacccaggcgggcagaggtggaaacggtccgcgatatcgagatcccggcagaaaccggtaccttccgtggacggctttaccgtccgaaggaagccccggttccgggaggcgcggtgcttttctttcatggcggcggctgggtaatcggctctgttgacacgcatgacgctgcggtccggagtctcgcggcagcctccgggctcactgtaatctccgctgactaccggctggggcccgagtccccgatgccggccgcggcggatgacgcgcttgcgatcttccgctttattcagtctcacgcgtctgattacggcatcgatcccggaaagctcgctctttcaggtgacagcgccggggcgtctcttgccgcctcaaccgcggttgcctccgctgacactcctcagcgtccggcggccctccttctcttctatccgtcgcttgatcagcggcgggaagcggagtcactcgcttcgcgccggattttttccgagggcgggccggtgacaaaatcgctttctgactggtttgcctcgtacgcgctgaaaggcgtgagacgggacgacccccgggtgtccccaatggcctcccggtcactcgcggggctgccccccacaatgatcatcaccgcggaacacgatatccgtcacgacgaaggaaggcttttcgcgcagaggctcgatgccgctcgcgtcccggtcatctggtgcagtatccaggacgccgcgcacgggttccttgaaaagatcgggagccacgccgcgaaggaagcgcttcaggacgccgcgttcttcctgaagcagcggctcagcaccccataagcttcactctgaaaaaagttccggctgcgaaggcgtgccgcgtacgccttcgctccgtgacaccgataacccaacgagccgaacccccgacgcgggaatcgtgacatccgaaagcagctcttcagaaagccgccttacctcacggggatcctgtatcgggtgccccgccattttcgatcgggtaatctgacggaaatccgcgaacttcagtttcagtgtcagcgtgtccccgaggaatcggttgcgggcgagccgcctcatgagactcatttccaccggcagcagctcccgaagcacgtcttccgcacttcccgcgttccactcaagcgttgtctcagcgccgactgacttccggtcacggttcgggttcaccggccggggatcaattccgcgcgcaaagctgtaatagatttcccctgcggacccgaaaagccgcaccagttccgagagcggctgccgccgcagttcctctccggttgaaatcccaagaccatgcatttttttcgcggtcgcggggccgattccccagaaagactcaatcggaagctggtcaataaagcgcagcgcatcttcgggcttcacctcaaagagtccgtcaggcttcttccagtcgctcgcgattttcgcgaggaacttattaaaggaaacgccgatcgacgcgacaagcgagagttcctctcggatttcacgcttgattctgagcgcagcctctgtgccgctcgcgaacggaatcgggctctccgtgatatccagaaacgcttcatcgatcgaaatgggctgcaccagcggcgtgtagcggcggaaaatagcctggatcgcgcccgacacttccttatagcgctgcatattcgggtggatgaagatgagattcgggcacagctcttttgcgcggtaggacggcattgccgagtgaacaccgtaacgcctggcttcataactcgcggtcgcaaccactccccgcccttctcccctgccgaccgctatcggacggccccggagttccggatggtcgcgctgctcgacagacgcgtagaacgcgtccatgtcgacgtggagaattcttctgtaagccatatggaaaaagaatacaactgccgtcctgctcagcagactcctttaaggtatcatgagtgaccttgccccgggctgcaacgcggtgtcttttcagcccttttcaaggggctcgccgcatcacacactagctgtctcccggcaggagtccggataattctcgcatgtcttcagaaaaaccatcggccaaacttcatattgatgatgaaatgaagggaactgccgactttcctctttatggcgaacggatcgctgacatcctgccgcctgagcactttctctggcagcttcagggaagtttccccgggttcgatgatgagcttgccgggatgtaccgctcgcagaggagcctgaagcacatctcgaaagcgagctggcctgaagacatactgattccgggcgacttctacatgcagggaatcgtgattccgcagctgcgcggactgctcccgccgctctcctcaaaccccgaggatcatcccgaaaccggcaccgtggaggtgcaggaagagggtgggtttgaaggacaggatgaggaagctgcggaggatttcgacccggaaaccagtttcccggaagaaggagaagaggaagagtggcaggatccagtgagcggcgaaaatttcgagcaggttgtgtcgagcattcagtcacggctcgctgccggcagctgggaagtctataaggacgtgatcgcgtacccgccggaagttttccgtcagatcgtgcgggacggagaggggcttacgggattcatccccaaggcgctcctcaataaccttcacacactcgctttctggctctccttctcaggacttgatttcgagctccatggtgagcggtgcctcggctgcttcatcttccgggggcagaacatcgcgggcggcatgtcgcttaacctcggctttgtaacgaagaactcatactatgactacgcgatcccgctcaccgtgcacgcgtcactcgaatacatcatcgagagttccacggaattcatggctcaggacccagccaccgaacctccgatgagcgaaaaggaaaaggcctccgtgaacgaggatctgaaagatgcctggaagcgggtcttcccggtgatcgtgcatctcttcacgcatttcccggaagacctgtcggtccgccgccgcggaagcccttcacgcgccatcatgaaacctgaagggatgaacagccccgtggtgaactattggaagtgggttccggaagaggagcgcttccgctacgatcgggttccggcgctgctgaagggaaaactccggaacgtattcctccgcgaattcgtcgagggggaaaagaacagcccgattgaggtggctcctgaacctggtgtcccgccgacactgaactgagagtccgggaaaacgattttcaggcaaaaatttcgggaggcgacttgatgtcggcctcccgttttttatcccgattcagactcagcctcgtgtccgggtcttcatgagacgctgacgatcgcgttcccactgcttcttcgattcatcagcgcgcttctcgaattcacgcttgccttttgcaagtgcgagcgtcatcttcacgcggccccggctgaaatgaagatccagcggaatcagcgaatagccctgccgctccacgcggccgatcaggcgcatgatttcgcggcgatgcatcagcaccttgcgtgtacgggtaggattcgcgcgctcgtgcgttgagatttcatccgtcgggttcatgtgggcgttgctcagccacagctcgccgccatactcatagacgtggctgtcgccgatctgcacacggcccgcgcggacgctcttcacttcccagcctttcagaaccagaccgcattcaaacttttcttcaatcgcatagttgaaatgcgcttttcggttgacgatatgtggattgtcagatggcacagcttttacccgaaggaatatgtaaaaaaacacgtagaatgacggatcattttagcaatgtatggcgtgatacgtccggaggtgaactgatgacggaagagctgattcggatccgcgtctgcgggattgataaagatggtgcgggccgcgagtacagcatcacggttccatccggatcaaccgcgatggaggccgcactggaaggggcccggaagtttgggcttcagatgccggaagaggccgcgctgtcgctctggggacgccgtgcggatccttcggccccgctttcagacggcgaccgcgtcgaaatcacgctccctctcaccattgacccgaatgacgcccgacggctccgggcggcccgagcgggacaccgggcggcttttgcccagggccgtcacggcggaaagcaccggctcgcctgaagcagggaccctagatttcctttccggcaaactgagcctcatagagttcagcgtagcggccccgctgcttcagcagctcctcatgcgttccggactcagcgattcgccccgaatccatgactaccacaagatccgcgtcctcaatcgttgaaaggcggtgcgcgatcacaatactcgtgcggcgctccatcacgcgctgcatcgcgcgctgaatcgatttttcagtccgggtatccacgctcgatgtggcctcatccagaatcagaatatccggattcgcgacaaatgcccgggcaatagcgagcagctgccgctcacccgcgctgagcgtcacgccgcctcggccgattctggcatcgagcccgcccggaagcgcccggatcagatcatcacagtgactcatctcggctgcccgcatcagctcctcatccgtcgcgtcacgtttcccgtaggagaggttattgcggaccgtatctgaaaaaagcacggtatcctgcagcacaacggcaatccgccgcctcaggctctgacgcgaatacccgcggatatcgtgacctccgaccaggatcgaaccgctgtccggctcatagaaccggagaaggaggttggagagcgtcgtcttgccgcttcccgtcgcgccgacaagggcgaccttctttccagccggcactctgagactgagatcatgtatcaccgggtgccccggctcgtaggagaagttcacatgccggaactcaacttctgaacctgaaataacgggcgcttccgcgccgtccttcggctcaggcttctgatcaagaatatagaaaacgcgctccgccccggccaccgcggtctggagctgcccatacaccatggagagctcattcaccgggcggctgaactgtctcacatacataagaaacgcggcaatcacgcccacggtgatgacgcccttgaacgcgagccatccgccgaaggccgccacgatgacaaagctgatattcccgatcgcgttcatcaccggtccgaagattccgctcagggtttcggtccggaccccggcctttgtcagacgttcagacgtctcttcaaacgaccggataacggaagcctcccgcccgtaggccgagaccgtacggaaaccggctaccgtttcttccacggtgccattcagggttccaagctccttctgccggcttcttgaattccggcggaccggtttggagagaagactggtcgagagcaccgtcagcagtacgctcacaaagctgagaagcgcgagctgccagcagaaccagagcatcacggccgctgttccggtaatcatgagaattccggaaatgaaggtcgggagcgacatcgagacggtggacgaaatgttatcgatgtcgtttgtcatccggctcatcaggtcgccgtgggagtggcggtcaatgaaggcgatcggcagcgtgatcgtctgactgaagagatcccgcctcagacgcttgatgagacgctgccccagcttcgcgcagaaccacccctgcatggtctgcagcacgctgtagaagacggagagcccggcaaagagcgcgagaatccggaggagactcccttccctctcccccgcgatgatgtcaaccgcgtgactctgaagcgccgggataatcagcgcgcaggcggttcccatcagcaccaccgcgagaatcacggtgagcagcatcttctcgtgaccgaagaacttcaaaagccggatcagggattcacggccgtgctccgctttctcatgctcagcgaaccaggaaccccggcgtgagctgcccgaattcttcttttccatttcacgccctccccgactgagaggccgcgatttcctgatacgcggcgcagttttggaggagttcatcgtgagtcccgactccggctatccgccccttctcaagcacaatgatccggtccgcccgccgcgccgtggaaatccgctgagcaacgacgatcttcgtaacacccggggcgaacctagacagggcgctgaaaaacgcggcctcggttttggtgtcaagagcgcttgtcgcgtcatccagaatgagaatttcagcgggcttaagaatcgcccgcgccagtgcgatcctctgcctctggcctccggagagactggtgccgccctcagtcagcagcgtatcgtagccttccggcagcttcgcgataaattcatccgcctgcgcggccgcggccgccgcgcggatttcctcgtccgtcgcgtcaggcttcccccaggagatgttttctctcaccgtcgcgctgaagagctcactcttctgaagcgcgaaggagactttcccgagaagcgcctcgcggctataagatctgacatccagcccgtcaatcagcacggttccggcatccgggtcataaaaacggggtatcagccccgcaaacgcggttttcccgcatcccgtcgcccccatgacggcaacggtttctccgctccgaatccgaagcgagacaccggaaaagatgggagacgcgagtctcgggtacccgaaggtgacatcccggaattccacttcgccctgaggaccggggcctgtcgccgcgtcaccgtagcggaatcctggcgttacggtcagaacttccctaagacgccgccaagaggcaaaaccccgggcaatcatctgagaaagcatcacgagaatcagaatggaaacaagaagccgcccggtgtacgtgatacccgccatgatttcacccggtgtcgccgcgccggatcccgtcagaacggagccccggtagaggagcgccaccaccacgagactcatcaggagattcatcgccgggctgagaaacgaaaacgcgagcaggatcttcagctgcatccggatcaggcggttattggcccttccgaagcggatccgctcgtaaagctcgcggccgaaagccttgattacgcggattccggagatatcttcctgcaggatttcattcagctgatcgagcctcgactgcagcttcggaaaaagcggtttcacccaggcgacgcaacccgcggcgcagaacgccatcacaggaaccgccgcaagaacaatcagcccgaattccggattcaggcgatgcatgaagtagatgcttcccgcaatcatgagcgtggtgcggacgccgccccggatcagctgggaaacgagcgactgaacctgcgagacatcgtttgtcatgcgggtaatcagggtgccgctcccgaaggaatcaagctgaggaaaggaaaaccgcataatccgccggaacaccttctttctcacatcgttcccgatattctgtgacgtgaggttcacgaatacgctgttcagcgacccgcagacagcgcctcccgccacaatggcgatcatggtgaatccgagaagcagaatatcccgggcgctcccctgcccgccatccgtcagcccgagaacccccttatcgacaagggtctgcatgagagagggcagaagaaggtccgccgctacttcagccgccataaagagcacggctaggaaggcaaaaacccgatactttctgaaatacggccacatggtctgaatacgcgcggttaagggaccggggaatgcccggaatacaaaagtccttatgttaacgattcttatttacgtttgtaaggatctgccgcgaaaaagccccttcttttaaaacccggggctgttttccgccgctcttgaaaccattctccgcttctttccggcgttctgcccggcagaccccctccaggcggggattccgcattaggtttcccgcgggaattcagggaaactttttatatagatatttatttaataacctatccagacaaaaacaaaccctgcctcagattgaagaagcagggctgcgcgtctggcggaaggggtgagattcgaactcacggaagttttgaagcttcgtcggttttcaagaccgatgcattaaaccgctctgccacccttccattgacgatggatttcgaattctaccgtcagagggggataaaggcaaatgccctgctccccctttgcgaagaatcagacctcgctcgggccgttctcaagattaaaggcgtgatgcagcacgcggaccgcgagttccgtgtacttttcatccaccacgaggctcaccttgatttcggaggtgctgatcatcatgatgttgatgccctcttccgacagcgccttgaacatgcgggaagccacaccggagtgggagcgcatgccgatgccgaccaccgaaatcttggcgatgtgatcgttcgtctcgacggggccgccgccgacaaccgggatcaccttcttattcagcacttcaagcgtgttctccaggtcaccgcgcggaaccgtgaaagtaaagtccgtctttccttcaacgctcacgttctggacaatcatgtccacttcgatattcgcttcagcgatcggtcccagaatgttcgacgcgacgccgggcatgtccggaacgttatgcagcgtaaccttggcatcgctgcgggaagcggcaatgccggacacgagagctttttccatcattttgggatcatcctcataggtaatcagggtgccggagacggcctcgacttcgaccggcagatccggatctgtgaggctggaaaggactcggcagggaaccttgaacttgcccgcgaattcaacggagcggatctgcagcaccttggaaccggcgctcgcgagttcaagcatctcctcaaaagaaatactgttcagacgctttgcttccggcacaatgcgggggtcggtcgtataaacgccatccacatccgtaaagatcaggcactcgtcagcgtgaagcgctgccgcgatcgcgacagcggacgtgtccgaaccgccgcggccaagcgtcgtaatgttgccttcggggtccacaccctggaaacctgccaccacaaccacgcggccgcgcttcagctcctcacggattctgaaatcatcgatcgtatcgatgcgggccttcatataggagttatcggtgtgaacagcaacctgccatccggtcaggctcaccgcgtcgaccccgatatctttcagcgccatcgcgaggaggccgatagacacctgctcaccggttgtcgcgatgacatcaagttcgcggggatccgggcggggcgacacttccttagctagggccagaaggcggttggtctcgccgctcatcgcggagacaatgaccaccacctggtggcctgcctggcgccacttagcgacacggcgggcgacattgcgaatgcgctcgggagagcccatcgaagtgccgccgtacttgtgaacaatcagagacatggtttgtttctcagtgggacataaattaaggtcccgaaagaggaaagcgggaacattcacccgcctccggtttcgggaagcgtattaagaaagatagcccagagaaccctctgccgggtataaaactttcactgatcccctgaatgcagtagggaaagttatttacttttcctggactatatgccaaagagcggtttatccggctcccaggagacgacccaacggtccggagatgtgcgtccggagccgtccggatgctcaagcttccggacttcagggccgagccccgccgcataaatcagatcctcgccgcaccagagaagcgggagatccccccgctcaaaggacggaataccggccgcctgatagagatgcttcagattgcggctcgggcgaagccggtaaagcttgatcttctcgccgccccgtctggcccggacttcaagagggcccgtccgcagcagttccccgggaaacccatcctcgtccgcttccgcgggtctgaaggcgagaacaccgccccagggggccagttccacctcgcgttcgccgttccagacaaaagaaacggttttcgacgtatcacgcaccggtttcgcgtaaggatgaagaacaatatccgcaccccagcggcggatatcccaggcgccgagccggatcgtgagcgcggtgtctgagtgtgtctgcttcgcctgacggagcgcctcgatcagcgtcgcgcgagggggcggctcaatcccgtaggaggaaatccaggccctgaggcagagcgcctgacggggcaccgagaggttgaggagagaggcgatcttcagcgcccgggggcgggttttatccgtgcagcgggcaacgtcttccgccgccaccgaatgaagcacggtgcccgcttccgtcacaagttccaccgagcggctcgcggcctttctgaatccgggccgggccttatccagcaccggcagcacttcatgccggatcagattcctgagaaacgccgtatcgtcgttactctcatcatccacccaggcgagctcccgggccttcgcccaggcttcaatccaggctctcggaatatcgagccagggccgggcaagaagcaatccgttttcgccgaactcccgcacagcgggcatgccggagagtccatcgaccccggccccacgcatccactgaaggaggaaagtttcaagcctgtcatcctggtgatgcgcggtgaggatgacatcaagtttcagctcacgcgcggcagacgcgagagcccggtagcgttcttctcgggccgccgcctcaagcccctttcccttccggtccacgcggacctggtacgccgagaacggaatgcggcgggcgtcgcagaacgcccggcaggtggattcccaggagtcggcattttctgaaatgccgtgattcacgtgaagggcataaaggccttcgatcaggccgccccagcggcgggaccgtgtcagccggtgcgcggcttcaagtagcgccatggagtcgcggccgcctgaaaaagcgattccgacttgaagcggccgctcaagaggctgaaggatatcgtcagaacggccccggatcgtggcgcagacctgtttcaggctttccgccagcgcttcaagaagcttttcctcaagcgtccgtacgccgggaaccgcgttctgtgcttttcgctccatcctcgctccttcggcccctcaccgggggacgtgcttaattggcctctttcttctccgctgcttcagccgatgccgcgccggtcgctttcgccgcgcgggacttcgcaggcttcgtttccttggtgtccgcggcttccttcgcttcaggagccgccggagccgcggtctttgccgcggcttcgcgttccgccttcgcctcagcgatcttcgcggtcttcgcggcatcgcgggccgcgatcgcctcggcgcggatcttctccgcttcggcagctgtcaccgtctcgtactcgccgtaacgcatgatgcggttcagacggcgggcgatcagcttctcaggcgtaaagcggcgcagatatttcatccggtccgtcagattcttgcggagcgtcttcgccatcagttccggatcgcggtgagcgccgcccatcggctccagcacgatctcatcgatcagcttcagttccttcaggcggtcagcggtcagcgcgagagcgttcgcggcttcagaggcgcggcccgcgtccttccagagaatggaggcgcagccctcagggctgatcacggagtacgtcgaatactgcagcatcagaacggagtccgccacggcgatcgcgagcgcgccgccggaaccgccttcaccgatgatcgtcgtgataaccggaaccgagatatgcgtgagctctacgagattccggccgatcgcctcggactgcccgtgcttctcagcgtcaatgccagggtaagcgcccggggtatcaacaaacgtgatgatcgggagaccgaacttctcggcaagcttcatcaggcgaagcgccttccggtacccttcggggtttgccatgccgaagttgcggtacgtacggctcttgatgtcacggcccttctgatgcccgatcaccatcacggggtcaccgccaagacgcgcgagaccgccgacaatcgccggatcatcactgtagcggcggtcgccgtgcagctcatagaaatcggagaacatcatccggatgtagtcgagcgtatacgggcggttcgggtggcgggccacctgggaaatctgccacggggtcagttccgcgtaggtctgcttcagaagctcggcagacttctgctcgagacggtcgacctcttcaccgatatccattgacggatccgactcctgcatggagcgcagttcgtcaatcttttcgtcaagagcctcaatgtccttttcaaagtcaaggaaagtttttttcacgatttcatccaatagatagccggcggccggaagcgctgaggctcccgggacgcgggccttgtctttccgatattccctgtagtttagcggctatgggctgaaaagaaaaaagcgggacctcatccgtacggacgaagccccgcgttacccggcgtcttactgagactcagccgggactctttttacgctctgcgccagacagtgccttccgccttgtcgagcagcgtaatgcccttcgcgagcagctcgtcccggatctcatccgcgcgggcaaagttcctcgctttcttcgcggccgcgcgctcatcgatgaggcggcggatctccgcctcatcaagcccttcggtcgctcccttcaggaacaccgccggatccttctgcaggatattcagcacagcgccgagccccttcagctgccgcacgagagccggatccccggtacggttcacttcggtcgcgagactgaagagctgcgccaccgcgaccggcgtattgaagtcatcatccatcgcgtccgcgaacgccgcggcattcggctcattccagtcgagcggcttcccatcaccctcgcgcccctggagtgcctcataaagcctcgtgagtcccttatgggcgtcgacgatcaggtccgggttaaaggagatcgggctccggtactgcgtccggagaaggaagaagcgaagcacctcagcgccgtttccagccccgaactgctcatcggtttccttcagcgcgtcgcggatcgtccagaaattgtggagcgacttgctcatcttttcttctgtgccgtccgcggaacggacgcgaagcggaccagagtgcatccagtagttcgcgaacttctttccgttcgccgcttcgctctgcgccacttcgttctcgtgatgcgggaagatgaggtcaggaccgccgccatgaatatcgaaattttccccgagatagtggcagctcatggctgagcactcgatatgccagcccggacggccggcaccccagcggctttcccactgcggctcacccggcttcgctttcttccagagcacaaagtcgagaggatcacgcttcccttccgcgacatcaatacgcgcgccggactgcagatcatcgatgctctttccggaaagcttcccgtaggccgggaacttacggaccgcgtaatccacgtctccgtcgccgccgacataggcgtagcccttatcgacgagttttccgatgatgccaagcatctgcggaatgaaatccgtcgcgtgaggctcataggtcgggggaaggcagccgagagactccatatcttcctgcatcgccttcgtatagaaatccgtcagttcttttgtcgaaatgcctttctcggccgcgcggcggatgatcttgtcatccacatccgtgacattccggacaaaggtgacctcgtttccccgctccatcagccagcggcggatcacgtcaaacgccacaaaggtgcggccgtgcccgatgtggcagtagtcatagaccgtcaccccgcagacatacatccccacctttccctctttgatgggtttgaaggtttcctttttgcggctcattgtggagtaaagcgtcagaggtttcgtgatagtcatatgggcagtgcccctccaggacagaattggctctcggatcggaaagccgcggacgcggaccgcgggacctctcttcccgcggttccggtgctttccctttcgagcggttaaaatcgtgggaaaagtatagccgttcagaatcgccctcagcggacagcggtcccggttttgcccggccgctttgcggcttttctcattttttctaggtctgatacctcatgctgaagcacactttcagaagcgcggcgcttgccctcttcattagcctcgcggccgttccggctttttcacagacggtcctttacccgattcccgagcagcagaaggctccggagactgagcaggactatccgatcttcgtgaaccggatgatcgcggacggaaactacacgaaggcgctccagtacgcggatgagggcctcgccaaaaataagcggaatgtcgccctgatgtttaagcgcgcgacgattctcgagcacctgggacggcgggatgaagcgatggcagcctatcagcagctgatcaacgcctaccccgagattccggagccttataacaacctcgccatcttgacggctgacggcggcaagggcgatatcgatcacgcgattgagctccttgaccgggcgatcaccgcgaacccgaacttcgcgacggcacacgaaaatctgggagacctttacgcgctgaaggctctgcagaattaccgtcttgggatgccggcgaacactcccgcaaaccgcgacgcccgccgccgcgtaagtgaaaaaatcgcgatgctgcagatagcgaccgggaacgacccggacccggatctgctgaagcagccgggggcggaaaagattccggcgcttcaggaaaagcccgcggcgaaagcggacccaattgaagcgaagcggagcgccgccgcggctgccgtgctgaagaaccgcgcggcacagagaaccgctccggccaaagcggcctccaacgcggtgaccacgaccactggcggcatcacggaaacggttcagaaaatcgcggctcccgcggctgcctccccggcacaggcttcagcaccgcagcctggcagctacagcgcgaaggaaaacggtaccgggagcaccacgaagagcacgctcttcaagccgcttcccgaactgaactgagactcaacacaccgggcatgaaccgctacaatgggatgcctctcaggcgggagtccgaaccggctcttttttccggtttcttcccccgctgagccacttaattaccagttaccagcaagaggactgacagcatgattcgtcttacgaccaaccagggcacgattgaacttgagctcgacagcgaaaaagctccgatcaccgcgaagaacttcgaacgctatgtcaccgaagggttctacgacggcaccatcttccaccgcgtcatcaagggcttcatgatccagggcggcggcttcacggccggcatgagcgagaagcagactcacgatccgatcgtgaacgaggcgaagaacggcctgaagaacgacaagtacacgatcgcgatggcccgcacgagtgacccggactccgctaccgcccagttcttcatcaatgttgccaataacgatttcctcaactacaacccgggcaatccggggtatgctgttttcggccgtgtgacgaagggcaccgaggtggtggacgccatcgccaaggtccgcaccggacgccgcggctggtacgacgatgtgccgcttgaagacatcgtcatcctcaaggccgaagcgctgtaacaaggcctccgggcgcagcctgcgcccggggaacggacctgcaaaggaaaaggaatcgcttgagaaatggctgaaatgattgcgccggctcttgccggcaccaaagaaatagctccgcttgaaaatccggttttcatctcggacctgcatctcgctccggagcacgataagacgctgatgcagttcttccgcttcatgaagacgcaggtgccttactacagcgagctcgtgattctcggcgaccttttcgatttctggctcggtgacgacaccatttcgtccgcggagtccgtagtcaaggcgctcgcctacgcttcctccatcgggaagcgcgttctgattgctcaggggaaccgtgacgtgatgctcggccgtgattttgccgcggcctgcggcgccacgcttctcgcgcctgaagtcgcggtgaagtgcattgggaaaaccatccttctctcacacggcgatgagtggtgcacgaaggacgaggagtatcagaagttccgagcgatgacccgcgacccgcagtggcagctctccgcgctcagccttccggttgagaagcgtattgagcttgcccgccaggcgcgcgctcagtccgaaaccacgaagggcagcaaatccgccgccatcatggatgtggtggatgtggatgtctacaaggccgccaaggcgcataacgcggatatcgtgattcacggtcacacgcataagccggcgagccacgaactcgcggatatcgagcgctgggtgattcccgactgggatctcgattccggcgaaggaaaagatcactggggctatatccgcacggtgaacggtcagcgcctgcagatcatcatgtaagccgcgcgctgcccgcgctattgaaggagaagattccgcgcctcacggccggatctcctccttttttttgtgtccgcgttattcttagattcagccggaatccgctcttactccagaaggagactctatgtctgcgacacctaaccccatgaccgatacgcttcgcgcccacacctcagtccgggcttttactgatgaaccggtgagccaggaagatctcgaagcgatttatgaatccgcccgcgcggcaagctccacctgctttctgcaggtcaccacggttatccggatcacggataaggaactgaaggcgaagctcgcggaactcgccggcaatcagaagcacatcattgcggctcctgagttctgggtgttctgcgcggattatcaccgcgatcaggtcctcgtgccgaaggcggatctcggctggaccgagcagctgattgtgggctgcgtggatgccgcgattcaggctcagaacgcctttgccgcgcttgaagctctgggactcggaggagtttacgcgggcggcatccggaatcacattgaggaagtggaccgcctccttaagcttccgcagaacaccttcccggtggtcggcctcgcgttcggacaccccgctcataagaatgaactgaaaccccggctccccgcctccatcacgctctgcgaaaacgcctatcaggaaccggatccggcggaactgaaagcctacgatgagcagatgaggaactattaccagcatcgctcatccaacgctaaagacaccgcctggtctgatgagctcgaaagaattctgcttcgcgaacggcgtccgttcgtcctcggattcctgcagaagaagggattcgcggaaaagtaagagaatccgcttccaaaagaaaaccggcattttcaaggagtctccccgaaaaatgccggttcttttttatgaagcagatcagtccgccgaatggacttcagagcgccgagtcaaggaatgaccgttccgcggggtcctcaatcgccggagcgtccgcttcatcaagccccttcagtttcgcgatttcgcgctccaggcgattaatcgtatcgcgctggacatccagttccttacgcacctgattaaaggcccgcgtcaccggatcctcagcgccttcaacaacaccgtatgcgctgaagtgctcgtgatccgcctgttttgcggctttcttttcaccggccacatgtcccggaacgccgacaatcgtcgcgttcgccgcgatcggcttcaggcagaccgcgttcgagccgattctggcgttccgcccgacagtccatccgccgagcaccttcgcgccggcaccgacaatgacaccgggttcaagcgtcggatgacgcttttcacctcgcccgagactcgtgccgccgagcgtcacaccctggtaaatcgtgcagtcatctcccacctcggcggtttcaccgatcactgtgcccataccgtggtcaataaagacacggcgtccgatttttgcccccggatgaatctcgatcccggtgagaaaccgggcaacatgactcacccagcgggcgaaggtataccagccctggatccagcaccagtgactcagccgccagaactgcaccgcgtgaaacccgggataggcgagtagcacttcaagcgtgctgtggcacgccgggtctcgctcccggatgatctggatatcttctctcactcgctcaaacatggaaatcagtccttaaggttctggcaggatccgcctatattacccgactttttcactcgggtttaagcgggcgtcaaaatttatttcggttcggatttcttcccggctttcttctgccccttccgttcggttttcgggcagatgatggccgcgcacacgccccgcagcatgtcgacttccggctgcgtaagacctgcgcgggcaataatccggcgggtcatcggcatcagaaacttgggttctgccgaattgagagccccgcaggctgtcatcgcgcgggcccagtgctcaaggaagccttcaatcgcgggcacttctgccgggggatcccggtcgaaacgggtttcccagtcgtagagcttgccctcttccccagcccggctgcgctccgtcatatgaagttcatacgcggtcacctgcacggactgcgcaagattaaggctcgggctctcaggatccgcggggatggctgcgatcccctgacagacctcgatctccgcgttcgtgagaccgctgcgttccgtaccgaacacaaacgcgatgtcaccgggttcagacgcgaggaaatcgcaggcgcgggaagccgcggaccggagttcctcgatcgggggaccgtactcacggtcataccccgaaagcgcccaggcaaaggtaactccattcagcgcctcagtcagcgtcgcgactgaatggctctcccgcaggacgtcgaccgagcttgtcgaaagcgcgatcgcgtccggatgctcccgataatccgggtgcttcggattcaccacccaaaggtctctgaagcccatcgttttgattgcccgggcggcggcaccgatgttcgcggggagactggggtcgcagaggacaaacctcacccgggaagccttgttaggagtctgcatttcctgatactcacgcataaagctgaattgaaacctgaagatggtaacagctttaggcgagggtgccgcctcccatccccgcttttccgctgtatccttctgtcgccggaattatttttactcgttaaaataacggtctctttattgcagggaaaaatcacgcctgggcactctatcgtcccccctcgttctcttttccccgatccacttatcccattaacaaccaggtgcatctgaacatatggccaacatagacatcgccatccgtgcggcccgcgaagcagccgacatcatcaaccaggcttcccgcaacatcgaaaacgtcaacgtccagacgaaagctcttcatgactacgtcaccgacgcggacaaggccgccgagcgcgctgtcatcgatattctgtctcactactgcccggatcacgccattctttccgaagaggccgggcttgtcggtcagacgaattccgagtttgtctgggtcgtggatccgatcgacggcacgacgaacttcattcatggcttcccgcagtacgccgtgtcgatcgcgctgaagcgcgggaacgacattctcgaagctgtggtctacgatccgctgaaggatgagatgttcaccgcgacccgcggcgaaggtgcccgcctcaataaccgccgtatccgcgtttccggccgtacgagctttggcgcttcgctgatcggcacgggcttccccttccgcggcggtgatgacttcgagggctatgcccgtgtcttcacttctgtcgcgaagcagacgtccggcatccgccgcgcaggcgctgcctcactcgacctcgcttacgtcgcctgcggccgtctcgacggtttctgggaaagcggtctgaagccctgggacattgccgccggctccctcctcgttcttgaagcgcgcggtctcgtgactgacttcgagggcgacgaccactatctcgacaccggctccatcgtcgccggtacgccgaagatcttcggaacgctcttcccgatcgttaccaacaaggtcgcctgagtacggcagcggtctgaaacttcagacactctctgaatcggggcggttcatttctgaatgagccgccctttttctattctctcttggcatacaggataaaatttcaccctgcccgcttttcttcaatccccgggagacgctttacaaagtgaccaagcccagccttaaccaatccacagagaacgctgatctctccacgctcacccctgccatgcggcagtttattgaaatccgcacagaggtcgcgaagcagcatccgaatatcctgctcctctaccggatgggagacttctacgaaacgttttttgaagacgcggtggaaatcaacaggcttctcggcatcactctcacgagccgcggaaagggtaagccggatgccattccgatggcgggcgtccccttcatg

SEQ ID NO: 1321 - DNA, 1329 bp, Unknown
  gut microbiota DNA sequence
caggcttacagaacgctcccctaccactcacactcaaagtgtgaatccgcagcttcggttatcaacttagccccgttacatcttccgcgcggaaggactcgatcagtgagctattacgctttctttgaaggatggctgcttctaagccaacttcctgactgttttagcctttccacttcgttttccacttagctgatattagggaccttagctggcggtctgggttgattcccttttgagtccggacgttagcacccggtgctctgtctcctgcgcgaagctttctggtattcggagtttgccatagtttggtaagacgccatgtccccctagctataacagtgctctacccccagaagctcatgcgcaaggcactacctcaatagttttcggggagaaccagctatctccagatttgttaagcctttcacccctaaccacagctcatcctctggttttgcaacaccagtaggttcggccctccagtgtgtgttaccacaccttcagcctggccatggttagctcatctggtttcgggtctatgccatgcgactgaatcgccctgttcggactcgctttcgctgcgcctcccctagtcggttaggcttgccacataacataagtcgctgacccattatgcaaaaggtacgcagtcaccccgaagggctcctactgtttgtatgcatgcggtttcagaatctatttcactcccctcccggggttcttttaacctttccttcacagtactagtacgctatcggtcgatcacgagtatttagccttggaggatggtccccccatgttcagccagggtttcacgtgccccgacctacttttcgaatcctcagtaccttgagatgaacgtcccgtacggggctatcacccactatggcgagcctttccagactcttccagtgttcttctcaatatcgaattcaggctgttccggtttcgctcgccgctacttccggaatctcggttgatttcttttcctgcagctactgagatgtttcagttcgccgcgttcgcctccatgcgctatgtattcacgcatggatcaagctaaagcttggagttccctcattcggagatccccggatcaaagctcgttgtcagctccccggggcttttcgcagactgccgcgtccttcatcgcctgtgatcgccaaggcatccaccacatgcacttagtcgcttgatcctataaccctgccgccttttacccggcacggtttcaatcgacttgtaacgtgtcgctgttctctaaatgttgcttcggtttcttggagaaacttgcaaatttgtgaatgcaatcacaacccatgttca

SEQ ID NO: 1322 - DNA, 8500 bp, Unknown
  gut microbiota DNA sequence
cttaactttttgggtcagtctaggttccaatcaggaatccggccccttttctctctcctcagaaaacttctagcgtcttacggcaaactgcgggaaaagcgatctcagttttgcctgaagttccggactcggatagtccggaggacagttcgggtaaagtgactcagactcaaatcccggcggcacacggaagggctgcagcgcataggacttcacgccttttgccgcgagcgacacaccaatcccgagcagctgctcctcagaaagaaaagccgggtggcaggtggtgcggcattcaaaaggaacacctgaagctttcagaatatccagactgtcgagcgttttctcttcccctgcgccaacccggataatgttcctgaaagccgcaggatcagtgagcggtgccttgatatcaagccccacccagtcgatatccggaaggatctccttcagaaccgcggggtaagcacccgacgtgtgcaccgccaccagaaatccctgtgacttcaccgccttgattgctgccggcagcgcagggtctgagagcggttcgccgccggaaaaaacaacgccatccagaagccccttccggcggctgagaagcgcggtgagcgactcccagctttcgtgctcatactgcggatcaaacttaaaggggcgcagccagggattctggcaatacgtgcagtcccaggggcagccctgaataaaagcgactgccgccagtttccccgggaagtctatcgtcgtaaatgacgtgatcgctccgacccgcagtccttcaggacctctttcaggcgtcatgcctccatccctcaggcattcgccttttcagccggacgggcaagaccgcagtgctcttccgtgaagaacttgcgctcgagaaattcgccgaccttgcctttattgaaggactgcaccggacggtgatatcccatcacgcgagtccacacttcgcacttctgacgctcggaatctttcagaaccacttcagaggatttttcttccatcattcgtctcctgtttcactattcaaagtctagtcagcctacgcagccttggcagcctgcgaggcatttgccactgcggcttccgccttcttcttcgcgagaagctcagcgtcgcagtacgggcagaaatcatggcgccctgagatatacccatgcttcgggcagatcgagaaagtcggggtcaccgtgatgtacggcaggcggaatgtcgtcaggacacgccgtacgagctctctgcaggcttcagcggacgacaccgcctcattcatgtagagatgcagaaccgtgccgccggtgtatttcttctgcaggtcatcctgcatttcaagagcgaggaacggatcatccgtatatccaaccggcagctgggagctgttcgtgtagtacggatgctccggtgtacccgcctggagaatatccgggaagcgtttcttatcttccttcgcgaaccggtaagtcgtgccctcagcaggcgtcgcttcgaggttatacatatggccggtttcggtctggaattccaccatgcggctgcggacgtgatccagcatcttcagcgcgaaagcatgaccccagtcatcggtgatgtcatgctcgtcgttcgtgaagttacggatcatttcattcatgccgttcacgccgatcgtggagaaatgattgcggagtgtgccgagataacgcttggtgtacgggaagagcccctgatccatatagcgctggatcacctttctcttcacttcaagcgagtcgcgggccatttccagcaaatgatcaaggcgcttgtagagaccttcctcatcggacttgaagagatagccaagccgcgcgcagttgatcgtgaccacaccgatggatcccgtctgctccgcggaaccgaagagaccgttgcctcgcttcaggagctcccgcaggtcaagctgcaggcggcagcacatcgagcggatcatgttcggtttcagatccgaattaatgaagttctggaaatacggaagaccgtacttcgccgtcatccggaagaggagcagggtattcgggctgtcccagtcgaaatccttggtgatgttgtaggtcgggatcgggaacgtgaagacacggcccttcgagtcccccttcatcatgacttctatataggcccggttgatcatgtccatttcgggcttcagttcaccataggtgaagggctgctcctcgcccgcgatcaccggatgctgatttctcagatcctccgggcacacccagtcaaacgtgagattcgtaaacggcgtctgcgtgccccagcgggacggcacattcaggttataaatcagctcctgaatgctctgaagaacctcctcgtatggcagattgtccttacggatgtaaggggccatataggtgtcaaacgaagaaaatgcctgcgcacccgcccactcgttctgcatcgtgccaaggaaattcacgatctgaccggcggcggaggagaaatgcttcggcgccccggcttccaccttcccgggaacgccattcaggccttcctgcagaagcgtacggagcgaccatccggcgcagtagccggacagcatatcgagatcgtggatatgaagatcgccattccggtgagcgagcccaatctccggcgcgtagatcgaattcagccagtagttcgcgacgactttccctgacacattcagaatcaggccgccaagcgagtagccctggttcgcgttggcgtttacgcgccagtcaagctgattcagatactcattgatcgaggactcaacatcaatccagctgtgcttcgcgtcgcgctgtttcgcgtgctgctcgcgataaacaatgtaggcgcggagcgtcttgaaaaagccgcccgcgaagatcgactgttcgacagcgtcctgaactttctcaatatccggcgtttcggttttcaaagcccggatccggggcatcacctcggtttccgtcaggcgtttcgcgccttcagccgtgatttctccggttgctttgcccgccttcgcgatcgcgaccacgatcttgtccgcgtcaaaatcacggatgctgccgtcgcgcttgataatatggcgcggctcaagttccactgtcattctgagtcccctgagatcattgtgttttaaacagaagtgaaatccgcacaaacaccattgatagcgaatggaaatgcggaaaacaccatttattgtgctttttttctgtttactatatcatcatagctttgatgcgttatatggccttaggttgtagtcaaaagggggagtactgctacaccttgattcgactgcttaaatcccgaatcctctcttttatagggttttcacctattatattttacctatcgatacgtacaattccctacgtcagaaccgtgatgggttattgcggacaatctgatgtttctccctgcgtggttcctttcgaggggctggcggcggcagcgctactgcttccgctatgtataaagtgaaccatgcttttcttggtgtccgggcttacctgcaagcccggtttttttttgccttttcccttcccatcccccttctctttcacccgatagcatcgcttttctgacaaccaggccggataacccctctgagtaactcttcagcacagattgcctgtttatcgccatctgtgctaaaaaatggggaagttaccgggaatatttttcttcggtagaatgctattaataaaaacgcttctcataatcatctccttccaagggagacgaagaggcgcctcagcacaaaatctatctactctataaaggccagaacaaaatgaaccgtgaagtcgtgaagtgcggactcttcctccttggcggcatcgctatcggtgctatcggtgctatcggtgctaccgtggtttcccgcggcaagctgaagggcatcaagcctatcgcctctgatcttctttcccgcggctatgacgtccgcgagaaggttctcgagaaggttgacgctgcccgtgaggatatttctgacgtgctcgccgaagcccaggcgaagtctgaagaacgccgctccgataaggagccggtgcttcaggaagccgctcccgcgcagcccgctgctgaaaagcccgctgctgcctgataccgggtccgtaagcaataccgaccggctttcccctgaaagctgcaatcagaaggtgtgatggagccaggcgaaagcccggctccgttttattttgtgcaggccgaaacacacagaaggaccttttccgcatgaatctcaccgttgtccatcacatcccgggacgcatccgctggaggtcagcgaactgcttcacccgaagcctcgctgaaacgatcgccgaaaaactcgacgcgatcgccggcgtcgaaggtgtccgggtgagcccgcgctgcggctccattcttatcacctattccacaaaggaagggctgctcacggcggtagacgcgctcgcgggcatccgcaccgaagccgccccgccccgcctcagcccagcgagggcttgcgcccaaggatcccgactacaactggtggccgcttgaacgctatgttttcgtgcgtcctctgcttcctacactctggaacactatccatacggccatcggctcaattccgttcatcggccgaggaatcagcgaactcctgaaaggaaaactgaatgtcgaggtgctggacgcctcagcggtcggtatttcacttctgatgcgggactttgggaccgccggtctcgtgattctccttctcggcctcggcgacatgctcgaaaaggcgacgaagaaaaagtctctggattctcttgccgagcagctcacggtccgcgtgaacacggtctgggtgcgcgaacccgatggcagcgtgcgtcagaagagcattcagcttctgaatgacgatgaattcatcgtggcgcgctcaggcgccgccatcccggttgacggcaccgtggtttcgggtgaagccttcgtcaaccagtcaacgatgaccggggaaccgctgccggtccgcaaagcgaagggaatgcccgttttcgcgggtaccgtggttgaagagggtgaggtcgatatccgtccgaccggatctgtcgagaattcccgcctgaatcagatcgcccggtttattgatgaaagcgagcgtcagaagtccggaatcgaaagccggatggatcatctggctgacgcgattgtgccgttcaacttcctccttgccggccttgtgttcctcttcacgaggaatctcacccgcaccgcatccgtgctcctcgttgactacagctgcgcgcccaggctctccacgccgctctgcgttctctctgccatgaaggaaggaacccgggaaaacattctcgtgaagggcggtcggcatctcgagtcgctcgctgaggctgacgttgtggtattcgataagaccggaacgctcactcaggctactccgcgcctcacggacgtggtgtcggccggtgaatggagtgaggatgaactcctcaaagtcgcggcctgccttgaagagcacttcccacaccccgtgtctcacagcatcgtgaaggccgcgcgcgaagccggactcgatcatctgatcgaagcgcacgactctgaggtgaaatatgtcgtggctcacggcatccgctcccgggttgaagggcgtgacattattctcggctcccgtcacttcgtggaagaggacgagaatgtcgatgtcagcgtgatgactgacgatatcatccggctttccgaccagggcaagagcattctctacatggctcacgccgggaaactgattggtatcttcggcgtcgaagacccgccgaaagaaaacgccgtggacgtgatccgggaactgaagggcctggggatcaagaaggttgtgatgctgacaggcgatgacccgagaaccgccgcgaatatcgcggcccggctcggcattgatgagttccgcgcgcagatgctcccggaaagcaaggctgaagccgtgaaggcgcttcgcgccgccggctacaaagtgatcatggtgggcgacggcatcaacgacacaccggccctcacaagctctgacgttggtgtgtctctccgcgacggtacggatatcgctcaggaggtcgcggacgtcgtgctcacggcgaacaacctcgccgatcttccgaaggccatccgtctcgcacgcagcgccatgacccgtgtgcagacgaacttcaaggcgagcgttggactcaatacgctcttccttgccggcggtctcaccaatgtactcacaccggctgccggagccctgctccataatggcaccacgatcggcgtctgcgtgaattcaatgcgcggcaactatctgacaggaaatgcatcatgacggactcttttgaaaactgcattcgaagctacttcccggggcgtctccgggcacggcacgcttcgctgaaaaacgcggaaaccgtgaagcaggtgaagactttcctcgcggggcttgaaggcgtccgttccgtggaaatcaatccccgggtcgggagcctcctcctgctctgggacccggcaaagctcgatattgagcagctgaaggccctcgcctctgccgctcttccggaagagaagcctgttcccgccaagtccgcagccacgcgtcagagagcgccggcaaaggggttccagatcggcgacctcaaccccttccacggctccaagttcgtgaaccagaacgtgaaccgcgccatgacggcgacctacgcgctcacgcttctcggtcttgtccccggaatcggccctggaggcaagatggccctgcatgtcgcttccggtgtcgctttcactgccttccttgcctggcatctgatacgctacagaagtacggttatctgataggaatggggctctgacgggccccggaaggtttaaggcatggaaaaactgacgaaggggattctcaccgccattgcggcgattcttggcggtgcccttctgctctgggcagcggctgcagtgctgatagcgctggtggccgctaccgtctgtctgctccttatttatctcctcatgccgaaagagtgccgcgcctttctcatcctgctgcgtgagaccatcaatggctggatcagccggtgtgaggccttgacggaaagcctgaccggcgcgatgtcagacttcgggcagatggctgagggacttgccggccgtcatcgcgaggatcccgagggagacactccggagccggcagaaaacgcaccggaaaccccgcattccgattcgaaatccccggattacccaaaaagagataagacctaagcttttatccctatcttttctttaatcccgcaaaacacgcctgatcagttccgaacatcacggaaagcgcccggttgaatacattcctcggataagcctgaggctaaaaaaaccggcataaaacgccctgttgcgttatcgttatccctcgaacagccgtccacgcagtgaatgcgccggggccggggacgccccctggacagctgcaaagtctgcagcggcgcgcccccgatccgcggctgccaaactccggaaagatcagaaggaatacaaattggctcagcaaactgatacttcagcagcccgggcgaagagcctggatctactgcagacgctccccgagctgctcacgcataaccttccggaccggggagacgatgaagccttccgcgaatacagcacccgcgagaagcgctgggtcagcctgacattcagggaaatggatgtccgggttcagcgctggcgcgaagccttcgcggcgctgaacctcagccgcggcgaccgatgcgccatgctgatgccgaattcgattgacgcgatctgcttcgatcagggggtcctctccgatgccctgaccccggtgccgctccacgcgatcgacaccccgggatcctcggcctacatcctttcagactctggctccaaggtgctcgtgactaacaagtaccttaagtggaagggcatccgcacctccggcgtcgatcttcccgatctgcagctcgtcgtgatcacggatgatgaggtcccggctgaggattctgatgctcacccccgggtgattaccctcgagaccttcctgaccgaaggtgccgggacgccgctgcctccgcctccgaagggaggcgatctcgcggcgctcgtctatacctccggcaccaccggccgtccgaaaggcgtgatgcttacacacctcaacgtgctctgcaacgtgcgcgccgtactgaagcatctctgcccccggcctcacgaccgctggttctcgttcctgccgctttcgcacacctttgagcgcacgacaacgtactacgtcggcatgggaatgggcaacgcaattgtcttctgccgctcgatcgcgacactcgcccaggatatgcagctcgcgtctccgaatgtgatgatgggggtgccccggatctatgagcagatctgcgcgaagattctgcagactgtgaaaaagcagccgccctttgcccagaagatcttccactgggcgatcgatgtcggttaccgcaatttctgccgcgaaaatcaccttccg

SEQ ID NO: 1323 - DNA, 4125 bp, Unknown
  gut microbiota DNA sequence
cggcgcgctctcgttccttgatccgattgtgtcagggttcctcgaccggaaggtcggctccgtggttcgccgcgcattcggcgagcatcccgacgtgtactgctttgtatcgggcggcgccgcgctgaatcccgcggtctcccgcattcttcttggtctcggcatccggatcgttcaggggtacggcatgactgaacattcgccgattatcgccgtgaacaaaatgggggcgatcaatccgaacacggttggaccggctttgccgaatgttcagacgaagctcggggacggtgacgaactgctcgtgcgcggtccctgtgtgatgaagggctactggaagctgcctgaggcaaccgcgaaggcgattgaccctgacggctggcttcacaccggagacgtcgcggaaatttattctgacggccagatcagaatcaaaggccggatcaaggaaatcatcgtgacttcaagcggtgaaaagatcccgccggatgatcttgagcaggcaatcggtatggatccgctcgtgaatcaggtgatggtggtcggagagaaccgcccgttcatcacggcgcttgtcgtcgtgaatccgctcgagtgggaaaagctctgtgaaagcctgtcactggatcccacagacgcggagagtttcagaagccgcgctgcccgtcaggctgtgacgaaacggatccgtgccgcaacccgaaacttccccaattacggagtgccgcgtgacgtttacctcacgcgctctccctggaccattgaaaatggaacaatgaccccgacgcttaagctgaagcggcggataatcctcgcgaaccttgagaaggaaatcgacgaactctacgcgaaacgaggtgagtgatacagaatgactgaaatgaatacctatccggaatttccgaagggctgcagaacgctccctgagatgctcgagcatacggccgccacatggcctgaccgtatcgcctatcagtggtttgaccgggcgactgaagcctgggcctccatcacgtggaaggaattcctgtccgcggttcgccgctggcagaaggctctcaaggcatccggtctgaagaaaggcgaccgggtcgcggtgcttctcacgaacagcatcgaatcccttctgattgatcagtccgtgctcgcctgcggcatgactcctgtgccgatgcacgcgatcgatacaccgtctgcctgcgcttttgtcctctcggacagcggcgcgcgcgctctcgtcacggcgtctgaagcccgctggcactcgatccgtgacgcagatccgacgctcgatctctcggcactcggaaccgtggtgctctgctctgacaccccgactgaaaaagagttccacggaacaccgcgtgttgaagcggtgacggactggctcgcagccggcgaggattatgaaatcgatccggcggatcgtccggctccggaagatctcgcggctctcgtctacacctccggcactaccggccgcccgaagggcgtcatgctgacccacagcgcgctggtcgcgaactgcagccagacctggcattgcctcccgcttaccgagcaggacgtgtcactcagctacctgccgctctcccacgcttttgagcgtacggtcgcttattacctcgctgtcgcagtcggctctcagcttgtgatctcgcgcggtattcagtcactcacagaagacatgcagcacgcgcagcccaccacgatgaacaccgtgccgcgcgttttggaaaagattcatacgagtttcgtgaatcagatcgcttccgaaggcgaagccgccgttcagaccctcgcctgggctcaggaagtgggctggcgccggttctgccgcaagaacagccttcctgtggaacacagcccgcgtgaagagctggatgacgccgcgtggcctgatctcgacgcgaagatcggcacccgggtccgcgcccttttcggcggccgtatccgtgatctgatctctggcggcgccgctctgaattactccatcgctaaattcttctgcgcgatgggcatcaatcttcgccagggctatggcctcacggaatcggccccggtgatttcgatgtcggaaacggtcggcaaccatccgaccacggtcggaaagccgctccccggtattgaagtgaagctcggcgcgaatgatgaactcctcgtgcgcggtccgcaggtcatgaagggctactggcaccgtccggacgcgacgaaggaaaccttcacggaggatggcttcctgaagaccggtgaccaggcggatctctctgacggcggccgtatccgcatcaagggccgcatcaaggaaatcatcgtgacgtccaccggtgaaaagattccgcctgtggatcttgagttcgctatccagtcggatcctcttttcgagcaggtgatgatcatcggtgaggaccggccgttcgtcgcggtgctcgtcgtcgttaacccgacgcgctgggaaaatttctgcgccgaactctcactcgacccgaaggatcctgcctcctacgaaagccgtcaggcacagcgtgcggtgctgcagcgtatccgtaagctcacgcgtcagttcccgcagtacggcgtgccgcgcgctgtccgtatcctgagcgaacactggacgcctgaaaacggcatgacgaccagcacgatgaagctgcgccgccgcgtgatcacgaagcactatctcgcgctgatcgaagaactctacgcgaacagcaaggcctgatcggcatgaccgggatgaggctttttgactcccactgccacatcaactcgaaagagtttgatgaggatcgggaggaagtgatcgcccggatgaaagagtccgggctgacaggagctgtcgtcatcggctgcgaggacccggagctcaagccgctccgggcactcctcagtcagcacccgggctacctttggggtgcctgggcgttgcaccctgagtatcaggatgtggatcacgagccgacagttgaggaaatctgcagcgcgaactccgatccgaacttcgtcgcggtcggggaaaccgggctcgattattactggcataagcccccctgcccgtggcaggttgagcggttcctccgtcatatcgaggccgcgaagcgcctcgggaagcctctcatcattcatgcccgggacgcggagtcagaagcggtcgatattctgaaatccgaaaatgccggcgaaaccgggtttgttctccactgcttctcctccaccgcggaggtggccaaaaaggcgcttgatgccggcggaatgatcggcattaacggaaatatgacatttaaacgttctgttgcaattcaggacgcctgcgccgcgatccccatggataggattcttgcagagactgactgcccctatctggcgcctgtaccaaagcgcggacgcaggaatgaaccttcctttgtcgcgtataccgtcgctaaaatagccgcattgcatcagatcgctgctgaagaggcagcccgcatgaccgaggccaacgcccgccggtttttccgcctcccgccgccggtctccggagaatgagccatcccggctctttcctatgcggaagcgcttttggaatacacaggattgaaagcatgaaacagacttctctgaagattacgctcgcatcggcttttgccgccgccatgatgacgctcgcgccggctgcggtgctcagcttcccggcggccgcctccgcggctcagatgggccccgaagagctctacgccaacttcaccggcgccgtaaagaataaccgcggcgacgtggtgaagaagatgctcgcccagggctacagcccgaacgtgaagatgccgaacggcgacccggcgctcgtctatgccatccgcgcggataacaccgacgtgatcgacctgctactgaacgcgaagggactcgatgtcgacaaggcgaatccctcgggtgaatccgctctgatggttgcggcctataagaagaatgtgccgctcgtgaaggcgcttctcgcgaagggtgccattgttgaccgcacctccggctggtctccccttcactacgccgcggccgcgggctcttccgaactcgttgatctcttcatcaagaagggcgcgaacgtgaatgtccgcacgaagtctggtgtcacgccgctcttcatgg

SEQ ID NO: 1324 - DNA, 182 bp, Unknown
  gut microbiota DNA sequence
tccacagtggatgcgagatagccgtgtttacggcagtattgaccgaagtcagtctcgctcaggaatgctttggcgttgacagcggtatgggcttgcaggtaggtcacacccttaggaagcttaaggtcggccatgggcttggaaattcctgtgttaggcagcgtgacgcagtctgatttctc

SEQ ID NO: 1325 - DNA, 137 bp, Unknown
  gut microbiota DNA sequence
ggaagcttaaggtcggccatgggcttggaaattcctgtgttaggcagcgtgacgcagtctgatttctcttttgccttctcgagccagtacctgattgttgatttgcctatcgagtactgaacggaggcttcagagat

SEQ ID NO: 1326 - DNA, 184 bp, Unknown
  gut microbiota DNA sequence
cacctaaaaaaagtgggagtcagttttttatgaaccgaacaggaagaccaacaggtagaccaagaggtcattatctgtcaaaataactttcgccactctttcagtcttacatggagtggtaaaacatgcgatattcgcaggagtttatagataacctcgtggcccgcattctgagcaaagagct

SEQ ID NO: 1327 - DNA, 137 bp, Unknown
  gut microbiota DNA sequence
tggtaaaacatgcgatattcgcaggagtttatagataacctcgtggcccgcattctgagcaaagagcttcgaatctctgaagcctccgttcagtactcgataggcaaatcaacaatcaggtactggctcgagaaggc

SEQ ID NO: 1328 - DNA, 2009 bp, Unknown
  gut microbiota DNA sequence
tgaggagataaatgacaatgaaagccatcagcgaatgcagcacggtccagctgatccgcagcgccacgatcaaggtgtcgatcggcgggacgaccttcctgattgatccgatgctgtccgataagggtgaatttccggggttccctgaatcgatgaacatgatggagcggaatccgaccgtggagctgccgcttccggtagaagagattctgaagtgtgacgcgatcattctgacccacacgcatgaagaccactgggacgcgcatgcccgccgcgtggtgccgaaggataagctgattttcgtgaataacgacgctgaactcggccaagtgcgggacgcgggcttcacgaatgtccgcgtgatgcaggatggagaggtgtttaagggcatcacgctgatccgcgcgaacgggaaccatgggtctgacgagatcctgagtgacggcgtctggggcgatctgctcggccacccgatgggcgtgatttttgagcgtgaaggctgcaagacggtttacgtggtgggagacacggtctggattccggaagtctccgaacgcattcagaagtacaagccgggtgtcatcgtgcttaacaccggtaacgccatgatgtctgactgggccacgtcgatcatcatgggcggccccgactttatccgcgcttaccgcaaggcaccggatgccgcgattgtcgcggtccacatggacgccgtgaatcactgcgtgctccaccgaccggaactccggatgctcacgcagcgtcttaggatggatccgcgccgcgcgctgatcccggcggacggcgaaattctcgtcttctgaccgatctgaaggaaaaggcacggctcgtgatgaaccgtgcctttttctccgggctttctatccttcggatgggtaaaactgccagcagtcgtaccacaccaccgtatagtaaatttcatacaacgccggactttcgtaccagccctgccggagggtcatcacatagccgccggtgagcgaacagacaatcgggagcgtggaatcattgaagtcgaattccgggctcccgagcgcctcctgatgtttagggccgtggacaccgaaccgaagcatgatgccgggcacgatactctgataccgggagaaatcgtccggcacggggagcggcgaaagatctgtccttgcggcatcggtgaatagatcgtttatcagatcgcgcgcgtatccgacccgctccggatcattgccgccggaagctgaacccggcgctgcacccggttccggggccgtaaaaccataggttcccatgggaagcgttggatctgcgcagaccccgaaaatcgtctcaattccgtatttctcaaaaattcccgaattgattaccgcatccgccccgcgcccggtttcagaaccgggttcgaaaatcagaacgagggtcgaatttccgagctttatgtcgtgagcgaaatcccgggcgaccccgagaagccaggcgatttcgccgtcgtgcccctgggtgtgagcggcacgaggattccggctgcggtaaaagatgtcgcttcgttccgtcaccggagacgcgtcaatccgggcccgcagcgcgataacgggctgcatttcatcccacttgtcgtcggaaaataggacacgccgacggcgcttgataaccgcaatgacacccccggggaccgacttcagatcaatgtgacggacaccgaaccggagcaggatgtccgcgatccgcttcgctgtccgatgcgtctggaaaccgagttcagggtgcgcgtggaaatcacgccggatcttcagaagctgactctgccagaggacaaactccggaagtacccagtcctttccaatcattttcatggctttcattgaagatccgtcctttgattcggatactgcgttcggcgggagtctgatcctcacggccagactctcgtgccgatatgcgtttgattactttggtgtcagattctctgcctgctttcaattgtagaacagggggaaaagagaaataaagcg

SEQ ID NO: 1329 - DNA, 1408 bp, Unknown
  gut microbiota DNA sequence
agtcacccacaaaattttcctcaccctctgttccccaaaccgatatagaaaacattgggtttggttctttcctctggtttcaggaccctgatttccagtccagacttctgggcatccaaaagctgtttagcgataaaagagtctttatcattgatatcgccgaagatccgtgctcctccgacacatgtttcaacacaggccggaagaagaccagctttcactctattgatgcagaaagtacatttatcggcttttttagtttcagtattgataaaacgtgctccatacgggcacagtctgacgcaagctccgcaaccaatacacttatcagaatcaattaccacattcccttcaggaagtttgaatgttgcttttgtggggcattgagcaatgcatacaggttcgtcgcactgattacaaagctgcggcaattgaacaatgcttggtttccttccgtttttgatcaaaacactggttacagttacatgggttcgcctctgtcccacgggtacattgttttctgcatgacaggacactgtgcatgcctgacagcctacgcacttcctgagatcgatcagcattgcccagtgcttcccgcttccccgctcaggttcaacggccaatactggcgatgacacagctcctgcagttacaacaggtattgtttttagtaaagttctgcgactagtctgaatgctcatctctttctcccgttgtttactacttctgactggtactcatgctatagttgatcaacattaacgtcaaataatcaataacttaaatgtcattagtaaaaactaatagcagaaaaacggatttggactacatagaggccattctgcagtgcggcagtttcagcggcggggcggatctgcttttaatctcccagtcagcaatttcgcagcacatagcaaaggttgaaaagcgtctcggcgctcaacttttctgcagaaacatcaaacccgtgaagttaaccgaggatgggaaattttttgttgatattgaaagaaaaatcaggtctctaaagtgccaaagagatcaatattttgaagatttgaaggggctgaaaaaaggaaaaatccgtattggttccaatccttgcaggacggctacaattctcgctaaaaccttgagagacttcatgaatcagtatccaggtgtcgtaatagaccttgtcgaagtcgaatcaaaggatattggtgaacttttaagagaaggttcagttgatttctgtctgaccttgtcaagcagaatcatgcctacgatggaaagccgcgtcgtttcccgtgaaagggtcttcttggcggttcctgcttcatgcagcaaagcaaccctcggaggtcgtccttccaagccatctgacaacacccctaaaacacatttcttggaatttaaaaacgagcct

SEQ ID NO: 1330 - DNA, 453 bp, Unknown
  gut microbiota DNA sequence
gaacgaggggaagagattctcgacaaagtttgagataccgatcgcccggacgtcgcctgcctgataggcttcttcgagcgccttatagaccccgaggttatcttcccccggccaatggatcagaagcaggtcgatcacaccgatcccgagcgccctctgagagcgggcaatcgatcgcttcgcgtcctcataatcccgcgctccccagagtttcgtggtgacaaagatctcttttctcgggataccggacgcccggaccgcttcaccgacctcggcctcattcttatagagctgcgccgtatcgatatggcggtaaccgagcgagagagcggtgagcaccgcgtccttcgtctgattcaccggaatcgcgtagacgccgagccccacgcggggcatccggacgccgttattcagtaccacgaagtcttccatattcacacttccttttgtcac

SEQ ID NO: 1331 - DNA, 4444 bp, Unknown
  gut microbiota DNA sequence
atgatttcgcagtcattaaaatccaatcgattatttatataattaatttaatttttaaatcgattaaaaagactgaatttgaataccaagcagattgaattcatccttgagctcgcgaaaacacggaatttcaataaggccgctgaaaatctctgcgtttcccagccaaccatgacttaccagatcaagtccgcggaaaaagagatcggattcgagatttttgaccgttccggcaaaggcgccgtattgaccccggccggctcgcaattcgcggggcagcttaaaagcatttacgcgtcgcttcgctctgctatcgaacaggggcagaatttcagccgaagcgttaagaacgacatacggatcgccatgccgatccgttcagccgtttattttctgcccgaagctatccgccgcttttcctcacagtatccggatatctcaatcactccctcttttgattggtatggatgcaaagagtcgttccttaagggagaacaggacattctcttcgcgatggacttcgaaatgaaacgggtgcccgacatccgacgccacccgctttttgacagccgtttctttctcatcacggaccccaatgatcccctgtccaagaaagcgaaggtcacagcggcggatctcgcgggacgcactctgatggtaggcggggggtcaccgcccgtgctgcgagccattcaaaaccgcgttgtgagtgaggggaaagtgacgtacttcaatagccgcgatcacgacaccacactcacgaacgtcgcggccgggcgcggtgtctgcatcgctcccgactttttgaacgatcactgcgaagagttttgctggacaccgtttgatacggcagagacgattccctgttcgctttatacccataagaacgaaaagcggaaagctgtgaaggacttcataaaaatcctgcaggacttttatcgctagaaaaactccgttatggccttctcgcccgggtcacgatccaggccccgctgatgaccagagcggccgcgaggggcttatcccagctgaacgagtcctgccccgccgcgatggcggagaccgacgccacaatgggctgcaggttgtagtacacgcttaccgtcgtcgcctgaagctttctgagcgccacaggcagaaggaaatagccgatcgcggtagagaaaatgacgatgtaggcaaagagaagcgcgccctgcgtaaagaacccgccgttcagcagcggttcttccggaatggccttaaagccgaacggcaggagcatgagcgacgtaaagagaaagagccacttcatgatggttgccgcgcgatacttctgcgcgacagcgcccgaaatcatgagataaacggcgtaccccgccacgcttaaaaaggcgtagagaagaccgagcagattattccgtccgcccgtgccgaaaccagcgcccagcaccaccacgagagccccggccacacccagcgtcacgccgagccctttttgtgccgtgattttttcacggtgaagcgcggccgacatcaaaagcacgatcaccgggctcagcgcgaccaccatcgcgtagttaacgggcgaagtctcctccatactcaaggcaaagaggaactggctcgcgataaagccgagaaacgcacccgccgcgataatggcaagatcgcggcccgccactttttcacgcggaagaaagaaactggctgtccagaaaatcaccgcggccgacaaagctctgaggagcgtatatccaatgggatcaagccaggagctcaggagttccttcgtaaccgggatgctcagtccgaaaaagagattggagagaaaggccgcgatatgaccgataagagcactcatgacgcctcccgacctcagagcctgagagacctggcccagcggacaatttcatccgttgacctgtcaacagccgtgccgcgcacagcaagccccgcggtaactgatgccctgggctgggcacgagcgcagtcctccgcgctggtccccaggccgcttccgccgtgcgtcgcgaacatcacgacctttttgccggcaaggtcagcctgctcgatgaaattcatcacggcacggggcatctttccccaccagatcggatggccgatcagaaccgcgcggtaagccgagaagtccggcagcggttttttgatcgcgggacgagcctccttcgcgagctcatcccgagccactttcgtggtttcgcggtagtcagccgggtacggcttcacggtttctatttcgtagagatcgccgccgatggtcctttggatcacgcgggccatcctcgccgtgttccccgtctgaagcacacgggtcgtgccgtcccaccagttttcgcccttgcgggagtaataaacaatcagaatttttcccttgggagcctccttcgcctttaccgcggagatggctgcaagcgaagaaagcgaaaggatcagttgacggcgctgcatggaaaattccccctgtgaatgaatgcaggggaaatcttaagaaccggctgtttatgcaccaatctcaaaaattagcaattcgaataagcaaatcttattaatcgctctttacgtctttagaaaacaggtcaaccaaaatagcggaaaaatccgtgatgacctggctcgtattgttcttcagccaaaacgcgcagaaattacgcttcaccggcctgtcgtccttaaaaaacgggatccgtttcaaaaacgatgccgctacgggctccggttctccttccgcggggaaaaagccctgcccggccgccgccatcaggcgggcttcctccgcgttatccgcgaagaggaaactccccgagaaaccgagcagctcccggtaaaagctcttttccgagtcgcgctggccgacaccggcaatcaggatgcagggcttatcgggcagcgtcgccgcgcggaagctcgacccttccccgggactgtattgcggcgcgcactcgatatgcaccgcgggggaagaaagcacgaggttctcatactcgtcagaaaaggctctgcgctgatcgctcaaggcaaagtcgatcttgcccgacttcagcatctcgtagatttcctcgtggctcccgctcgcgatatcaaactcaacccccgggttcattttcgcgtatcgggtaatcgcttcatagagttcgctcccccggtaggaaaggaggaaccccaaacggatcacgcgctttttactatgggagatacgaacggtttcccgccgcagggcctcggtctccgtgatgagctgcctcgcccgcacggccagatactctcccgcgcgggttaaggtgaaggtacggttattgcggatgatgagctgaaccgagaggtcttcttccagcgccttgatctgctgcgatacagccgactgcgaaatgccgagcgcgtaggccgcttcggtaaagcttccgagttcagccactgtcgcgaaataattgagctgcttcagcagcataaacgttcctccaggttctataagaatttcttattcgaaaaataataaataaaattgttcctgccgtgcaggctttttaaaattcttcctatcgatacaggcgctttacgcgccgctattaggaagagaaaatggctaaaacctggatgattaccggtgtttcgagcggctttggccgtgaaatgacggaacagcttctttcggcaggtgaccgtgtcatcggcaccgtccgctccacggcgaaggtcgccgatctgattaaaaagtacccggacacgtttgactgtgtgattctggatgtcacggacgccgccaaggtgactgaaacagtgaacgaagccgccgcgaagcacggccgcatcgatgtctatgtgagcaacgccggctacggcctctttggggcagctgaagaactgtcccttgaagaaatcgaccgcatcctcaacacgaatctgcgcggttcgatcgccttcatccgcgccgcgatcccgcatctgcgcaaacagggcggcggacgaatcattcagatatcgtcctacggcggacaggtcgcctaccccggaaattctctctaccacgccaccaagttcggcattgaaggtttctgtgaatccgttgctcaggaggtcgcgcccttcgggattgacgttaccatcgtcgaaccgggcggagcgcgcacggaattccgttacggttcggcccgcgttgccaaactgatgccggagtatgacggctccgcgacgcacgcgttcctgaagatgctggatccgaaaaacgggctcgctccgggagaccccgccaagatggccgcgcgcatcattgaatccgcggatactgagaagccccttctgcacatggtgctcggatctcaggctctgaaggctacgatcgctacgcttcaaaagcgccttgctgaatacgaaacggagacggaactcgcggcttctacggacattgtcgagtaatccggctctgatctctgcggggccttaatag

SEQ ID NO: 1332 - DNA, 177 bp, Unknown
  gut microbiota DNA sequence
aaattgctccggtcgagccgtccatcgccatcaggggcatgccgccagttttgcaatgtacgcggagtaattccaactgcttcgcaggacagcctctgcgacagtcccagcgattgaccgaaatcgaccagtgaaataatttcctgacgatcctgggcactgatcagttttcctttt

SEQ ID NO: 1333 - DNA, 140 bp, Unknown
  gut microbiota DNA sequence
gcattcctgagcgagactgacttcggtcaatactgccgtaaacacggctatctcgcatccactgtggacgcctgggccgaatggttcagcaaacacccggatgccgtagacaagagacagcatgaagcccaggcttccgc

SEQ ID NO: 1334 - DNA, 137 bp, Unknown
  gut microbiota DNA sequence
gcaaagaacttctgctgcccgtcgccatccttgccgaccttgtcgaagagctcgctgcaggcgctttcacccaggccttcctcgtagggcgtcgggtggccgacctgccaggcctccatgcgggggatcgccgcgcc

SEQ ID NO: 1335 - DNA, 74078 bp, Unknown
  gut microbiota DNA sequence
cctccgggatatgtcggctatgaccagggcggctacctcacggaagctgtccggcgccgcccctacagcgtgatcctgttcgatgaagtcgaaaaggctcacccggacgttttcaacgtcctgctgcaggtgctcgacgatggccgcatgacggatggtcagggccgcacggtggacttcaagaacaccgtgatcgtgatgacctcgaacctcggttcgcaggaaatcatgcagatggccggccgcccgcatgacgaggtgaaggaagccgtgatggaagaagtgaagcagcacttccgtccggaattcatcaaccgtatcgacgagatcgtggtcttcaattcgctcggtgaaaaggcgattcagaagattgccggtatccaggtgcagaagcttgctgaccgtgtggctgagcagggcatcacgctgaaggtgactgacgcggcgctcgcggaaatcgcgaaggccgggttcgatccggtgttcggcgctcggccgctccgccgcgaagtgcaggacgcgctcgaaacgccgctcgcgcagttcctcctcgaagggaaggctgcggaaggcgacacggtgaacgtgggcctgaacgggaaggaactcgccttctcggtgacaaaggcggaagaaaccccgaacgcctgacggggaaatggaaggtgccggacgaaacctccggcgccttctctcaggacaaaaaaataccggtcatgcagttttcgctgcatgaccggatttttttgccttttatgcgaagaaacttttaggactcttcgacgaggcggcgttccaccgtattgaacgcgtccgtcacttccttttccggagccttatcaaggaggctcaccacgatgatcgcgagagacccgaggataaagcccgggagaatctcatagagatcaaaccacgcgaagtagtgccagacgagcaccgtgatcgcgccgaccagcatgccggcgagagccccgttacgggtcatgcgcttccaccagagggagatcaggatcacgggaccgaacgaggcgccgaaaccggcccaggcgtaggagacgagcgacagcacgaggctgttcgggtcgcgcgcgatgatgatcgcgatgatggaaacgagaagcaccatgccgcggctgaaaagcatcagttcgcggttgctcgccttcgggtgaatcaggcggcggtagaagtcttccgtaagcgttgaggagcagacgaggagctggcaggagagtgtcgacatcacagccgcgagaatggcggacatcagcacacccgcgatccacggattgaagagcgccttcgcgagttcaataaagacccgttcgtggttctccgtcacagcaccggcgagttccgggtgacccgcgaagaacgcggcgccgaagaacccggcagccaccgacccggcgaggcagaagatcatccaggtgatcgaaatgcggcgggcattcggaatcacgcggattgagcgcgtcgccatgaagcggacgaggatgtgcggctggccgcagtagccaagaccccaggcgagaagcgaaatgatgccgattgtggtctgaccgttcatcatgctcagcatatccgggttgatcgcggcgacctggctcgtggcggcggaagcgcctccgagatcgatcatgacagcgaccggggtcacgatgagcgcgatgcacatgagggaggcctgaatcgtatcggtccaggacacagcgaggaatccgccgataaagacgtaggcgatcgtcgcgatcgcgccgagccagagcgcggtggagtagggcagatggaacgtgttctcgaaaagccgggcgccggccaccatgccggaggcgcagtagatcgtgaagaaaacgagaatcacggccgcggcgctcacggcgagccagtgcgacttgtcttcgaaacgctgccggaaataatccgggagcgtgagcgcgttatgcgacacctcggtgtagaggcggagacgcgcggcgacgagcttccagttcagccacgcgccgatcgtgagaccgatcgcgatccaggattcgctgacaccggcgatgtaggccgcgcccgggacacccatcaggagccagccgctcatgtcggacgcgccgactgagagcgcggttacgaggccgccgagttttcggccgccgagaatgtagtcaccaaagcttctcgtgtgatgccaggcatagaagccgatcatcaccatcagcacgagatagccgatgaaggttatcgctgtgggattgaagtgcatttttttctttctgtctcagacggaagggggcagagtatttttccggtattttccgagagagagctgcgagtggcaaaacctttattctaacgacagagtgtcagccaccgatataactcatttcgacctttttgaccggaagaggcattccgttcattcggagttccgagtagtggttgctccggttcgtccagatgcggccgagagcctcggcgatttcctcgtcgctcgcgccgccgcgaagcatcgtgcggatatcaaaaccccggtccgcgaagaggcagaggtacaccgcgccctcaatcgacagacgggcgcgggagcagttgcggcagaaggggcgcgtgacggacgaaatgcagccaaactcatcgtcaccctcgccgtaacgccagcgctgcgcggtttcactctgataattcggcgtgagaggcgttaccttgaaccgttcgctcacgatccggatcacttcgcttgtcgggacgacgtcattcatccgccagccgttggacgtgccggcatccatatattcaataaagcggacgatgaccccggttccggcgaagtgttcgagaagcggaacaatctgattctcgttgatgccgcgcttcacgacggtgttcaccttcacgtgctcaaagcccgcttcgcgcgccgcgtgaatcccctcgaggactttcgcggccgggaaaccgacgtcgttgaactcctggaaaatcttttcatcgagcgcgtcaagcgacaccgtgagacggtctagacccgcttctttgaggccctgcgctttcttcgcgaggatcgaaccgtttgtcgtcatcgcgatatcgactttcttcccgtccggagtcctgagcgtcgcgagcttcgcgatcagatcctcaatatgctttctgaggagcggctcaccgcccgtgaggcggatcttccggacaccatgctccaccgcgatccgcgagatccggtagagctcctcaaaattcagcagttcctcatgcggcagataggcgtcaaacttatcccagatctccttcggcttacagtagcggcagcggaagttgcagtgatcggtgaccgaaatacggatatcggtcagcggccgtccgagcatgtcgatccagtagccgtctttctcccggataccgccattcagcggaatcggcagggcttcgagcgactcactcacgatcggaatcacgcgggagttatcggttaggttttcagacgccatgtatctcacctgagaaaaaggaaagcgaaagaaaaaggaaaggcgctggaatttctagaaaccccagcgccctttttattgcggtgccccgatcccggggctgatcggattaagacgcgtctttcttcgtctcgacctggatcatttcgaccgcttcaaccggaggaagcaccggacggggacgtcccggcgccttcggctgcgtgtagctcacttcgcccacgagttcgggacgggtgtgaacgacctgcaggccgtgagacgcgagttcagcctcgataccggtggcgccgtccgcgatccgggctccaatgacggaagcctcaggcttctcttcagcaggagcgggagcggcggtttcggtttcagccggggcagccgtcacggtttccaccatttcggccgcggccggcacagcttccggagcgctttctacgggttgagactgtaccgcagtttcggcttcggccggagactttttttcaggttccgcggcaggtgctgcgggagcctcagcgaccggagcggcgggttcagccttcacttccgggctcggagccgcggtaacggcttcagctacggcaggagcgatggcggcaacggcggggaccgcggcttcagctgcggccgtgttttccgtcttcacggcgtccgcggcgcgctcggcacccgactttccgccgcggcggcggttacggctgcggcgggaacgcgttccgccttccttctcgtccttcggagcctcgtgagcgggaacggcgtccaccgcctgagcgacagccgcgacgatcggtttcacctcggaaacgctttcgccggatgtcgccggggcaacggcgagcttcgccgcgcgggtctcaaactcgcgcacttcgcgttccgtcacatcctccgcgggagccacggtctgagcggcggtctgctgcgtctgctgatcctcctcacgcgtgcggtgagagtgatgacggcggcggcgacggccttcgttctgctgctgatcctgagcgggctgctgggcctgggcgtcctgagcggcaggagccggcgtctgagcggcctgggcctgagcggcggcctgctgctggggctgcttcttctcttccgaagcctgagcgccctgctgctgagcctgaccgttcacctgtccttcggtctcttccgaatgacggcggcggctccgtctgcggcggttttccgtcgtttcagcggcagcggccttcgcgcggcgttcagcggccggtgcggactcgtgttccggaccttccgtacgggcgttcgagcggcggcggttgccgcggcggccgcggcgggattctcccgcttcgtctttcttcgcttcgggcttcgcggcggccgcgggagcggcagctgcggcggtagtttccgccttcggagcggcggtctcagccttcggttcgctcgagccaaggagaatgtcgatgaggcgcgcgaagaatcccttcttcggagcctcggcctgcgcgggagaggccttcggagcggcagcctcagccttcgcggccggcgcttccttcttctcctcttccttcttacgctcaacatgagccggcgccggcgtgtcacgcgtgatgttcttgatcacggggacctgcttcggacgggcgggcttgttttcgtcagacttcagggcgtacgggtcagtcgacaccggctggatgtcttcagcgcgcttgtagctcgcaacatcgtcctccatccgttcgtcattcgcgcggatgcgttcgatgtggtagtgcggggtctcaagcacggtgttcgggatcaggatgaccgggatgcggttacgctgctcgatcttcgcgatttcggtgcgcttctcgttcaggaggtacgtcgcgacatcgaccggaacctgagcgtggatcgcgccggtaccgtccttcgtggcttcttcctggatgatgcggagaacctggagcgcggagctctcagtgtcacggatgacgccaaggccgttgcagcgcgggcaggtgatgtggtggccttcagagagcgctgggcggagtctctggcgggagagttccatgaggccgaagcggctgatcttcgccatctgcacacgggcgcggtcgtccttcagggcgtccttcatgcggagctcaatcgcgcgctggttgcgggcgtcttccatatcgatgaagtcgatcacgacgagaccgccaaggtcgcgcagacgcatctggcgcgcgatttcgtccgccgcttcgcagttcgtgcggaaggcggtttcctcaatatcagcgccgcgggtcgcgcgggccgagttcacgtcgatcgcgacgagagcctcggtgtggtcgatcacgatcgcgccgccggagggcagcgtcacggtgcgggagtacgcggtttcaatctggtgctcgatctggaagcgggagaagagcggagtctcctcgcggtaacgcttcacgcggcccaccatgtccggcatcacgttcagcatgaactgacgggcctggtcatagatttcgtccgtgtcgacgagaatctcgccgacctcgggctggaagtagtcgcggatcgcgcggatcacaagggcgctttcctcaacgatgaggaagggggacggattcacgcggcggagcttctggccgttcacgacggggtccgtcacgtaggacaccacgcggtggccgttttcgtcgcggacgagttcgtattcaggagtcgcggcgtcgcagatcgcgttccagagcttcaggagatagtcgagatcccactgcagctcctcgatcgtgcggccgatgccggccgtgcgggcgataaccgacatcccctgcgggagcttcagctcttcgatcaggtgacgcagttcctggcgctcttctccttcgatacggcgggaaactccgcctccgcgggggttcttcggcatcaggacgaggtagcgtccggcaagcgaaataaaggtcgtgagggcggcacccttgttgccgcgttcttccttctccacctgcacgagaatttcctggccttcgcgcagcgcctcgcggatcgtgcacgtatgaacgtccacgtccttattgaagtagctgcgggaaacttccttgaaggggaggaagccgtggcgctcttcgccgtagtcgacgaagcacgcttcaagcgacggctcgatgcgggtgatgatgcccttatagatgttggacttatgctgctcgtgaccagcggtctcgatatcaatatcgacgagcttctgtccgtcaacgatcgccacgcgggtttcttcggcctgcgtcgcgttaaatagcatgcgcttcactggagcactcctaagcgcctctgtcgcgggcgcagtaagcgtgcggaatgaatgcggtggaccccgtttcggacccgcgccccctaactgaataaggtgaccggcccggaggaaggccgggttatggctgatctaggcgcagaacgcggacggctccgccgcccgctgaaggcatctgaagccgcatgcgcgataggacggcggcgggaaacgcttgcagcatccccgcctcggcagcccgtattcggcaatccagttgtctttcttctctagtcacaggttaatcatcaaaaagctgaaaaaataaccgccgtacaacccaggcacacgcagcacggtcactcgtctgagagagtcagactcaggcggcatgcggcacccatgcattcttcgcagacacagtccgaggtgctcgccgcggactgtgttcgggattcccgttctcctcaagcacggcagtcatccggcactccggccgggtccgctccgcgcgagctgcgggcaatcccatttttaaaaaattgctgatgtcggggcgtaccccttcttcgcccgcgtttccgcgctcaggttgcatctgacgcaaggccgagacttgaagcgaaggatgagaatcccgcccgggacggctacaatgcctccatccccgacaaatcgacaggggaccgcaacggcaggtcgatcaacctcgcatccctagcgggatgcagggaaaactctcaagggttgcttggaagcggatggcttccgggggtccgcgcctgaatcgatgtccgtaagtatagtggatagggacaatgtcagagataaattctgcagaaaaattcatcatttcatcctcccgggtgacggagctttcgccggaccgcgtgacgtggatccggatcggggaagattcggacgggcagcgcgtggataatttcttcctccgcgtggcaaaaggcgtgccgaagagccacatttaccggcttctgcggagcggtgaagtgagggtgaataagaagcgcgtgaaggcggagacgaggctcgcgctggatgacatcgtccgcgtaccgcctatccgtgtgccgcagaagcgggatctcgtgccgcgcgccgcgccgatctcagacgacacgctcccgatcctcttcgaggacgagcatctcctgatcgtcgataagccggcgggccttgcctgccacggcggcagcgggatcgcgttcgggctcatcgagcggctccgcgcgagccgtccgaatcagccgttccttgaactcgcgcaccggctggaccgcgatacctcgggcgcgatcatcgtctgcaagtcccgcaaggcgcttgtcaggcttcagaagtcgatgcgggaaggcggaatcgagaagcactaccggacgctcgtgaagggcgactgggtgaatgaccggcagcatgtgaagctcccgcttttcaaatacgtgacgaaggagggtgagcgccgcgtccgggtggatccggagaaaggcgtcccctcgcactcgatctttacgctcatccgccgctacggcgacgtgagtttcctcgacgtggaactcctcaccggccgcacgcatcagatccgtgtgcacgccgcggaaagcggtcacccgctggttggtgacgacaagtacggtgactttgacttcaaccgcgaagtctcgaaaggactcctcgggattcccttccgccggatgttccttcactcatacagccttgccttcgagcaccccgtgactcatgagaaaatgaagattgagtcgccgctgcctgaagcctgcgaagaactgatccgggtgctgaatgaaagaaagaccgtttgaactgtttgtctttgactgggatgggacctgcatggatacgacgcacgccatcgcgtgcgcgatccaggaggctgcccgggttctcggtctcggggtcccgagctacgaaaccgcggaaagcgtgatcgggctcggccacaaagacatgatgagccgcgcggtgccggactgcacggacgcgatctacccggcttataaagctgagtactggaaggcttatataaaagaggaagaccggatcacggggctgcaccccgggatgcgggagatgctcaccgcgatgaaagatgccggcctctggagcgcgattgcgacgggaaagagccgtgcgggactcgcgcgggtgctcgcgaaaaccgggtccgatggctacttctgcgcgagccgcacgatggatgaggcgcagtcaaagccctctcctgatatgctgcggcagctctcggacgaatgctgcgtcccgatctcgaaaatcgtgatgatcggagacgcggtgcatgacctcgaaatggcgaataacgcaggcgccgccgcggtcggtgtcacctggggcgcggggcggcgcgaggcgcttgagaagcttcacccgatcgccgtggtggatacggtgcctgaactcgcgcgagcgatcggcgttgaggacctcctgaaataaagccagagttctgatcaggagcccggaaaaaagccgcacccggaaaggtttcccggtgcggcttctgtatataaaagaagagaaacggcagcgatcaggctttaagccccggaagcaccgtgacgccggactgcgtgagaagcgtcgtgagcgccatgagggggaggccgatgagggaggtcgggtcatctgactccactgtttccatgagcgcgatgccgagcttctcgatcttcgcggatcccgcgcagtcgaaaggctcctcgcggtccacgtaggcttcgattgtctcgcgggtgagggggcgcatcttcacgcgggtctgagaaagtttctcacgcaccgtgccgtccggcgcgatcacggcgagcgccgtggagaaaacgatcgtgtgaccctgcatcgcgaggagctgctcgatcgagcgctcacgcgtatgcggcttcccgagacggacgccgtcgagatccgccacctggtctgaaccgatcacgcaggcaccggggtgcttcgcggcgacccacttcgccttttccaccgcgagccgctggcaggcttccaccggcgtctcgccttcgcgcgacgtttcatcaatatcagacgcttccgcggtaaacggaatgccgagccgctcaagcagttcgcggcgatagcgcgagcttgaggccagaacaagttcaggattcttctttatcatagtgggccttattgtactgaaaccagttaagggagttctccgcatgtctgctgtccagatcgatgtcttccgcctctcgaaagagcgcgggactgcgtccggaaaattcacagcggccgagctgccgctcctcgcgggccacgacggccagttcaccgaggggcaggttgagtggagcgcgaccggaaccgagggccgcaaacatctcgccggtgccattctccgcatcgaagggaaactgatcggctcctgctgccggtgcggtgatccgctcactgttgatgttcatctgaaaacgtcgtttctttttacgaaaaccgagtctgaagcggattcaatgcccatttcggaagacggcgaggatgaagttgttgtaggatctagccactttgatgtggctaactgggtgcaggaagaattgctgctcaagctgccgctttatccggcgcacgatgtctgcaaggctcccgagctcccgacggatgaggaggaagagctggaagatgcccggcccaatcccttcgcagtcctgtcatcattaaagaaacactaggtttttcctcaggattttacaaacccggggataaacggttataattcgctgttttcaacgtggggtctaaaaatggctgtccagcaaaataaaaaatcgactgcccgccgtggcaatcgtcgcgctcatgatttcctttccaatccggcactcgccgtcgaaccgacgactggtgaagtgactcgccgtcaccacatcagcccgaacggtttctaccgcggcaagaaagtgatcgagacgaagaaggacgaagagtaattcatattcttcggggaagccggttccgccggtatggacttgcggcctgacgcagcgttaactgcatgggccccacggccaatgcggagcaataagcccgtggcttagtctgcaaagcatcagccttctcaatagcgggaagggctgccacagggtccgggtgtacgtccggcagaaaagagcttccctcagacgcatcacgaaaaggagaaaatcggaatttaccttccggtcttctcctttttttattttccgaaaaacatcaggggatcccttcgcccgaagtccccgtcatacgccaaacttgaggaggatgcatcagcatgccgctttcccaattttcccgcctgatatccacggggagcgcgcttccgtcgcgctgtgtcacgaatgatgagctcgcgcgggagctcgcgtcgctcggagtggaaacttctgatgaatggatccggtcccgcaccgggatcgagacccggtaccttgtgagcggcgaggaggggacgctgtcgcttgctgtcggcgcctcacgcgcggcgctggaaagcggcgcgattgaccccgagacgatcgacctcgtgatcgtcgcgacgacgacgccggacgaagtcttcccggcggttgcctgcaggctgcagagcgcgctcgggattccgccctgcgcggcgtttgatatccaggcggtctgctccgggttcgcttacgcggtttcggtcgcggactcgatgatccgctcaggcgctgcccgccgggctctggtggtcggagctgaatctttttcccgtctgcttgactggcgtgaccgcacgacctgcgtgctcttcggggacggggcgggagccgcggtgcttgacgcgtccgataagcctggcatcctcatgacgcgcctcacggcggacggcgggaagggtgactatctcgcggtgccggggcggcttgagggcggcaaggcgctggggtcccccttcctcaagatggatggacgggccgtgttccgcgaagccgtggagtcgctctcatcccaggcggaagccgtgctccgggaagccggggttgcggcctctgacattgatctctacgtgccgcaccaggcaaacgtccgcatcatggacgccgtggcttcacgtattggcgttaatccggcatctgtcgtgaagaccgtcttccagcacgggaacacctgcgccgcctccgtccccttagccctcgattatgctgtaaaaaacgggatggcccgccggggtgacacggtgctcctccagggggtcggagccgggatgacctgcggcaccgcgcttctcatcctgtaagggcgcccggttcaatccgcggcgctacgctgttattatttcgtcactgcccgataaccgggcttaacaggattttttccatgcgtttggcaattttgttcccgggacagggttcgcagagcgtcggcatgctttcaggctttgccggcaacgacgccgtcgcccgggtgatggctcgttcgagcgaggcccttggtgaggacctcgagaagctgatttctgaaggtcccgcggagaagctggggctgaccgtgaatacccagcccgtgatgcttgcctgctcggtcgctttctatgaagcggcgcgcgaggccggtatcccggaacccgccgtgatggcgggccacagcctcggcgaatactcggcactcaccgcggccggcgctttcaggcttgaagacgcggtgccgctcgtgcggttccgcgcccaggcgatgcaggaagcggtgccggtgggtcttggcggcatggccgcgatcatcggtctcgcggatgacgcggttgaagccgtgtgccgtgaggcgtcagaggccggtgtcgttgaacccgtgaatttcaacagccccggtcaggtcgtgatcgcgggcgtgaaggccgcggtggagcgtgcctgcgaactcgcccgcgcggctggcgcgaagcgcgcgctgccgctcgccgtgtccgctccgttccacagctcgcttctcgcgccggcccgtgaccggctcgcagcgcggctggctgaggtggcgatcgctgaaccccgcgtccccgtgatcgcgaatgtggacgccgcgcagcacggatccgcggactcgatccgcgacgcgctcgcccgtcaggcctgcagccctgtgcagtgggtgaagacgatgcatgagatggagaagctcggtgtcacgcatatgattgagtgcggtcccggcaaggtcctcacgggtctcgcccgccgctgcgtgccctcgattccgtgctaccccgtgcacagcgctgagacgctcgaagccgcgctccagagcctcagtgccgcgggctgatcatcggtaaaagttataaaggaaggaaagatggaaaatcaggtttttgcttcgaacgcgctggaaggccgcattgccctcgtaacgggcgcgagccgcggtatcggtgacgcgatcgcgcagtcgttcgcgcgcatgggtgcctttgtgatcggtacggcgacgagtgagtcaggcgctgccgggatcacggagcgcctcgccgctgccggaaaggggcgcggtgtcgtgctgaatgtcacgaactacgctgaagctgaagagctcgtttcttcgatcgtgaaggaattcggtaagctcgatatcctcgtgaataacgccggcatcacgcgcgacggcctcctcatgcgcatgaaggacgccgactgggatgacgtgatcgcgaccgacctcacctcggttttccacctctgccgcgcggcctgccgcccgatgctgaaggcgcgctacggccgcatcatcaatctgtcctctgttgtggcttcgagcggcaacggcggccagacgaactactccgccgcgaaggccggcctgatcggcttcacgcgctccatcgcccgcgagcttggcagccgcggcgtgacggcgaactgcatcaccccggggttcatcgataccgatatgacgaagaacctccccgaagagcaccgcgccgccatgaccgctcagattccgcttggccgactgggtcaaacggatgatgtcgcgaatgccgcctgcttcctcgcaagtcccgccgccgcttatgttacgggcgctgtgctgccggtgaacggtggcatgtacatgggatagccgcctcatcccctctggaaattttttccagaggtcttatataattctgcgataatcaaaattattgatcctgcatggaaccgggtatcgataagaaatgttccgaaccgttccacgtcgcagaagttttttatttgatcccggagatttaaatggaagaaaatatcgaagcccgtgtcaagaaggttgttgctgaacagctgagcatcaatgaagccgacatcaagaatgagtccgccttcatcgaagatctgggcgctgacagccttgacaccgttgaactcgtgatggcccttgaagatgccttcggcatcgagatcccggacagcgaacaggaaaagctgcgcaccgtccagcaggcgatcgattacatcaaggaacatcagaaggtctgatgtccgctggcttttcgcttttcgctttctgtcgggaaccccggctgaaagactatccggagaagcggctggcctgaggaatgggaagccgggaacgagcctggtttcccttttttttgcgttgaatttttggagtttgtcgttatgcgtcgtgtggtcgtgacggggcttggcattgtgtgcccccttggtaacagcgttgaagaagcctggaagaacgcgcttgccggtaagtccggtgtccggaagattcagagttttgatgcttctgagtactcctgccagatcgcgggtgaaatccgtgatttcgattcgagcgcctacgttcccgcgaaggaagcccgccgcttcgataagttcgtgctgtacggcgctgtggccggttcccaggcgctcgaggacagcggtctcgtggtgacggaagaaaacgctcaccgtatcggtgtcgcgatcggttccggcatcggcggcctcgtgacgatctgcgaaaacgcgaacaccctgaaggaaaagggaccgcgccgcgtgtctccgttcctgatcccgggctgcatcatcaacatggcgtccggcgaattctcgatcctgaagggtctgaagggcccgaacgtcgcttacgccaccgcctgctccaccggtcttcacgcgatcggcgaggcggcctgcatcattgcccgcggtgacgcggacgcgatggtggcgggcggcgctgaagccccgatctgcccggtcggcatttccggtttcgataacatgcacaccctgtcccgccgcaacgacgagcccgagaaggcctcccgtccgttcgacaaggaccgcaacggctttgtgatgggcgaaggcagcggcatcgtggtgcttgaggagtacgagcacgcgaaggcccgcggcgcccacatctactgcgaagtgaagggttacggcctttccggcgacgcctacaacatcacgaccccgtccgttgacggtccgacccgctgcatgcagatggcgctcgaccacgccggtctcaagccctctgacattcagtacctgaatgcccacggcacgtcgacctcgatcggcgacgcgaacgaaagcaaggccgtgatgcaggtgttcggtgacgacgtgaagaacctcgtcatgagctccacgaagtcgatgacgggtcacctccttggcggtgccggcggcatcgagtccgtcttcacgatcctcgcgctccgcgatcagattgttcccccgacgatcaacgtcgagaaccaggatccggcctgcccggttgactgctgcccgaacaccgcgcgcaagatgccggtgaagaacgcgatgaagaattcgtttggcttcggcggcacgaattccacgatcatttacggtctcgtggactgattcgcgtaacgacggaagggcgcccgcggagttttctcagggaggccctttccgcgagcaataaaggcgcctctcgcggcgcctttatttttcagggccttgcgcccctcatgttagaatcacgcattcaccctacacgagcggcagggcggcctctgagacccggatccgggtccgctgccgcgcggccggatgaagccggatgcggcttcccgacccttgagggcggtttacgatacacacatgcagaatatccgtaatttttccattattgcccatatcgaccacggcaaatcgacgctggccgaccgtctgatcgaacgctgcggcggcctctcgaaccgtgagatggagagccaggtgctcgactcgatggatctcgagcgtgagcgcggcatcacgatcaaagcccagacggcgtcgctgcgctacaaggcgcaggacggacaggtctatgaactgaacctgatcgatactcccgggcacgtcgacttttcgtatgaagtttcgcgttcgctttccgcctgcgaaggagcgctgctcgtcgttgacgcgacgcagggcgttgaggcgcagactgtcgcgaactgctacaccgcgattgacctcggggtcaccgtggtaccggtgctgaataagatggacctgccgtccgcgcagccggatgccgcgcgtgaggaaatcgaggacgtgatcggtattgaggccgatgacgcggtcctctgctccgcgaagaccggcatgggcgtggacgacattctggaagccgtcgtgaagcggattccgcctcccacgggtgaccgcgacgggaaactgaaggccctcgtgatcgactcctggtacgacagctatgtgggcgttgtgatgctggtccgcgtgaaggaaggaacgcttcacgtgaaggacaagatccagctgatggcgaccggcgcgacgcatctcgtggagcagctcggtgtcttttcgccgcgatccacgccgcgcgaaatgctgcaggcgggcgaagtgggcttcatcatcgcgggcatcaaggaaatccgtgacgcccgtgtcggtgacacggtgacgctcgcgcagaacccggcgaccgatccgctccccggcttcaagcaggtgaagcctcaggtgttcgcgggtctctacccggttgaagcatcggaatacgattcgctccgcgacgcgctggagaagctccagctgaatgacgcgtcgctgcactttgagcctgaagtctcccaggcgctcggcttcggtttccgcgccgggttcctcggtcttcttcacatggatatcgtgcaggagcgcctggagcgtgagtacaaccaggacctcatcacgacggcaccgtccgtggtgtatgaagtgaagcttactgacggctccgtcgtccagatcgagaacccgtcgaaactcccgccggttgaccgtattgaggaaatccgcgagccgatcgatacggtgacgatcttcgtgccgccggaatttgtcggcacggtgatcaagctctgccaggagaagcgcggtattcagaagaacctcgcctatcacggccgtcaggtggtattgacgtacgagctgccgctcgccgaaatcgtgctcgacttcttcgacacgctgaagtctcttacccgcggctacgcctcgatggattacgacttcctcgaattccgcgcgagtgacgtggtgaaggtcgacatgctgatcaacggcgacaaggttgatccgctctcctcgatcattcaccgctcaagcgcccgacgccgcggccgcgagatcgcggcgaagctccgcgaactgattccgcgtcagatgtatgacgtcgcgattcaggccgcgatcggcgctgagatcattgcgcgagagaatgttaaggcgctccgaaagaacgtgctcgcgaagtgctacggcggcgatatcacgcgtaagcggaagctgctcgaaaagcagaaggccggtaagaagcgcatgaagcaggtgggtcacgtgacgattccgcaggaagcgttcctcgccgtgctgcagatggggacggataagaacggctgatcaagccgcgacgcgaaaccggaagccatcgccatggactacacgctgccaatcgctctgatcaccgcggtgtcaggcatcctctgggtgcttgaccgctgggtgtgggcgcccgcgcgccatctttcatccggcggcacggcgcggcagccgaagtggcttgagtactcggcggggctttttccgatcctctttgtgatctttatcttccggagctttgtcgtggaacccttccggatcccctcaggctccatggagccgacgctgatcccgggggacttcgtcctcgtgaataagttctcttacgggatccggcttccgctctcgcacctcaaggtgattgacgcatcgtcgcctgaacgcggcgacgtgatcgtgttccgctatccgccgaacccgaaactcgactacattaagcgcgtggtggggctcccgggggatgaggtggtgtatctcgataagaagctcgtggtgaacggagaacccgcgccgctcacgcgtccgccccggaaagcggttgaggccgcgaagggctataaacacaactggcagattctccggatcgagaagctcggcgggaaaaagcacgcgatcgtgctaaatcccaatatctcgtccgaagtgcagcccgtcgccggcatgagcccaactgacagctgccgctacagccgccggggcgtggtctgccggattcccgaaggccagtacttcgtgatgggcgataatcgggacaattccgaagacagccgctactgggggttcgtcccggaaaagaatattattggccgggcttttttcatctgggccaatttccacaatatgagacggttcggccgcattcactgagaaatgtgcggctgcgggctttccgcccggctcatcgaagcaagaataagaaaactcttaggagcaaggaatggattttcctctgatactgctgatcctcacggtcgtgacgggcgtcttctggttcggcgacattttcgtctggaagaagaagcgcgcggaagccgcgcgagccgcggtggcggagtttgatgccgcgcaccccgggatggatccggcggatccggtgctctccgacgaacggaaggtggtggagtacaaggcgaagcgtcagccggtgtggctcgagtggaccgcgggtctcttccccgtgattctgcttgtcttcgtggtgcgcagtttcgttgtggagccgttccggattccgtccggctcaatgctcccgacgcttcagtccggtgacttcatcgccgtgaataagtatgagtacggtatccgcttcccggtgctcaataccaagctcaccgaagggacgaagccgaaggcgggcgacgtgatcgtgtttgatcacccgatgcagccgggcaccgacctcatcaagcgtatcgtcggggtcccgggcgacaaggtgatgtaccgcgacaagatcctctatatcaatggcgttgagcagccgcagaaaccgatcggcgactacgtggatcaggaattcatggtgacgcttaacgaacgccgggaaacgcttcagggccacgtccaccgcatgctcgtggatccgcgggctccggacgcgacaacgccgatggaagcgcagacccacccgggccgtattcactatacggataccggttttgagaccacggtgcctgccggccactacttcgtgatgggcgacaaccgcgacaactccgacgacagccgttactggggctttgttccggaagaaaatattgtcggccgggcgttcttcatctggctgaacatcttccacatgtcccgcgtcggacactttgaataagcaggaatacgaggcaacaaagactatgctagaactgcaggagctggagaaacggatcggctatcagtttaaaaacagagctttgctgcggcgcgcgacgacgcaccgcagcttcagcgcggatcataacgagcggctcgagttcctcggggactcggtgctcggctgcacgatcggctacgagctcttcaaactcgattcgcacttcagcgaagggcgcctgtcgcgcgtccggagcaatctcgtctgcgaaaaggcgctcgacgaaatcgcggccgatgtcggtatcagcgatttcctcctgatgggcgagggtgaggtgaagtcaggcggccgcacccgcccctcgatcctcgcggacgccatggaagcggtcttcggcgcggtgtttctggacggcggttttgagcaggctcagaccgtcatcctgaggctctacgcgaagatcctcgcggacctccccgaacgcatgggaaaagacccgaagacgaagctgcaggaggtccttcaggggaatcacctgccgctgccggcctatcgggttgtgagctgcacggggcaggccaattcgcagacctttgtctgcgaatgcgcggtggagcatttcggcattcggaccgaaggcaccggcacgaaccggcgtgacgcggagcagcatgccgcggcggccgctctgaaggcccttcaggagaagcctgaagcggcgaaactgaagccggcgtctgcctgatggcggagctccgagccctgaaccgtatttctggagaatattgagatggcgaatgaagaaaagcaggaagacgcggcaccgtctgtcgtgattcctgaggaaaggccttacccgaaggggttccgctgcggctacatcgccgtcgtggggcgcccgaatgtggggaagagcactctgatcaactacctcgtgggcgagaaagtctcgatcacgagccacaagccgcagacgacgcgtgaccgcgtgctcggcgtcctgacacgcgacaacgcgcagttcgtgtttgtcgataccccgggctttcagagcaaatataagggcggcctgattcaccacatgaataatgtggtgcgcggcgtgctctctgaagtggacgtcgtgttcttcgtgatcgacgcgatcggctggaagaaggcggatgaggaagtgctccgactgatcccgcgcgaaagcacggtgatcctggtgctgaataagaccgacgaactgaagaaccgcgaggcgctcctcccgctcatggcggaatcgatgcagaagttcccgttcgccgcgatcattccgacgtcggccaagaagggcaagcagtgcgaagagcttctcgaagaagcgaagaagtatctgccggaagacgctccgtattacgaccccgatctctacaccgataagagcccgcggttcctcgtcgcggaaacggtgcgcgaaaaggcgttccgtcttcttggcgacgagctcccgtacgggatcgccgtgacgatcgataagtgggatgaaacggataagtccgcggaaatcatcgcgacgcttctcgtcgataacgaacggcaccgcccgatcgtgatcggcgaaaagggcgcgaagcttcgcgaaatctcgcgtctcgcgcgcgccgacgttgaaaagatgctcggcaaacccgttcacctcgaagtctgggtccgcgtccgccgcggctggagcgacgatatccgcgctctgaagaccctggggtacgagtaaaccggaatcatggcgggaaacacgaatccccagacgctgctaggcgggtacatcaaccggaggggcggtgaccgggtaaccggtgaacccgcctttgttctccggatggagccctggtccgaaacgagtcttctcgtcgacttctatacgcggcaccacgggcggatcctcgcccgggcccgcggggcaaaacgcccgacaagccccatgcggggaatcctctcggaattttccccgctcctcatcagctggaacgggagcggcgcgacaaagaccctcatgaaggtggaatggatgggaggctttgccccggtggagggggactcgcttctctccgctttctacctgaatgagctccttcttcggctcaccccgcgtgaggatcccgaggaacggctttttgtcgcgtactgggatgcgcttaaggtgctcgcgaccgaatccgcgccccccgcgattgaagccgcgctccgcacgtttgagttccggctccttcgctacgcggggtacggtttccctgcggagttccgcgacggcttctatgtgctccggggtgaagagctcgtgtacgccggggcatcagcgcctgagagcggtccttattatgcgtcggacacgctgaagtccgtcgtaaaattggatttctcgaatcccctctcggcccgggccgcgaaaagcctcttccggggcgtgatcgcgagcctcctcggagaccggccgctgaatacccgccgcattctctcggaactgaagagactctgagagcctgaggggactctccctctaggcgcgccatccggaggcgcgcatggggacttaacaaccgactcattgattgactgactgaaaagaataggaataaaggaatgctgggacccgtagtgatggatgtgagcggcacgacgctcacggaagacgaccgccgcagaatcgcgtcgcccctcgttggcatggtgattctcttcacgcggaattttgagaacccggagcagctccgggcgctctgccgcgagattcatgaggcgaaacccggcgttctgatttcggtggaccacgaagggggccgcgtgcagcggttccgcgacgggttcacgcggcttccggcgctcgcccagtacggcaggatgtatgagcatgacgcgggggaagcgatccgcgcctcctggtctcacggctacgtgctcgcggcggagctcctcgcgcacggcgttgatttctccttcgcgccggacctcgacctcgactggggtcactcccgcgtgatcggtcaccgctctttctcccgcagccccaaagtggtcgcggaactcgcgctcgcgatgattgacggtatgcacgcggccggcatggcgacctgcgggaagcatttcccggggcacggctgggcgaacgctgacagccataaggagctgccggaagatacccggttccaggcggaaatcatcggccaggacgcgaagccttacgcgtggcttggctctgcgctcgactccgtgatgaccgctcacgtgatgtatccggacgtggacgcgattccggcgactttctccagccgctggcttcaggatgtgctccgcgaaaagtgcggtttccagggcgtgattttctcagacgacctcgcgatgggcggggcgcttgggctcggcggcattgtgcagcgggctgaggccgcgctgcgcgccgggtgcgacgcgctgatcctctgtaacgacgctgcgcagacagacgacctcctctcggggctcgagtggaaggcgacgccgcagttcgcggcccgtgcttcccgcctcgcgccgcgtcgcgcgattgagtcgatggagtcgcttcagagtgacccggtttacgttgacgcgaaaaagcgggttcccgcgaccgacgcggatctcgtcgactgggaagaataaatccggcccccggcgataggcagaatgccggacgccggaatgggggacggggtccgtcctccccggtcccgcccgctgtgcgacaatgcgtaggaaagatagaaacgcttcggaagtgtcttcagcgcgctgaactcttccggaggctgccggattaatagcccccagagcgggggaggagaaaggatgattatcgagtcgctccttgatacggacctctataagttcacgatgatgcagtgcgtgctgcatcagttccccggcgccattgtgcgctatcggttcaagtgccggaaccacggagtggatctccggccttacctccgcgaaatcaatgaagagatcgatcatctctgcagcctcaagttccctgagagtgagcttgagtatctcgcgggccttcgctatatccggcgcgactttgtcgattttctgagcctcttccacctgaagcggaagtacatcacggtcaccgcgagcgatgactatgagtgcggcatcgatatttcgatcgagggcccctggctccacacgattctctttgagatcccggtgctcgcgattgtgagcgaagtctatttccggcatcacgacccgatggatgggttcgcggaaggccgccggaggctcgaggaaaagtgccgcatggtgcttgaggaaccggataacgacgggctctttatttcagacttcggggcccggcgccgcttctcccgcgcgtggcaggagtatgtgatccgctacatgtcggatacgctcggtagccacttcgccgggacgagtgatgtgttcttcgcgaagaagttcggcctcacgccgatgggaacgatggcgcacgaataccttcaggcctgccaggcgctcggcccccgactccgcgacagccagacgttcggtttcgatatgtgggcgaaggagtaccggggagacctcgggatcgcgctgtcggatgtctacggtctgaagccgttcctgaaagacttcgacatgtatttctgcaagcttttcgatggcgcgaggaacgattccggcgatccgtttgtctggggcgaagcgatgatcaagcattacgccgcgaataagtgcgacccgaagagcaagacgctgatcttctcagattccctcaatatcccgaagacgctcgatctctaccgtcacttcaagcaccgtatccgcctttcctttgggatcgggacaaacctcatgaatgacgtgggtccgcagccgctcaacatcgtgatcaagatgattgaggcgaacggtcagcctgtcgcgaagatctcggatacgcctgaaaagggcatgtgcgaggatccgacgtatctcgcttacctccgtcaggttttcgggctggatccgagagaaccggcgtctcccgcgtcgaagtaagacgcctgtggtttccgaccagaaacagaaggaccggcttttcagccggtccttttttgtagacccaaaaaactggaaaggtcctgaatttcttttgcatgagccggaaatttcatgtaaaacatactttcagtgcgaaaaactttcgttacaatcgaaatgctgtctcgccactgaaagtcgcccggagaggcgtctgcaaactgtcccggtcacacccctgacagcgcgtgtggcccgagagagtttcagaactcacctgaggagcgattgatgttgttacaaagactggctcgatacgcgctgcccctgatggccgcgatcatgccggcagtctcccacgcatctgagatgcagggatccgatctgtccatcgtgtgggcgattccgttcgccggcattcttctttccatcgcgctcgtgccgctgatcttcccggatttctggcacaaccacttcggcaaggtctcgcttgcctgggccgcagtgacgattattccgctctcgctcgctttcgggcttcataacggtatcgtcgccctgaatgaagcgctggtgggtgacttcattccgtttattcttttcgtcggcacgctctttgtcgtggccggcggcattcatatcagcgggaacttcaccggccgcccggtcggaaacctcgcgttccttatcacgggcgcggcgctcgcgaacatcatgggaacgacgggtgccgcgatgctgatgatccgtccgcttctcaaggcgacggagcatcgcaagtatcggatgcacacgttcatcttcttcatcttcatggtggcgaatatcggcggctcgcttacgccgctgggcgacccgccgctcttcatggggttcctgcgcggcgtgagtttcttctggacagcgcagcatacgctgatcccgatgcttaccgcgatcggcattctctccgttgtttacctcgtgatcgacagcatctgctggaagaaagagcatccgaacggcgctccgatcgtggatacgaagcgcggtgaaaaggccgcgattcagatccgcggcggcatcaacttcatgatcctcgcagtggtgatcggcgcggtgctgctttccggtgtctggaagtccggtttctccatcacgttcttcggcgtgacgctcaccggtcaggggatggcccgcgacgcgcttttcgtcctctgcatcatcgcctctctcatcctgaccccgaaagaggtccgcaagaagaaccagttctcctgggatccgatttttgaagtggcgaagcttttcgccggcatcttcgtctgcatggggccggtgctcgccatgctgaaggcagggtcctcgggcgctttcgcgccgctcgtcgcgctcgtctcgaactcggacggaacgcttaacaattccgccttcttctggctctccggcgctctctcctcgttccttgacaacacgccgacctacctcgcgttctttaacctcgcgggcggtgatccgactgtgctgatgggagcggacgcggtgacgctgctcgccatttcgctcggctctgttttcatgggcgcgaacacctatatcggcaacgcgccgaacttcatggtgctctcgattgcccagagccgcggcgtgaagatgccgtcgttctttggctacatggcctggagcgttgggatcctgatcccgactttcctcctgatcgactggctatacctcatgtaaaagtctgcatgagggctgcataaacctgtaggatactgagaaggcagctcaggcggtaaccccgccagccgccttctcattttttttacctgttggagttaatttttagcttcactcccctagaagaaacccaaatcagaacctctgaggagcgattgaatgacttacaagaactggacgggaattctcgtcaccctggcctcggccctcgcgccggcagcggcttacgcctctgaaggccatggcacggagttttcgctgatctgggcagtgcccttcgcgggcattctgctctcgatcgcgatttttccgctgctgcttccgaatttctggcatcaccactacggcaaggtgtcgctcgcctgggcggctctcgccatggtgccgctcgctgcggtgttcggcgtgcatgaaagcgcggtgcttctgaatgaagcgatcgtgggcgactttatcccgttcattctttttgtcggcgtgctcttcgtggtcgcgggcggcattcatatcaagggaagcttctcgggccgcccggtcggaaacctcgcgttctttatcgtgggcgcggcgctcgcgaacatcatgggaacgacgggcgccgcgatgctcctgatccgtccgcttctcaaggcgaccgagcaccggaagtaccgcgtgcatacgtttgtgttcttcatctttatcgtcgcgaatatcggcggttccctcacgccgctcggcgacccgccgctcttcatgggattcctgaggggcgttgatttcttctggaccgcggagcatacgctcctcccgatggtgactacggtcgggatcctttccgtcctttacctcatcatcgatacggtcttctggaagaaagagcatccgaacggcgctccggcactggacaccgtgcacggcgaaaaagcatcgatccagatccggggcggcgtgaacttcatgctgcttgcgattgtgattctcgcggtgctgatgtcgggcgtctggaagtcggggattgaagtgtcgttcctcggcgtgacgctcaccggccaaagcattgcgcgcgacacgatcttccttctctgcgggatcgcctccatcgtcctcacgccgaaagaagtgcggaagatgaatcagttctcgtgggaaccgatttttgaagtggccaagctctttgcagggatcttcgtctgcatggggccggtgctcgcgatgctgaaggcgggggccgcgggtcccttcgcaccgctcgtcgcgatggtgacgaacgcggacggcacgatgaataactcggtcttcttctggattaccggcgcgctctcgtccttcctcgataacacgccgacctacctcgcgttcttcaacctcgcggggggtgatgccggagccctcatgacgcagggcgctgcgacgcttctcgcgatttcgcttggctccgtcttcatgggcgcgaacacctatatcggcaacgccccgaacttcatggtggtgtcgatcgcgaaggaccgcggtgtcgcaatgccgtcgttcttcggctacatggcctggagcgtgggaatcctcgttcctaccttcatctttatcgactggctattcctaatgtaaggagaggctctgcgtcagtatcggacgcgggcgcagtgtcacacgcccgcatccctcacgagaagagagcctctcacatacgcctgattcccaacccggaattgggcgtttttcatatgtgcgtgatattgttattttcaataaccaaacggagacggatccggagcgggttcccggagaaagctcctgaaaacacctgattggaggttctgaatggaccagcttgtaatttttgacacgacccttcgcgacggcgagcagagccctggcgcaacgatgaccggggacgaaaaagtccgcatcgcgcagcagctggagcgtctcggggtcgacgtgattgaggcgggtttcgctgcggcgtcggtcggcgatttcctcgcgatccagcggatcagctcgctcgtgaaggagtcgaccgtctgctcactctcccgcgcggttgagcgcgatattgagcgcgccggcgaagcgatcaagggcgctgcgcggaagcgtatccacacgttcatcgcgacgagcccgattcatatggagatgaagcttcatatgacgccggatcaggtggtggagcgtgccgtgaaggccgtgaagctcgcccgtgaatacacggatgatgtggagttctcggctgaggacgcgtcccgtagcgatccggcgttcctcgcccggatctgcgaagaggcgatcaaggccggcgccacaacgatcaacctcccggacacggtgggttacgcgatccctgagctcttcgggcagttcatcctcgatatccgcactcgcgtcccgaattcagataaggcgatctggtccgtgcactgccacgatgatctcggcatggcgaccgcgaattcgctttcaggcgtcctggtcggcggcgcgcggcagctcgagtgcacgattaacggccttggagagcgcgccggcaactgcgcgcttgaggaagtcgtgatggcggtgaagacgcgtcccgattactttaagctcgaaacccggatcaacacgaaggaactcgtgccgacctcgaaactcgtctcttctgtcaccggtttcccggtgcagccgaataaggcgatcgtcggcgcgaacgctttcgcccacgcgtccggtatccatcaggacggcgtcatcaaggcccgccagacgtacgaaatcatgcgggctgaagatgtgggctggtcgaaggaccgcatcgtgctcgggaagctctccggccgcaacgcctttaagcagcgtatccaggagctcggcattccggtgacgagcgaagtggaaatcaatgaggcgttcctccgcttcaaggacctcgcggataagaagagcgagatttttgatgaggacatccagtcgctcttcgcgccgtcaggctcccacccgatgaataactactacggctttgtgagcctcgatcagaagtccgagacgggcgagcggccgcacgcgaaagtggtgatgacggaagggggcggcgagatcacgaccgaagcctacggcaacggtccgatcgacgcggtcttcaaggcgattgaggcgcacgtgaagtcaggcgcccggcttgatctctactccgtcaacgcgatcacggggacgagtgaagcgatcggcgacgtcgtcgtgcgtctttcctgcgacggccgtgtcgtgaacggtgtcggagccgatcctgatattattgcggcgagtgccaaggcctatatcgcggcgctcaacaaactgaagaaggcggatccggtgaacgcgcagatcggcgcggttccgactccgtaagagaagaagggtttccgcgtcagcgagcggggagggaagaaggagagagccgccccgccgctctctgcggaaactttctttttgcgctacaatcagcgctttccacgatgcaggttctaacacctgtaatcgctcgttttattttttaaggttagacaaatgtctgaaatcaacaagcaggaaatcatcaagcagtatcagcgcgctgaaggcgacagcggttctcccgaggttcaggttgctcttctcacggcccgtatcaatggcctgaccgagcacttcaagacccactcgaaggacttccactcccgccgcggcttgctcatgatggtgtcccgccgccgcaagctgctcgattacctgaagcgtaccaacgttgagagctatcgcaagctgatcgactctctgggtctgcgcaagtaattttgcatctgcagtatggttcgatggctgcggttctgctcaagtttttacctgagcgggccgcagttttcttttaataaaagtgtttttcttatccggcaggcgctgatggcttcgcgcgttgcgacatggatcccttcagaaagcgtctgaaggacatccgggcagaaggccccgggcctctggcgaagagggaatccatgccgcagcgtgccgtcacgacataggctgacctgtcaggcgaaaggaaaacttctctaaggaatacagtcaatatgacaatgttcaataaggtctcccggactttccgtttcggcgacaacgacgttacgctcacgaccggtgaagtggcccgccaggcctccggcgcctgcgtcgtgcagatgggcgacaccgtggtgctcgccactgttgtcgcgaagaaggaagcgaaggaaggccaggacttcttcccgctcaccgttgactatgttgagaaggcttacgcggccggccgtttccccggcggcttcttcaagcgtgaaggccgtccgtccgagcacgagacgctgacctcgcgcctcatcgaccgcccgatccgcccgcttttcccggatggcttctataacgaagtgcaggtgatctgcacggtcgtgtccgctgaccccgaagtggatccggacatccccgccatgctcggcgcttccgccgctctgcagatttccggcatccccttcaagggcccgatcgccggctgccgcgttggttacatcaacggtcagtatgtctgcaacccgcacgtctcccagatggcggattccaagctcgacctcgtcgtcgccggtacgtcccgcgccgtgctgatggttgagtctgaggccgaccgtctgccggaagatgtgatgctcggcgctgtgagcttcggccaccagcagatgcaggtcgcgatcgaagcgatcaacagcctcgttgaagaagccggcaagcccgcctgggattggcagccgcccgcgaagaacgaggctctcattgcccgtatccgcgaactcgctttcgacggtctcaaggccgcctacgatatccgccagaagcagccccgctccgagaagatccgcgccgtgtacgaactcgtgcatgagacgctgaagaaggacgctgaggccgccggcgctgaacccacgttcgatcagaacgaagtggacggcattctgtttgaaatggaagcgcacctcgtgcgtgaccgtattctccgcggcgagccccgtattgacggccgcgacacccgcacggtgcgtccgatcgaaatccgcatgggcgtccttccgcgcacccacggttccgcgctcttcacccgcggcgaaacgcagtctctcgccctcacgacgcttggcacgaagcaggatgagcagatcatcgacggcctcaccgctgagagccgcgatcgcttcatcttccactacaacatgcccccgttcgcgaccggcgaaaccggccgtatcggctccccgaagcgccgcgaaatcggccacggccgtctcgcgaagcgcgcgctcgccgctgtgctcccggattacgacgatttccagtacacgatccgtgtcgtgtctgaaatctgcgaatcgaacggctcctcctcccaggcttcggtctgcggcggctgcctctcgatgatcgacgccggcgttccgctgaagggcctcgttgccggtgtggccatgggcctcatcaaggaagacaacaagttcgccattctcaccgacattctcggtgacgaagaccacctcggcgacatggacttcaaggttgccggtacggaagacggcgtgaccgccctccagatggatatcaagatcgacggcatcactgaggacatcatgaagctcgcgcttgcgcaggctcacgatggccgtatgcacatcctcggcctcatgaaggaagcggtcggcagcgaaaagcgtgaactttccacctacgctccccgcatgatcaccgtgaagatcaatccggagaagatccgtgacgtgatcggcaagggcggctccgtgatccgcggtctcgttgaggaaacgggctgcaagatcgacgtcgaggaagacggcaccgtgacgatttcgtccgcggataccgcgaaggctgaagaagcgaagcgccgcattgaggaaatcgcggcggaagtcgaagtgggccagatctacgaaggtacggtcacccgcattctcgacttcggcgctatcgtccagctcctcccgggcaaggacggtctgctccacatctcgcagatcgcgaatgtccacgttgacaaggtcaccgattacctgaaggaaggccagaaggtccgcgtgaaggtgatcgaggctgacgaaaagggccgtgtgcgtctgtccatgaaggcgctcatcaatgatgagaagcgcgccgctcaggaaggctctgacattcagcaggcttaatgcccctgatgtctgacatctgacgcctgaagaggagggggctgaaaagccgtcttcctctccgctcaggatcgaagccggtccgttattccagaaatggcggcaaacgcccttcggagtgacggccggcttttctcagcacttgatctgcgtcagttgttcgaaagaactttcttcaagtaaaatatttagtcttttctgaaacaggatcgggagaccatgagccgtattccgctcgttgttggaaactggaaaatgaacggctccctcgcgtcgtcagacgcctggctgagggagttccgggagctctgccgcaaggacgcggtccgctgtgaaagcgggctctgtgttccgtcggcgtaccttctcgcgttcacgccgaagctcgactcggagcccgtctcgggtgaattccatgtcggagccgaggatgtgagcgaccgggttggcacgggtgccttcacaggcgaggtgagcggcgatatgctgcgtgaccttggggcctggtggtgcattgtcgggcattcggaacgccggacgctttacggcgaaacggacgaacgcgtggcagagaaagtgaaggcggcgtatgacgccgggcttcatccgattctctgcgtgggcgaaacgctcgaggaacggaacgcgggccgtacccgtgaagtcgttctgggacagatcgccgcagtcctttctgttgcaggaattgaagcgctcgaagcgggcgccgtggcctatgagcccctctgggcgatcgggaccggcgtcgcggcgggcactgaccagattgaacccgtgcatgccgtgatccgcggcgcgctcgaggaagcagaccctgtgaagggcggagcgatccgcattctttacggcgggagcgtgaagccccaaaacgctgcagagatcatcgctctgcctgatgtggacggcgccctggtaggcggggcgtcgctcgacgcagggaacttttatcggatttgcgccgcagtgcggtgatatcggtttatagaggaaaaagaatgtccttattaatgagcattggcctggtcgtacaggtgctttccgccattgccctgatcgttctcgtgctgctgcagcacggcaagggcgctgatctcggcgccgccttcggttccggcgcttcgggctcgatcttcggcgccgccggttccggcagcttcctgtcgaagatgacctggatcatcggcgcggtgttcttcctgtccacgatcgcgatcacgatcggttccggtgccttcgcgcatcacaatgcccgccaggcgagcgataacggcggtgtgctcggcacgctgtcctccgttccggctgacgtgtctgctccggccgcggctccgtctgcccccgctgctgccccgtccgctccggcggcttcgggcgctgctgccccggctccggctgcctccaatacggctgatactaggaataaccctaccaccccttcccaaaacgaaattcctaggtaaaataacaatcctacgtgacgcgcaaaacaaaacagcgcaaaacgtattaacaatctaatgcggtcgtggcgaaattggtagacgcaccactttgagggggtggcggagaaatccatatgagttcgactctcatcgaccgcaccagttttaactgagtgttccgcaaggaacgccggttagggagtgtcggaagcgcgagcgaccggtgcttaaaaagacaggggtgtcgccaagttggttaaggcatcggattctgaatccgatatccgtaggttcgagtcctaccacccccgccaactgaatactgcacggaaacgtgggaaaggccagaagatctgatgattttctggcttttttgctgtccggaagataaatatcaatccctggcaaggctgattgtcctggcagggatttttttcgtcttggcagccggggatgccgctgaccaatgaaaaaaataagccggccattcctttttctgctgacggggacaaaaaaacgccggggaagaaccccggcgttggtgagaataggcggatacgggctttaaacggcctcaggagtcgttcagaccgagtgggtgagcttcctgatgcgaagccacgcccggacgcgttctgaggccgcgtgaacgacccgcgcctctgcggcggaccgcatggattcggcatccagcacttcggtgtgcagggcgagccccgcgccatagcgttcggatgtcacgcggagattctcttccgcgaaccggagagaggatttggcggcattaagacgcgactctgtctcttcccaggcgagccacgcggttctcatgtcaagtcttaagactgactccgcctcagccctggcgtcagtgagcgctcccgcggtcttttcgctggctgcggcgcgtgatgacccgatgccgccatcgaatatggtccaggagaccaccacgccggcgatccacccggagcttcgttcttcggtgagatagtgcccgttctgcttcccgtagcccgcgacaagcgcggcctgagggagattgcgggccctggcggccccggccgcggcgtccgctgctttgacctgttcggagagtgaagcgagctccgtgctggagcgcacagcgtcgtctgtcagttccggaagcgtttcagagatcagcggctccggaatagggtcgagcgtcacggattcatcgagctcgcgcccgagaagccggttataggacgcctctgcggtggagagggcggtcttcgccgcgatcaccgcgtcatgcgctgtcgcgagcgcggattcggcggcatagagttcgttcttcaccgccatcccttttttaagcctcgcctcggtctgcttcttatgcgaagccaccgcggcttcgtgcttctccgcggcgcgcagcagagcttccgcctcagcgaccgccacatagtggagggaggcctgatagcggacttcgttttctgtcgtcttttcgacgtaggacgcggagtccgctgccgcctcacccgcttcaatcagttttgagatccggcctccggtgtagagcgggagggccgcggataccgcataccccgtcgtgtgattctcggtcaccgggaccgacgccgagaacccgaagaggttcacgttcattccgagaccgctctcaaaccggaagtggttcgcggagagcgtgacggatggcatccgctccgcctttgcggcatcgagattctcgcgcgccgcggcgctgaggcttcccgcggctttaagcgggcgggacgcggcaacagcggcgtctgccgcggcggacatcgattccgcggccgcaggggcgggcgatagggcggcgaagaccgccgccgcgagcgggaggacgagtgatacggttcttttactcttcatccttcgcctccttatagggccagcgcgtgtagtaccagtaaagcatcaccggagtgagcgccatcgtgaacaccgtggacgcgatcgttccgaagatgaaggagcagccaaggccgccgaaaatcgggtcaatcagcatgatgatggaaccgaaaataatggagagcgacgtgagaagaatcgggcggagacggacggcaccggcaagcagcaccgcttcccgcaccgaaatcccttcccgcatgtattccgtcacgaagtccgcgataagaagcgaattgcggacaagaacgcccgtcagtgtcacaaggccaatcagcgatgtggcggagaagatctgtcccgtgagccagtgccccgggaagagcccgataaagcagaccggaatcgcggacatcacggcggccggcagaataaacgaccggtagtacgcgacgagaatgaagaagatcagcatgacggcggctgagagcgcgataaagagatcgtggtagcagtcaagcgtcatccggatctcaccatcccagaggagctgcaccggggctcgggaaaggtcggcgcggaccggcgtcaggccgaggtttccggtcgcgagacggtcgccgtttccgaccggcatcccgttcagccggtggttgagatcgagcaccgcgtaggccgggaccgagtttccgagttcaccgccgaccagcaccacccgagtgccgtctttattcagaatcggacggggagccgtggtgtgtgtcacgcggacgagttctgagagcggtacatcgagtcccagtttattcttcacggtgagaccgccaagctccgccggatccaccttgttcccgtagtccgcgcggagaatcacgggctgcgcagtccgttcgcccggcgcgtggccgtagcccaccgtttcccctgccgtatagcggcggagcgcgagagcggcttccgcggggaagacaccggcaagcgacgctttctcctgatccacttcgaagcgcgcctcaggaatatcggtcggttccgttgtcgtcgtctccaccatgtcgtacgtggagcggaaggcgtttctcaccttttcgcttgcggctcgaagctgctcaccgtcgttcccatagatttcggcaagcacagtggccctcatcgggggtcccggcggatcctctaccacctggatcgtggattccgggtaccgggcggagacttccttcaggtcctttcggagcttcgccgcgatttcgatcgatgtccggtggcgttcgcccttatcaacgagattcacgcgcaccgcgccgatgttgctcccgggctgagtgctgcctcggaacatggcggtgaagtcggggacaccaggcatcccggaccaggagagaacgtccgttacctccggaatctgcttcacaatcgcctcagtatcccgcaccgcgcggtccgtcacttcaagcggcgtgccgtccgcgagtttgagagaaacgttaaaggtgttcttgtcgtccttcggaaggaacccggtctcaacgccaaagagtgacaccggtcccgagatcccctgcggccggatgaactgccaggcgggcatcaggaacgagaggatgagaaggagcgtgagcgccgcgaggaagattttggttcgcttcgggtttccgacgagccacccggcggtccgatagtagaagtgaccgagtttcccgagttttgggcggccgtccgggctcggctcttccttatgatccggaaccttcaggatccgcttcgcggtccacggggcgacggaatacgcgatgatgagggaactgaacaccgcggtcggcaccatgaagccgatcgggaagaagtactgcttcggcatcccggagagcgacggaatcagcgtgtagaaaacgagcatcacagtgaaggtcgcaaggatcgtcggataaccgatttcagacaccgcgcgggcggcgagtgtcgcccggtccgcggtgggatccgccgcgtaatgccggtcgatattctcgatcaccacgatcgagtcatcgacgagaagcccgagcgcgatcacaaagccgaaaagcgacacccggttgatcgtgagtcccgccgcttcgttgatgaaaagcgtaagcgacagaatgagcgggatcgtgatcccggtgatgcaggccgcgcggaacccgaggaagatccaggtgatcgcgaagactgcggcgatcgacaccgcgatatgaccgatcacagagttcacggcttcgtttgccttcgctccgtcgttacgcgtgatgatgaggtgaacgtctttcgggaggaactgctcctgcatccggtggatgcgtccgagcatcgcttcggtcgccacaacggcgtttgtgccctttttcttcgccgccacaaaggtgacagaaggggcttcgcccgcggcagacttcgcgagtttcgacgccggccccggggcccagcggctgagtgcggtgcgttcggatgacggtccgtctgtgacgtctgccacatcctgcagcagcactggccgccccgcgggagacgcgatcacgaggcgcttcaggtcagcggccgatgtcacaaagccgtcgtagcgaagcgtgcggccggtatccgcggcggcttctgatccaagcggcgccgcgatattcgtggttttgagggcgagccgcacggcttcagcggggatcccgaaggacgcgagtttcttcggatccattgtgacctcaaactcccgcgtccggccgtcatagacgtaagacgtcgagacatccttgaggctcgtcagcccctccacaaaccgctcggcgatccgccgcagcgcgtagtcgtcgtagccgccacctgtgagtgtcacggcaagaatcggcacgtcatccgcatccgcgctgatgatccgggcgtctgacgcctctttcgggaactcgtttctcgcgctccggaagcggtcgtaaagcttcacgagactcgcttccttgttttcgtttaccttgtactgcacgctgatcacggcagccgaatccatcgcggtcgaaaacacgtgatcaacccctggaatctggttgatcacgcgttccgcgggcttcacgatgaggtcctcgatttcggcgggcttcgcgccgggaagcgtgatgatcacttcggctgccggcatcgagatctgcgggttctcttcgcggggcgtggtgagtacggcgatgatgccggcggcaagtgacgcgatgatgatgaggatcgtgagttttgagtccacgaaccatcgcgcgaagcgccccgggagattcagcggcttactcacggcgcggctccggctgcggcggcaggatcaggtatcgctttcaccggtgcgccgtccgtaagcgatgaaggcggagacttcacgagaatttcatcccctttcagcccggcatcggcttcacgcgatccgtcggggagcgtggtgccaagcctcagccagtggaattccgcgtgaccgtcccggattacgaagcagccatccagcccccctcggttcgtgatcgcggatttcgggataaaaatgcctttttcagacgcgttcccggcgatcgctgcgcggccgaaggtcccggtgagaatccggtctcccttcgggagcgcgattttcaccaccccagtgcgggtcacgggatccgcggaatgtacggcctgcgtgacggtccctttgatgggatcagtccggccgtccagcgtcacagccgcggggtcgcccggtttcacagagccgagaagctcggccggcagatggatttcaaacacctggccgtccagcgactcaagtgtcacgataggaagccccgggaccgcaagcgttccgggctgcagctgaatcgaaaggacgcgcgccggttccggagcccggatcacggcgtcgccgagccgctcatttgcctgcgtgaggcgggcgcgtgcggcgcgaagcgtttcagccgtctgatcccggaggagcttgaccttccggagctcgatttcgctcgccgcttcgtcgcgatacagcccctcaaacttctgcacatcggtttccgcgtcgcggagccggatcgaggcggccttcacgtccgcgtaggcctgctcgcggatcgagcggacatcagagtcatcgagcaccgcgaccacatcgcctcgcttcacgagatccccttcctgatgcggaacggatcggatataagcgggaaggcgggacgccatcgggaggaggcgggacgcggcaacggatcccggaaactctctcggagcgcttgtttccatcacggggcggatcgtttccacctggagcggctcagcctttttatccgccgcggggcttcccggctgatcggagcatccggtgaggatgagcggtatcgcgagaagcgcagcgagaaaagcggatttcatgacgcgtccccaatcttcagcacccggatgaggtgatcggcgtagtcttcgggcgacggcgtttccttcgcgatccccggaaggtgaagccgcatatcggaaagcgtataggcataggaacaggaagcgatgagagagagcgtgatttcccccgagtcaagatcgggccagatctttgcggcctccgattggaagagcctgaagccttcgccgaacaccccttcaccgagcaccttgccccgctccttatcctcatcgatcagcgaccggagaaggaggcggcctcggtcctgatcctcgtaaagcgcctggcagagttccgtcagcagggcgcgaagccgcgccaccggtttccggtgcgatttcaccgcggctttgaggttcgcgatggtgccttccgccgtgcgttcgagtactgcgagatacagctcgtccttactcgtgaagtggtaatagagcgcggcctgcgtgagtccgagagcgtccgcgatgtttcgcatcgtgacgccatcaaacccccgtgaggcaaagaggctctttgcggctgcgatgaagtcgtcccgatttctggatcccggcatgtctgctcccttgttatgcttatggttatgcgctgagccctttcgtgtcccattcggacggaagggcttttttactgattgattagcaagtaaattatagaacagctggagttttcaggccgttatcccgcgggacacgagatatggcggaggatattgcggaaaattcccgtatttcggggtccgttttgcgcttcaaggcacctcaattccgttaaactcgaaattcaccagaaaaacttttatcccctgctcgtctgagcacggtcttcaataccgaaggcgctgctccgggctcaaaaaaacagataaagaaacatcatgacaactgttaacggcaattttctcaagttccctggcgtctatctcttccaggaaatcgctcatcaggtcgcggcctttaagaagacggctcccgagaagcgtgtgatcagccttggcatcggcgacgtgacgcagccgctcgcccccgcggtgatccgcgcgctgcactctgccgtggacgagatggggaacgcagcgaccttccgcggctacggtcccgagcagggctacgcgttccttcgcgaagcgatcgcgaagaatgactatcaggaccgcgggatcaaggtggacgcgtctgaaatctttgtgagcgacggcgcgaagtcggatgtcggcagcatccaggagctcttctcaaacgacgccgtgattgccgtgaccgatccggtgtacccggtttacgtggactcgaacgtgatcgccggccgcgccggtgactacgtgaacggcaagtggtcgaacatcgtttacctcccctgcacgaaggcgaacggttttgtgccggagttcccgaaggtccgtccggatgtgatctacctctgctacccgaataacccgaccggcacggtgcttacgcgcgacgcgctgaaggcttgggtcgactatgcccgccgcgaaggcagcgtgattctgtacgactccgcctacgaagcctacatcacggaaccgggcgttccgcacagcatctatgaaatcgagggtgcccgcgaagtggcgatcgaattccgcagcttctcgaagaccgccggtttcacgggtctccgctgcgcctacgtggtggtgccggaagaactgaagatctcggacggcaagggcggccaggtcgctctgaagcccctctggagccgcagaaacggtacgaagtacaacggctgcccctatatcgtgcagcgcgctgccgaagcggtgtattccgaagaaggcaagcaggaaatccgccagacgatcgggatctatcagaagaacgccgcggtgatgcatgaaggccttacccgcatgggtcttgaagtgatcggcggcaagaacgctccgtacctctgggtcgcgacgccggaaggcacggactcctggggcttcttccataaggtccttgagaacgcagccgtggtctgcacgccgggtgtcggtttcggcgccgccggtgaaggctatgtccgtatgaccgcgttcggctctcccgcggacaccgttgaagcgctggagcgtctcgcgaagatctgatgatctgacgcggaccgcgcaggaaataaaagccgcaggtttgacgcctgcggcttttttgatgcctggggacagccagcagctgctccggagtcttggattttcagagcgtgtgtccgacggactgcgatgcaatcacgatctgacggggtttaagcgaaagcgcctcgcgcgccgcgccccggtcaagcgtaatgcggcagacggtgccaagccccatcgcggcgcaggcgaggtaacaggcctgcactttcgcgccgacatcgatcatcacggcgttccggaccgaggtctgggtccaggtgccgatacgcttgaagcggtcgctccggataaaggagaggaattcactcgcggattccgtcgcgcggatcttcgtactctcgagattcgcgacatagacgaggtgcaccggggcgcgggagacgagcggatctacaggggcgacggcggtcctgagatcgcctcccttgatgaagcggagactcgtccgctcgggttcccagagccagacgccgtttgacttcacgacatagatctcaatcccctgccagttgaagggagagggggtcgtgcggcggccgtccttccggttgatgccgtctgtcgcccagaggaggtttgagagcatctgatcggaaatcgtctgctcggcgaactgccggtcagtgtgccggttcatgagcgcctcggtgagagacaccgtcatcggatccggaatcggaagcgggcggaaaatgccaaggtctgccgcgtttcgcttccggagaggatccgttaccgcttccgtgagcttgatctgcagcgcgcggctcttatagccaagcttcttcagttgtttcttgagcgacatcgcgaaaaatgtcctgaggttaagaaaagggcctgaagcggaacttcaggccctgtgcagcaaagcggcgccggtttttctccggcccggcgcggaattacttcacgcggttgctgtactcacccgtacgggtgtcgatttcaatcttgtcgccgacgttgatgaaggcgggaacctgcagttcgtagccggtgtccttcagcttggcgggcttcatcaccttgccggaggtatcacccttgacggcgggctcggtgtaaccgatttcacggacaagcttcgtcgggagttcgacggagatcggctggccgttgtagaaggtgagttcgccaggcatttcttcctggagatacttcttcgcttcttccatggcatcctcgccgacttcgtactggttgtagtcagcgtccatccagacgtaggacggatcagcgtagtaggagtaggtcacttccttgcgctcgagaacgaggtcttcgaacttgtcgtcagcgcggtacacggtttccgtgttggcgccggtgagaagattgcgcatcttcatcttgacggtagaggcgccacggccacccttggaatagacagccttaacaacgaccatcggttctttaccgaccatgaagacgttgccggcgcggagttcctgtgcggttttcatagatgtacttttacctttaataatgcctggcacatgagggttgcatcgagatcggcaaacgaaagcccggcatgaaagaatttcaagctgattattttagcccttttttggcagctgttgcgaccgcgcgggtgagggatcccagagacgcgagatggcgtgaccagagaaggctgccgcgcgtgagttccggcgtgagatcccggaaccgggaccagagaccgggagtgagcgatgcctgattccatcccagactcgtttcccgccagacgcgggccgcgtcttccccatactccaccgccatccggtcgaggaacgcgttcagtttcacgatatgcgtgtcctcttcctgcgggtagatggtccagaggaaaggtttccccgcgagctgcgcccggacaaatgaatcctcgccccggatgatcagcgcgtcgcacgcccagagcacccggtcgaacgactcctgcggaaccgcggggacgggagaaaaagtgacctgagggggattgagccggcttagcgcctcgcccagcatctctcccgcgcggcctggtgccgcgattacctgaacggggcgggggtcagaagcgagcgcctcggcgagctgcgcgatcggagccgtggggtacgagaaaaagaagagattaaacggggcgtcgggttccctcgcgccgagagcctcaagaagcgcacgccggtcagagacggaaaaccggtcccgcgcgtcgagaagcccgttctcaatcatcacgccccccgtacggcgggtgaatcccgggaagaggaaggtcttcgtgacggggagtctcgggtgaggggagggcagtccgtgacactcttccacccagtcttcggcggagaggtattcgagattcagccacgcgactttgtgaccgtggagcgtttccctcgcgatcgcttcttcaaaactgtcagggagccggcagccgaaggtttcaatcacgacgtcagagggcaccgcggtttccgagtcttcccagcgtcggacgaggatgccgagcgattcagcgccggatgccgggagttctgccgggacgccggatgtgattttggaaagcgtcaccgcgtcatcgatataaagggtcacacggaacccttcctcttccgagagtccgcgcgccagccgccagcagactccggcgtctccgaagttatcgatcacgtggcagaatatgtcgcacgtcacccggggctcaatcgtttttcctgcagcctctatcattcgttaccgtccggttgtctcttaagtttcatgccggccgcggagcagggcgaagcgcaaggcttcccggccgtttccgcggccttcgatcaggttaaatacgtcatgccaaagggaatccctccagccgattttgattatcaggcgatcctgaagaatctgccgccgcttcccggcgtgtaccgctattttgatgcggatgacaactgtctgtatgtcggaaaggcgcgcgatctgaagcgccgggtctcaagctactttcagaagagcgacctctcgccccgcatcgcgctgatggtgtcgcagattcatcggctgcagacgacggtgacgcggtcggaggccgaggcgctgctcctcgagcataacctcatcaagtcgctcgacccgaagtacaacatcgttttccgggacgacaaaacctatccctacctgaagatcgggaatgaagaatacccgaggatcagcttttaccgcggcggcgtcgataagaagagctcgtttttcggccccttcccgaatagtgccgcggtccggaattccatctcgatcctgcagaaggtgttcctcctcagaacctgcgaggagggcgttttccagaaccggtcgcgtccgtgcctcctcggtcagatcgggcgctgttccgcgccctgcgtcgggaatatttcagcggaagactacgcgcgggacgtgaagcgcgcgaagcggttccttgaggggaacagctctgaaattctgaatgagctgcagagccaaatggcgaaggaagcctctgagctacggttcgaggcggccgcggcgacgcgggataagatcgcgtcgctttccacggtccttgaggggcagaccgttgagacgacaggcggtgacacggacgccgatattctcgcggtctatatcaagtcgggcgctgcctgcgtgaatctcgcgatggtgcggggtggccggcacctcggtgaccgggcgttcttcccgacactcgcgcgcggcaccgcggcggaggatccaggagaagtgctcgaagcctttgtgtcgcatcactatgagaatcttcccgtgccgacgcttgtgattacggcggatgcccggaatccggaagagatgtcttctctcctcaccgaaatcgccggacgccgggtcccggtgatccatgatccgcaggggccgagaaagcggtggctcgagatggcgcaggcgaatgcccgcatcgcgcttgagagccgcctcgcgatcgagcagaacgaaaccgcgcgcctgaagcagctttctgacgccctcggcatgatgcctgagagcggcgatctccgggacttccggatggagtgcttcgatatcagccacacctcaggcgaagcgacgatcgcgtcctgcgtcgtcttccggaatttcaaaatggatagctcggagtaccggcgattcaatatcgatgacgtgaaggcaggggacgactacgcggccatgaaggaagtggtgacgcggcgttacctccccgtgtcccggggcgaagcggtgctcccgaccgtggtgctgattgacggcggacgcggtcaggtcgaaatggcgcgcgaggtctttgaggacctggggctcgatacctcgcatattgtcggtgtcgcgaagggggaaggccgcaaggtggggcttgaaacgcttgtcttcccgaaggacagcggccgcgcgccgctcgtcctcggagagcattccgccgctctgatgcttgttgccgaagtgcgtgacgaagcccaccgcttcgcaatcaccgggatgcgcgcccgccgcgcgaagacccgaaaccggagtcagcttgaggatatcgaggggatcggcgcgaagcgccgctcgaggcttctcgcccgtttcggcggcatgaagggccttaagaacgcgtcggtagaggaaatcgaaacggttgacggcatttcgaaaaagctcgccgagaagatctatctcagccttcacggcgaggcgtccgcctgacgatccgcgtgaaaaggagaagtttcacgtccttaaagcgctagaatgttcccgcgtgttgttattcagctctttcgcaaaggctcttgtcgtaccaatggattcaaattcccccaccgcttccgtcacgaaggaaagaaaacgctttaacgtgcccatggcgctcacctggacccgtgtcgcgctcatccccttcgttgtcggcgttttttatattccgttcctcagccagcatgcccagaacgtgatcgcgtgcgtgattttctgcgtggcggccatcactgacgcgctcgatggctatatagcgcggaaatacgatctcaccacgccgatgggggcgtttctggattcggtcgccgataagctccttgtctgcgcggcgatcatcgcgctgctcgcgctcgaccgcgtcgggatgcttgtcgcgctcatcattgtcggtcgcgaaatcgcggtgacagggctccgcgaatggatggcgaagatcggcgcttcctcccacaccaaggtgaactggtacgggaaagttaaggcgatcgctcagatggtgtcgattccgctgctcctctggtacgacccgctcggtcctatcaatatcggggaaatcggctcctggctgatctggatcgctgtgatcctgacgctctattcgctcgtgatctacacgaaggccgctattcccttcctttatccggatgagaagctgaagaatcaggatcgctgagaaaaagttttcggatacaaaaaacggaccgcagttcaaaagctgcggtccgtttttttatagggttttcagtccgcccggccttccgaaggcggggcggagagaaacggtctgacgcttaggagaggcccgtgatctggccgttcttcacgtcgatcttgaaggcgttcggagccttcgggagacccggcatgcggaggatggagcccgtcgtcacgacgacgaacccggcgcccgcgttgaggatcagacgctcaaccggaatgcggaagcccttcggtgcgccgaggcgcttcgcgtcatgcgtgagagagagcggggtcttcgcgatgcagaccggaagacggccgaaaccccactcctcaatctgcttcagatccttcttcgccttttcggagagatcaaatccatccgcgccgtagcagcgggtgacgactgactggatcttgtcgagaatcggagcgtccgcctcgtacgcgaagttgatcggcttcgggtcaccctcgcacgcggcaaccacttcgcgcgcgagatccatcgcgccttcaccgcccttcgcgaaaccgtccgaaatcgcgaaccgcgcgccgaattccttcacgcggctgcggacgatttcgacttccgcctcgtcgtcgtttgcgaagtgattcagggcgaccacgacgttcgggccgaaggcctgcatgttgcggatgtggtgatcgaggttgcagagacccttcttcagcgcctcgggatttgtttcgccgatctcagcaagcggcacgccgccgtgccagtgaagggcgcggaggctggtgacgagcaccgtggcgctcgggtggaggtcagcggagcggcacttgatatcgaagaatttctcagcgccgagttcagaaccgaagcctgcctccgtgatcgcgtagtcgccgaccgtcagagcggcttccgtcgcggcaaccgagttgcagccgtgggcgatgttcgcgaacgggccgccgtgaatgaaggcggggccgccttcgatcgtctgaacgaggttcggcttcgtcgcttcgaggaggagcgccatcagagcgcccgtgcagcccacttcaccgcaggtgagcggtgtgccgtccttcttcgtcgccacgacgagcttattgatgcgggcgcggaggtcgtcctcgctcttcgcgaggcagagcacggccatcagttcagaggccaccgtgatatcgaaaccggtttccgccggaatgccgttcgcggagccgccgagacccgtcacgatgaagcggaggtgacggtcattcatgtcgagcacgcgcttccaggtgatttccttgatgttcagctgatcgcggtagcggcagttatcaaggaccgccgcgaggaggttgttcgccgaggtgatcgcgtggaagtcacccgtgaagtggaggttgatcgactccatcgggagaacctgggagtagccgccgccagccgcgccgcccttcatgccgaagcacgggccgagagacggttcgcggagcgcgaggcaggaattcttcccgatcttgcggaggccctgggcgagggcgatcgaggtcgtggtctttccggagccggccggcatgccggaggtcgccgtcacgaggatcagtttcccgtggggcttacgctccgggttcagatgaacctttgccttgtcgcggccgtagggttcgaattcggcatcagtcagaccgatttcgtgcgcgagctgctcaatcggtttcagtttgacggaatgcgcgatttcaatatcagaaagcatggatatctcctcaagagattacttggataacaaaaagagaaaaacacgaatctgacacggccggcggcgaggaccagcatccggaaggaggtaaacgcactcagaaaaacttccgggaggaacaggcagcgggcgggccgcggatagccgggaaagcgcggaacttccgctcacatccggatcacggcaacatctttttattttgacagattaaaaaggctctgtgggcgcggaaccctgatatttgggacgccctgttacggatggttctacgccgaaagtcgcattttttaatccggatcccggatttctgtccctttataattcctgccatctcttaaacagaaggcgcttcgcgcgggaactccccgaagcgccctgaaagcgcaaggagttttttcataatgaaggtgctggtcgcagtaaagcgagttgttgactacaacgtgaaggtccacgctctgcctgacggcagcgggcttgatattgataagaagcccatggtcaagcgttcgatgaacccctttgatgaaatcgcggttgaggcgtccgtgcagctgaaggaagccggcaaggcggacgaagtggttgccgtgacgatcggtgacgcgaaggcagtcgatacgcttcgcgtcgcgctcgcgatgggcgctgaccgcggcattcatgtgaagacggacgcggcgcttgagccgctcgccgtggcccgcatcctcgcggccgtgatcgggaaagagaatccggatgtgatcgcgttcggcaagcaggcgatcgatgatgacgccgcgcagaccggcgcgatgacgaccgcgctccttgatctgccgttcggaccgaacgccgataagatcgcgcttgaagacggcgcgctcgtcgtgagctcccagacgggtgacggcacagaagtccgcgctctcacgcttccggccgcgttcgctgcagatcttcgtcttgccgagccccgctatgtcacgcttccgagcatgatgaaggcgagaaagaagcctgttgaaacgattgaagccgcgtcgcttggcaccgataccgcgccgaagctcacggtcaccgcgtatgaagcccccgccgcccgcaaggccggcgtcaaggtttccagcgtcgcggaactcgttgacaagctccgcaacgaagcgaaggtcctctaaccccattcggaactattgaatagaaatgtcgattcttgttgtcagtgatttttctgagggaagcttccgcgcttcttcgacccgtgccgccgtcgcggcggcaaaccgtatcgacggaaacgtcgatctgctgattgccggaaagggagcccgcgcggcttctgacgccgcgtcgaagctccatggtgtcacccgagtcctcgcggcggattcggattcgctcgaccacctgtcccctgagacccttgcctcccaggtgctcgcggtcgcgtccaattacacccatatcttcttcgcgctcgggttcctgaaccgcgccgcgatgccgcgcgtcgcggcgaagctcggcgtttcgccgcttaccgaaatctcggacgtgatcgatgcctcgaccttcaagcgcgcgatctacgcgggcggcgtgatcaccacggtgaagacctccggcgccccggttgtcgccacggtccgtacgacgtcctttgaagccgcggcggatgacggcgcggcctctgttgaagacctcgctccggttgaagcgttcgcgaagaacacgttccgttccgctgaaatcatgaagagcgaccgtccggacctcctcaccgcgaagcgcgtggtggcgggcggccagggtcttgacggtgaagccggtttcaaggcgcttgaggcgctcgccgataagctcggcgccgcgatcggcgcgacccgtgtcgtggttgataacggcctctgcccgaacgagtggcaggtgggtcagaccggaaagatcgtggctccggatctctacatcgctttcggtatctcgggcgctctgcagcacctagccggcatgatggggtcgaaagtcatcgtcgcggtgaataaggatcctgaggctccgattttcgacgtggcggattacggtctcgtcgcggatgccgcctcggccgttgaagaactcacgaaggcgctctgagcgtggcagccgtgggacttcagaagacgctcgggtttgagatcctgccggaagtgaagccgggtgaggttgaagcccgcttcacggtgacggaagcggtggcgcagccttacggctactgctccggcggcacgatgctcgcgcttgaggaaacgatggctggcgccggttcccgccgtatcgcgggagaggacgcgatgccgctcggcatcaatgtgagcgcgaaccacgtgaaggcagtgccggtcggggggcttgtgaccgcccgggcgacagcgctccgcacggggtaccggctgcatgtctggaacgtggatctcttcgatgaagcgggagacctcgtttccacagcccgtgtgacgaacgttatcaagcggcggaaaaccgctgaggaacactagcgcgccgcctggattttcccggacggcgcggaaaggggagtgctgagcttattttttacctgagctcagcctccccttccgattttttgcatgacatttttttgaggaactgaagatgacttttgcctggaaaccgatcaaggaatattccgacatccggttcgaactctttgaaggcatcgcgaagatcacgattaaccgccctgaagtgcgtaacgccttctcgcccgtgacggtcgcccagatgggagaagcgttcgcgatctgccgcgagcgtgaggatatttcggtcgtggtgctgaccggcgaaggcgacaaggccttctgctcgggcggcgacatgcatttcaagggccgcggcggctatgtgggcccggacggcgtgccgcgtctcaacgtgctcgatgttcagaagcagatccggtcgcttccgaagcccgtgatcgcgatggtgaatggctacgcgatcggaggaggcaacgtcctcgccacggtctgcgacctcacgattgcgtctgaaaacgcgattttcggtcagaccggtcccaaggtcggaagctttgacgcggggctcggcgcgtcctacctcgcccgcatcgtgggtcagaagaaggcgcgcgaaatctggttcctctgccgtcagtacagcgcgaaggaagcgctcgaaatggggctcgcgaacaccgtggtgccgttcgataagcttgaggaaacgactgttgagtgggcgaagcagatgcagcagtacagcccgctcgcgctccggttcctgaagttcggcctcaacgcggagcttgacggtgaactcggtctccagcagttcgcaggcgacatgacgatgctttactacatgacggacgaagcccaggagggcggcaaggcgttcctcgagaagcgtaagcctgacttctccaagtctccccgcctcccgtaagcggatcggaggtgaagatgcttcctcagtcaatcgatatcaacggccgcgtgatttccggtgaggaggggttccgcgaggcgctccgcacggaaacgaacgacgaaatccgtaaggtcctcgagttctgccttcactggtgcgggccggaccctgaagtggtgcttcatacgtcaggatccaccggcgtaccgaaggaaattcacgcgaagaagaccgcgatgctcgcgagtgcccggatgacggtagagcgtctcgggctcaaagcgggtgacaccgcgctcctctgccttccgatggattacatcgcggggcagatggtggtggtccgggcgcttctcgcggggctccgcgtgatcgttcaggatccgtcgcggcacccctttgaggggctcacggaatccccggttttcgcggcgctcgtgccgcttcaggtcaaggcgtcgctcgagaccccgaaggaagaagctctgatgcgcggtgtccgggaactcatcatcggaggcgcggcgacggacgacacgctcgccgccattctgaagaccttcccgcatcacgtctggtccacctacgggatgacggagacgctctcgcacgtcgcgctgcggccgctctcgggcccgaaggccggcccctggtacgagccgctccccggcgtgacgctttccgaatcctcccgcgggacactcgtgatcagcgctccggcgatcgacgtcccgagaatcgagacgaacgatatcgtgaagtttgctgaagggagcaaggagttccgggtgctcggccgcgtcgataacgtgatcgatacgggcggaatcaaggtgccggctgaggcgcttgaggacgcgatccggcctgagatgccggcccccttcgcggtcacgtggcttccggacgaggatctcggaagcgcggtgaccgtggaagtggagtccgatcacccgatcgcgctccccgacttccgtgccattctgaagcgtgaagggctttctccctactggaagccccgtcacgcggtgtttgttccgaagattccccagacccggtccggaaagccagaccgcaaggggattcagcgcgcggcagctgaagcgaaaggggacctgaagcaggatctctgaaagagacgcatctctttgtcccaatgggtttatcccggaggggcagagagttgcagtgtttctccttttcgcataaaatgccaagttcctgactcgtgcgcatacacgcgccgggtcgatttatttttgtcagccgggtccatacccaagaaggaaccggctgattttcaactgacttttgataagttacgaggtaattagcatggttgttatccgtctggctcgcggcggctccaagaagcgtcctttctacaacgttgttgtgaccgactcccgtatgcgtcgcgacagccactccatcgagcgtcttggttactacaatcctgttgccgccggtgccgacgtccgtcttcactttgaagaagaccgcgtgaactactggctctccaagggcgctcagatgagcgacaccgtggcccgcctgttcaagaaccgcgtcgctctcgccgctccggaaagcgccgaagcgaaggccgccaccgccgccaagaaggccgctgctcaggctgctgctgacgccaagaacgctgaagaagccgctgcctaatttaaggctcagagcttcagattcagaaccgcgcggagcggctgtctgattgccttccggcatctgctcctggttctgatcgaccctttttctcctgacgtccgggttttgcggcgtgttacgtgtctcgccgctgcgagtgcttaacccggtatctaggcgttgggagaagagggtctatttttttgtctggaattttcaggggacgcttgaatggctgatctgattgaagtcgcgcggtcgctgtcgccttacggcgttaagggctggatccgtgtcgcgccggaaaccgatgaagagctgctgctggaatgcacgaagtggtggttcaggggccctcgggacgcggaaccccggccgcttgaagtggaaggcgtgaagccccacggaaagggcctgatcgcgaagtggaagggctgtgagacgcctgaagaggctcagaactggaagggcacgatcctgattgaccgtgaggacttcccgccgctgccggagggcgaattctgggacgaggatctgattggctgccgcgtcgtgaataaggaaggcgaagagctcggaacggtggaaacgcttgaaacgaacggcgtgcagagcctcctcgccgtgaagggcgagaagcgtcacctcattccgctgatccctgagtatgttctcgatattgacctcgactcggaactgatccaggtcgagtggcacgcggactggtcataaaaaagggaggaaggcggcagcatgatgcgattcgatgtagtgagtctcttccccgagatgttccgagccgtgacggagtccgggatcaccgcccgcgcgatgaagcgcggcctctggtcgctgaacctctggaacccgcgggacgaaacgcatgacccgcaccgcacggtcgatgaccggccatttggcggcggtcccggcatgatcctcatggccgatcccctcgcgaagacgatcgaccggatccgcgcgagcggaaaccgcggccgcgtgatcgctttcgcgccgggcggaaagaagcttgaagacgcggatatcgcccgcatggtggcatcgtccgaccccctgacgctcgtctgcggccgctacgaagggattgatgagcggttccttgaggactacgtggatgagcagtactgcatcggggactttgtgctttcgggaggagaactccccgcgctctgtctgatcgacgcggtggtacgccggatcccgggcgcgatcaaggagctttcgactgaggacgagtccttttcgaccgggcttctcgactatccgcactacacgcggcccgaagtctggcgcgggaaaccggtgccggaggtgctgctttcggggaaccacgccgtggtggatcggtggaatcgcgacaaggcgctcgaagcgacttgcaagaaccgccctgatttgattaaaattacacgttcctgcggatcgctttcaaaggacgacctcaagtcgcttcgcgagattgtccgccggatgaaggaaagcgcggaaaagggcgatgccgcctgacgcgctttaattatttacccatcctacttcgtcaaccaacaaattacccaaatgacgaagtgatggttctggagatttagaagtggcacagaatattattgaagtcctcgagcaggaagaaatcgcccgcctcaacaagcagattccggctttcggccccggcgacacggtggctgtttccgtcacgatccgcgacggcgaccacacccgcgttcaggtctatgaaggtgtcgtgattgccaagcgcaaccgcggcctcaactcctccttcaccgtccgcaagatctcttccggcgaaggcgtggaacgtacgttccagacctactccccgctcgtgaacgctgtggaagtgaagcgccgcggtgctgtccgccgcgcgaagctctactacctgcgtgaccgcgccggcaagaccgcccgcatccgcgagcgtctcgtccgcaagaacgtcgagaaggctgagtaatcagttttgtcggctgttctctgatgccgggcgcttcggtgcccgcatcggaaaagaaatagaattagcccgcagggaatctttcctgcgggcttttttctttcgagcccgcgggggatgcgttcccgcaggcttttgtctttttaagaggagaacgcggtatggatcgcagccggctgaaggaagaggatgaaaaactccgggagtcacggctctcgggagaagcagtgtttgagggacggctgctccacgtgtaccgcgatcgggtgaaacttccggatggacgggagtcgacccgcgaataccttcgtcacccgggagccgccgcggtggtgctcctgaaggaggggaagatcctgctcgagcgtcagtggcggtatccgctcggacgcgccttctgggaagtgcccgccgggaagcttgaggcgggggaggatcccgcgctctgcgccgcgcgtgagctcgaggaagagacggggtacgcctcggatacgtggacgccgcttggcacgatctgccctgggatcgggtactcgaacgaagtgatttcgctctacctcgccgagaacccgcgggaagggagccggcatctcgacccgggtgagttcctcgacctcgcctggatcccgtttgaggaagcggtccggatggcggaaaccggtgaaatcgatgacgcgaaaacgatcggcgctctcttccgtgcggaaaagtgcctagaaaaacggaccgggatcaagcgctagcgttccggctcatcccgggatcccaaaaaaatgacggctccgttaacactcggctggggattccggtgataatgaaaaggttaagcatatgacggagatcgccgtctccgtttcctgtccatgtccggctcacggctgagccggaaacaatttctgatacgtcaatgtcacaaactattctccaaagcgttccggtcggccagaaggtcggcattgcgttctccggcggtctcgacaccagctgcgccctgcactggatgaagaagaagggagctcttccctacgcctacacggccaatcttggccagcctgacgaaaacgactacgagtccattccgaagcgcgcgatggagtatggtgccgagaaggcccgcctgatcgactgccgtccgcagcttgttgccgaaggcattgcggcgatccaggcgaacgccttccacatcaccaccgcaggtcagacctactacaacacgacccctctcggccgcgctgtgacgggcacgatgctcgtgaacgcgatgcgtgaggacggcgtgaacatctggggcgacggttcgacctataagggcaacgatatcgagcgcttctaccgctacggtctcctcgcgaacccgaatctgaagatttacaagccctggcttgacacgacgttcatctctgaactcggcggccgcgctgaaatgagcgcattcttgcaggccgaaggcttcagctaccgcatgtccgctgagaaggcctattcgaccgactccaacatgctcggcgcgacgcacgaagcgaaggacctcgagcacctcaactcctccatgaagattgtcgacccgatcatgggcgtcgccttctgggatgagtcggttgagatcaagccggaaacggtgacggtgcgctttgaggaaggccgcccggttgccctgaatggcgttgagttcacggatctcgtgaagctgatgtacgaagcgaaccgcatcggcggccgccacggtctcggcatgtccgatcagatcgagaaccgcatcatcgaagcgaagtcccgcggcatttacgaagcccccggtatggcgctgctccacatcgcctacgagcgcctcgtcaccggcatccataacgaagacacgatcgagcagtaccgcgtgaacggcatccgtctcggccgcctgctgtaccagggccgctggttcgacagccaggcgatcatgctgcgcgaatccgctcagcgctgggttgcccgcgcgatcacgggcgaagtgacgcttgaactccgccgcggcaacgactacacgatcctcaacaccgaaagcccgaacctcacctacgaacccgaacgtctcacgatggagaagggtgactcgatgttcacggctgtggaccgtatcggccagctcacgatgcgtaatctcgacatcgtcgacacccgcgcgaagctcggcatctacgcgaagcagggtctgctcgcgggcggcgcgggctccatggccccgatgctgactggcggcaaggcggacgagaagtcttccaagtaatcccggatcagttaccggccggggcttttcccctgccggtcgcttgattcttcagcgccccttgaggagaatgctccccaaggggcgtttctctgatttttgaactacggaaaaggaggtcaccatggctgctgtctttcaccgccagacggaaccttactcgtcgcacgaagcgggcgactcgatttacgaccacagcggggaaaaggtaaagacctcggttctcgggttcgcgatcgcgctgacgctcgggttctccgcgattgaactcgtcgcggggtggctcggaaactcactcgccctggtgggggatgcgggtcacatggtgacagactccatgtcactcctcttcgcgctcgtcgcgaatatcttttcgcgtcacggagcggacgaggatcactcgttcggccacgggcggcttgaggcgcttgcggcgttcgtgaacggcatcgtgatgtcaggcgtgatcgtctggatcgtgattgaagccggaaaacgcatgatgaatccggagccggtctcaggcggctccgtcatgatggtggcgacgatcggcctcatcgtgaatgtcggcgttgcctggtcgctttcccgcgataagaagaacgtgaatacgcgcgcggcgctcgttcacgtgatgggcgacctcctcggctccgtctccgcgattctcgcgggcttcatcgtctggatgggcggccccacgatcgtggacccgctgctctccatcattgtggcctgcctcctcatccgcgcgacgatcgggatcttcaaagagtcgacccgggtgctgctcgacgccgtgccggaaggcgtggagtatgaagcggtgggtgacgcgatcgccgcggtcccaggtgtcatgcgggtgcacgatcttcacgtctggacgatggctccgggacactccgcgatccaggctcatgtccacattccggaccccgatcactggcccacggtgctcgacgcgatccggcatcagatggccgagaaattcgggattgaccacgtgtcgatacagcccgaatgggatgcctgcgagatccacccggatccccgcattcgctttgatcgttgaattgcgtataatttcctgttttttcctgactcaatccgcaaattcgtgatgggggcgagctccaaatgggagatcgcctcctttataatttgacgggttaaagttcttcatcttttcgtgagagcacgatgaccaaattcgtttttgtgactggcggtgttgtttcttctctcggcaagggaatcgctgcggcttccctcgctgccatcctggaatcccgtggactcaaggtgacgatgatcaagcttgatccgtacatcaacgtggatccgggtacgatgtccccgttccagcacggcgaagtttttgtgacggaagacggcgcggaaaccgaccttgacctcggccactacgagcgcttcatctccacgaagatgcataagacgaataacttcacgaccggccagatctacgagtccgtgctccacaaggaacgccacggcgagtacctcggcaagaccgtgcaggtgattccgcatatcacgaacgagatccaggagttcatcctccgcggcgtccgtaattcgcttgacggccaccccgatgtggcggtgatcgaaatcggcggcacggtgggcgatatcgagagcctgccgttcgttgaagcgatccgtcagctctccttccgcgtcggccgcaataacacctgcttcatgcatctcacgctctgcccctacatcgcgagcgccggcgaactgaagacgaagccgacccagcactcggtgcagaagctgcgtgaagagggcgtgtatcctgacgtgctcctctgccgcgcggaccgcccgattcctgaaaacgagcgcgcgaagatttccctcttctcgaatgtcccgatggatcacgtgatctcggtgtacgacgcgaagacgatttacgaagtgccgctgattctgcatgagcagcacctcgacgatatcgtctgcgagaagctcggcatcaaggcgaaggaagctgatctcagccagtggaagaacatcgttcaccgctatatggagccgcagaacggctctgtcacgatcgcgatggtcgggaagtatgtcgactacgctgactcctacaagtcgctgaatgaagccctgatccacgccggcatcacgaccgacacgcacgtcaaagtgaagtacgtcgactcgactgacatcgaagagaacggcaccgggtgcctcaaaggcgttgacgccatcctcgttccgggcggcttcggcaagcgcggcgttgaaggtatgatcaaggcgatcgaatacgcccgcacccacaagatcccgttcctcggtatctgcctcggcatgcagtgcgcggtgattgagttcgcccgtcacgtctgcggtctcggcagcgcgaattcgaccgagttcgatgtcgatacgccgcatccggttgtcgccctcatcaccgagtggcatgaccgcaccggcaaggttgagcaccgcgacgaagactccgacctcggcggcacgatgcgccttggccgtcaggagtgcccggtggaagccgacaccctcgctcattcgatctatggtgaccacgtggccgaacgccatcgtcaccgctatgaagtgaacaactcctacgtctcccagttcgaggagaagggcatggtgatcgcggcccgtacgccgaaggatcatctccccgagatcatggagatccacaatcacccgttcttcatcggtgtgcagttccatccggaattcacgtcgaacccgcgtgaaggacacccgctcttcacggcttacgtgaaggccgccatcgctgagcgtgaccgcaaggcgacggctgaggagaaggctgaatgaagctctgcggatttgaagtcggcgttgaccgcccgttcttcctgatcgcaggtccctgcgtgattgagagcgaagcgctctgcctcgatatcgcgttccgcatgaaggagatcacggagaaactcgggatcccttacatcttcaaggcgagtttcgataaggcgaaccgcacgtccgccacgagcttccgcgggattggggtcgaaaagggcctcgccgtcctcgagaaagtccgtgagacggtcggcgttccggtgctgaccgacgtccacaccgaggcggaagtccccgaagtggcctgtgtcgtggatgtccttcagacgcccgcgttcctctgccgccagaccgacttcatccgcgcggtggcccagtccgggaagcccgtgaatatcaagaaggggcagttccttgccccgcacgatatggctcgcgtggttgaaaaggcgaagcttgccgcggcggaggccggtctctcggaagaccgcttcatggtgtgcgagcgcggcgcgtcgttcggttacgggaacctcgtttccgacatgcggtcgctcgcgatcatgcgtgaaacgcgctgccccgtggtgtttgacgccacgcactccgtgcagctcccgggcggccaggggtcgagctcaggcggcgaacgccagttcgttccggtgcttgcccgcgcggctgtggctgtgggtgtcgccggcatcttcatggaaacacatccgaaccctgaaaaggcgctttccgacggcccgaactccgtgccgctcggacggatgccggagcttctcgcgacgcttaccgcgattgaccgcgtcgtgaagcagccgggcatgtacctcgaagagcagttctcataaaaaaaagaggccgggcgaagcgcccggctttagtttgtctttggcatttctgcagaaaaggaaggaaagaacatgagttcaatcgttgatgttgtcggccgtgagattctcgattcccgcggcaaccctaccgttgaatgcgatgtgtggcttgagtccggcgtgatgggccgtgcggcggttccgtccggcgcgtcgaccggcgtccgcgaagcgatcgagctccgcgacaaggacccgaagcgtttcggcggcaagggcgtgcttgaggccgtccgtcacgtgaacgaagacatcgcgaacgcggtgctcgggattgaggcgtcggatcagagctacatcgaccgcacgatgattgagctcgatggcacggagaacaagggccgcctcggcgcgaacgcgattctcgccgtctccatggcggttgcccgcgccgcggctgaagagtccggccttccgctctaccgctacttcggcggcacgagcgctgtgacgctccccgtcccgatgatgaacgtgatcaacggcggcgctcacgcgaataacaaccttgatctgcaggaattcatgatcattccgctcggcgctccgaccttccgcgaagcggtccgctatggcgctgagacgttccacgccctgaagtcgatcctgaacagccgcggcatgagcacggcggtcggtgacgaaggcggttttgctccggctctttcgagccacgaggaagcgattgagctgatcgttgaggcgattgagaaagccggcttccgtccgggcgacgatatcgcgatcggtctcgactgcgcgagctccgagttctatgacgcggaaaagaacctctacaccctcacgaagcagggcaagaccttcaccgctgaagagtggatcgcggtgcttgagggctgggtccagaagtaccccgtgatctcgatcgaagacggcatggcggaaggcgactgggaaggctgggcgaagctcacgcaggcgctcggtaagaaggttcagctcgtgggtgatgacctcttcgtcacgaacccgaagatcctcgctgaaggtatcgagaagggtgttgcgaactcgatcctcatcaaggtgaatcagatcggcacgctttccgaaacgtttgaagcgatccgcatggctcaccgcgcgggctacaccgctgtggtgtcgcaccgttccggcgaaaccgaggactccacgatcgccgatatcgcggtcggcctcaatgccggccagatcaagaccggttcgatgtcgcgctctgaccgcatggcgaaatataaccagctcctccgtatcgaagagcgcctcggtgaagccgccgtgtatccgggccgcaaggctttctcgatctaaagcggaaagcgttttctgaggcaatcgcagcatgcgtaagtggcgcatctggctcgccgtcgccgtctgggctctcgcgatcctgattcagaaaccgctctggttcggccagggcgggtggtttcacgtcggggagctcgagcataagctcgtcgaggcgaagcaggatatcgagcacgagaagactgagaacgaggcgctggtcgccgaagtccggtctcttaaggaaggcacgaccgctatcgaggaacgggcgcgtcgtgagctctatatggtccggaacggcgaagtgcttttccgcgtgaaggcgtcgcctgaagagcaggcgaagcaggcagcggaagaggcggcgcgtgcggctgaggccgtgaaggcggaaagccgggcgcttgagaaagcgaatccgacggaaacggacgatgcgcctgctgtggagcctgaggcgttcgcggctcatgatcccctcgactcgaagggcggtgcggcgaagactcagaagaagccggagaagaagtagctttccgcttcgcttcagaccggacgcaggaaaagaaatgggcaggaattccttttggaattcctgcccattgttttagtcagagagacagaactcagtgacgggtttcggtgccctttgccgcgtgctcatcgaaaagctgatgaacgtcgatcgggtcaaacgcgtaggtcttcccgcagaattcgcaggtgacttcaatctttccctgctcttcaacgagcgcgagagcatcttcttccccaagcgcccggatcatgccgcccacgcggtcacgtgagcagccgcactcaaatttcggcgctttcggcgttcccatctgcggattctcctgccagaagaggcgcttcaggacttcacgcggctcaagcttcagctgctcatccggggtcaccgtttcggcgagcttctgcacgcgattccagtcttccggatcaaagtccgggtccgtgcccttgccgccttccgccgcgaccttctgaagcatcaggccggaggccgcagtggcgtcagacgacagccacatccgggtctccacctgctcagactgcgtcatataagcggaaagcgcctcagccacggtctttgaccccgcgaggtcgacgatcccctggtagctctggcttctgagtgaggggtccggctgcacaagcgtcagcgcgcagcggcccttgccgtgagcgttgacgagcgagttgaggtcagaatccgggcggatcttatccgcttcagattcattcagccgcaccacggcgcggatcccgagatctggcttcacttccaccatcgcgagacgcaccgggccgtcacccgcgatctcgagcagcaccgggccgttaaacgtaatggagcccgcgagcatcgcggctcccgccgtcatttcgccgagcagacgctgcacgggttccgggtacgcgcgacgttccagaatcgtctgccaggtctcctgcagacggatcgcgctgccacgtgcattggccttaggaaagtagaagtgctcgagcgtgtcaaacatacgttgccgtgtccttttcccttatgaaaagaagagaaatcaatgagtcttaaaaaccttatatgggggcggagagggggaatttcaagcgacgcgggagaagatgaaaaccgtacctaatcactttccccaaaatccaaaaaggggatagcgcttctctccccgatttctgccgatgtcctaagataaacgagtcacacgcactacgtaaggcttttaaatgaaaaccgatcttcacacgcattccacggcgtccgacggaacgctgaagcccgcggagctcgttacgctcgcggactcgtgcggggtgaagctcctcgcgctgacagaccacgatacggtggatggactcccggaggcgaagagcgaggccgtgaagcatggcatcacgtttgttcctggaattgaggtctcaacactctggaacgagcgctcgatccacgtggtggggctggggatccggtatgaggacgggaagctcgcgcgcgttttcgccgatgtggcggagaagcgtgtgaaccgcgggaaagatatcgggaagcgcctcggggaactcgggttcccggacgcctacgaaggcgcgctccggttcgcggcaaagaaggggacgctatcgcgcgcccacttcgcccgctggatgaagatgaatggctacgtgaagaccgttcaggaagcgtttgatgtctatctcggggacggctgccccgcgttcatcaaaacggtgtggccgtcgcttgaagaaggcatttcgatcatcttgaacgcgggcggcatcccggtgctcgcgcatccgggccgctataagcttccggaagcaacaccgctctctcagctcatgaaggaattccacgaagaggggggcctcggaatcgaggtctgctcagggagccagcgttcagaaaccgaagcgatgctcgctgatttcgcgcgccagtatgggttctacgcgagcctcgggtccgacttccatacgatcgggggcggaaggccgcgccccggtgaaattcacactcttcccgcggatctggatcctgtctggaagcatcttccggcacttgcgggtattctctaggagacgggggcacgcgctgccctcattcctgcaacaaactgcaatcaattttacgcagacagcggagccggattttcctgccccgctgttagacttctctgtaccatgaattcgatcattcaactcatagcggtctgcgcgattccgctgattttctcgatcacgatgcatgaagccgcgcatggctacgccgcccggaagttcggcgacaacacggcgtggatgatggggcgcgtgacgctgaatccggcgaagcacatcgaccccttcggcacgatcattctgccgctcatcatgctcgcgggctctgccgcggcgggcggtgtcggcttcatcttcggctgggcgaagcccgtgccggtgaatttcggcgcgctccgcaatccgaagcgcgacatgatctgggtcgcgctcgcgggcccgggctgcaatctcctgcaggccgtgatctggggcatcatcctgaagcttctcgtgatcgcaggagtccaggaacagttcttccttcagatggcggtctacggcatcagcatcaatatcttcctcatggccttcaacctgatcccgatcccgccgctggatggcggccgcgtggcggtcggcattctcccttggagcgtcggaaagtatctcgatcggattgagccctatgggatgtggattgttctcgcgctctgcctcgtgggcggcgcgggattcttcacggggccgcttgtggcgttcggccgcgcggtcgtgaatttcttcatcggtctctgatgacgcggttcggaaaggagcatttcgcagcatgacgacggcaaaaaacggatcactcccttcggtttcttcctgggtaacccgctttcttcccgcgattccgcgggacggcggccgggtgcttgatgttgcgtgcggcctggggcggcactcggtgctcgcggcgctctatggctacccggtgctcgcggtggaccgggatgatgacttcgcgcttcgcgcgtcggggttccctgagattgagttccggaagacggatcttgagacgggatcgtggcccctcggggacgagctcttctccggcatcatcgtggtgaattacctgaaccggccgctcttcccggaactcgtgcggcatctcgctccgggcggcgtcctgatctatcagacgttcacgaaggcgcatgccgaggcgaacgggaaacccgcgaatccggaccactggctgaagtcaggtgagctcctgtcgctcgtttccccgctcaccgtgacggcgtttgaggaagggcgggccgcgaactcctttgtcgaacggattgtggccgtccgggagaaggaatcaggggaggccgagcggtttccgctcgccgctttcccctagaagaaagtatgaggactttgctttaaaatcacccaatcgatgtctccggacggctctcgggagtgacccgacaccgaagcggaggcagttctgaaacaaaaggtcagaaaacatgattactggtgctctggttgcgattgcgaccccgatgcgggatgacggttctattgactatgactgctatcagaagctgattgactggcaggtgagcgagggagctgacgccatcgtttcgatgggaacttcaggcgaaagcccgacggtttcctttgaggaacatacggcggtggtgaaggcggcggttgaggctgtcgcagggcgcgttcccgtgatcgccggtaccggcgcgaacagcacggctgaagcaatcggcctcacgcgtgaagcgcttgaagtcggcgctcagtattcactgcaggtggtcccctactacaacaagcccacgcaggaaggtctcttccagcacttctccgccgtggcgcgtgagggcgggctgccggtgatcctctataacgttccgggccgtacgggccgagatatgacgaacgacaccgtgctgcgcctcgctgaggttcccggcattgtcggtctgaaggacgcgaccggtgacctcgcccgggctgaggcgctgctcgccgcgcttccgaaggataaggacttcgcgctttactccggtaacgatgactcggctctcgctctcgtgctcgcgggcggtcagggcgtgatctcggtgaccgcgaacgtcgctccgaagctgatgcatgaaatggtcgaggcggcgcttaagggtgacatcgccacggcccgcgcgatcaacaaccgtctcctcccgcttcataaggagctcttctgcgaatcgaacccgattccggtgaagtgggctctgaaccgcatggggaagattccggccggtatccgtctcccgctcacctggctcactcccgcgggccagaagaaggtcgaggcggcgctcgcttctgccgggctcatttaattcactacttttcgactcgccccgggcggccgtctgagagatctctcgcacaggctgcccggtaaaaagaggtttttggattctgttatgaagatgaaattactgcgtgttgcagtgcttgctgtcactccggttgccctgagcgcctgttcttatcttggtgcccagttcacgaacgacaaggttcagtacgagtcaagcaactcgcgcgccccgctcgaagtgccgccggatctctcccaggtccctcacgataacctctataacgtcccgcagcggacccgcaatgtctcggcggcaagcatgcagcaggggcagcagaccgcggccgcgaaccgcgcctccgccgcgcagtcgaccgtgcttccggaaaccgtgaccgccaaggtgatgcgtgacggcgatatccgctgggtccacacccaggtgccggcgcagcagctctggcccgtggtgcaggacttctgggcttctgtcggcctcacgatcaagaatcaggatccgaagaccggctacatcgaaacggaatgggctgaaaacaaggcccgcctcccgcaggacatcatccgcgcgacgcttggcaagctgattgacgccgtctattcgaccggcgagcgtgatcagtaccgctgccgcctcgaacggaatccggatggatcgacggatgtctacatcacgcaccgctcgatggtggaagtggtgaagggcaatcagggcgatcagacggtgtggcagccgggtccgcgcgacccgcagctcgaagccgaaatggcgacgaagctcgctcagaagattgagtctgaattcaaccccgatctgaagaaggcggatctcccgtcgacgaagcaggcggcgcttgagaagaccgcgggaacggccgctaaggccgcggctccggtctataagagcgaaatcgtgaatggcgcggatggcaaggccgccgcgatcatcatcaaggaaccgttcgatcacgcctggcgccgtacggccctcgcgattgaccgcatgaacttcactgtgtctgaccgcgaccgcacgaagggctggttcctcgtgaagtatctggatccgacgtacgaagctgagaagaagcgcgaacagggcttcttcacgaacctcttcagccagacgaagacggttgagccgccgacctatcagatcaagctgacggacgaaggcaatcagacccgggtgaccgtgctgaacgcgaatggcggcccggatacgaccggcgtcgcgccgaagattctgacgcttcttggcgaacagacccgctgataggcagagcggaggcgtgtctgtcctcgggacagaatgccacctcagctgatccactgaagggcgcgggaagcctttcctcatccgggaattgggggtgagaggaggcttcgctgcgcctttttctatgtaattctggaggattctctctgtggcgcttttatctgaaacgccgttactgaaggacattgccgcctggaccaccgccgggcggctcacccgcgcccgattcggaggcgcactcgcgctctggctcgctgttatgatggcgggcttcgcggcggcgtggcttgggctccggtccggagcttctccgatgctcgggggcggtctgatcgcgatcggactctggttcgcggtctgtgcgaccgctcgccgccttcacgacatgtcgcactcgggcttctgggccattctcgttttcgcgcttttcccgatcggctttattccgcttctcatcacggaaagccgcgcgggagagaacgcctggggcgaaaatcctaagggactgctgaaaatcaatgatccgaggctcctcaggcgcttgactgagaatgcccgcgagggatcggtgatgcatgaagtcggaagccgggattcagaagagaagaaataacgcatctgacgcagtcagcaaaccgcggcagaaagaataggaaatcaggaaagaatgactaagaagattgagaagggtgatctcgtcaccgtattcgtcacggtctgggatctccgggaccatatcgtcgatcagaccggagaggaaggcgtgacgctgcgggccggagcggaagacgttttcccgcgcatggatcaggcgctcctgaagcataaggaaggcgatcgctttgatctggtgcttgagcctgaggagagcttcggggattttgatgaaaacctcgtgcaccttgtcccggtcgataagctcggggtcgagaatccgaagaaaggcatgcgtttctcgcatatccccggcgtgccggtggatgacgggcgcggctacatcattacggatgtcggcggcggcatggcggtgctcgacggcaatcacccctacgccggatggacgctccgatttgagatccaggtgatgcgcgtggaatcggtggaagagggcgatatcgcggagtctgacatttttattccggatttcctcaaggtcgcgaatgaagccgtgaaggaagaggcggaggaccggctggaagtggacgaagcccgagcgaagatcgcggagcagctcgataaggtggatgaggcgaagcccgagaacgcgatgggcacggggctcttcacgtcgcttgtgccgaagaaagaggactgatcgctttttcttttcagataggagactcagaatgccggaactgccagaagttgaaaccgtaagacgctaccttgactccaagcttcccggggacagaatcacggcggtgacggtggatcttccccgtctcatcaagaaccggacggaggacgccttcagacgggctctcacggatcgggtattccgggccgcggaccggaaggggaagtatctgattctgaggctcgatggcccggagagtctcatggtgcatctccggatgacggggcgtctcgtgtttcaggaggacgactcgcttccggatccgccttatacccggatccggttcagccttgagcgcgggaaactgacgtacggagatgttcgaacgcttggcgacctctggattattccgagcaccgggaagactggtatttcggggtacgacacgctggggcccgacgcgatcggagacgcttttacgccggactatctttaccggaagctgaaaggcacttcccgctctgtcaaagcggtgattctggatcagacggtcgttgccggggtcgggaatatctatgcggacgaggcgctctttcttgccggcatacggccctcaagacacgcggaccgggtgaccaaggcggaatccgcgaagctctgcgatgcgatccgatccgtgatgctggggtcgattgaggcgggcggcacgacgttcagggacttcctcgatggggctgggcatgaaggcggaaacgtggagaatctccgggtgtatggccgcgacggcgaaccctgcacggtctgcggaaccgagatccagctgacaaagatcgcgggacgcggcacgcgctactgcccgaagtgccagaagtagcgcaggcgtgatgcagcgcccaggcagaataatcagaaccgcccggagtctcagtacttcgggcgcttcagtatgcgctccacggtgtcgcggtagaactcgtaacgcttcgggtcgatatccccccgcgccacagcgtccttcacgccgcactgaggctcattcagatgccggcagttgaagtagcggcagcctgagacatactgccggatatccggcatcccgagaatcacatcgtcaaaatcgagatgctcaagcccgaactcctggaacccgggggaatccacaatggctccatcgtccccatagtcgtaccagcaggtgacggtggtggtctgtttcccgaggtcgagcgcttcggagaattcccgcgttctcgcgccggcatccggaatgaggagattgaggatcgtggactttcccatgccggactgaccgacaaaaagcgttttgtggtgagcaaaacgggattcaagaatcggttttgcttcttcaggctttgatcccgcggaaatggaaagggtttcgtaccccagagcttcaagctgccggagggcggcgtccgcttcctcccgtccctcttcaaggtctgttttattccggatcacgatcggcgtgatgccggcctttgtcgcggcgaggagcgccttccagatgaaccacgggttgaaggtcgggcggctcgcgtagacaatcgcgacgagatcgatgttggacgcgagctccttggtcctccattcgtcactccggaagaggaggcttgtgcggggaagcacttcctcgatcgccacaacgccccctgaaggctcagagtagcgcaccatgtctccaaccacgacgtcgcccttccggccccgcctgtgggcctcgtagagcgccccgtcaggcccctgcacgaagtggtgccgtccgtggctccgtgtgacgcgtcccgtcagcagggactcggaagcggcggattttttgggttttgcgggtcgggccatgtaggatcctttgtgattgattctgcaaacataccccggaaacggcggagccgcaaatagaattccggcggcaatccgcgcaaagtgcgaaaatgacagaccgcggtccggaagacggccgccgcgtgtttggtaaaaaggaatgcaaatgactgatacgaagcgggatccgctcttctctgaaacgaacctcatctggatcgaccttgaaatgacgggcctgcagcccgaggtgaaccggattattgagctcggggccatcatcacggacgcgcagctgaatgtgattcacgagggaccggtgatcgcgatccatcaggacaagtcaatcctcgacgcgatggatgagtggaatacgaagacgcacgggaagtccggtctgattgaccgggtgctcgcgagcacgattgatgaagaggaagcgtccgatatctgcatcgaaacgttctcccactttgtccccgcaggaaagagcccgctctgcggctccacgatcggccaggaccgccgcttcatggcgcgctggatgcctagactcgaaaacttcttccactatcgctcgattgacgtttcgtccatcaaggagctcgtccgccgctggaagcctgaggatgtgtggacctctgtgaagtcaacgaagcatcaggcgatttcggatatccaggagtcgattgatgagctgaagcactatcggaagcacgatatgtgcatctgatcaggaaagcccatttctgaaagacgaaagcctgagatccacatgtggatctcag

SEQ ID NO: 1336 - DNA, 14782 bp, Unknown
  gut microbiota DNA sequence
tatcagcctctcctcaggcttccgcacctcgcgcacgagctggtgactgatcagactaaggcgactgaaatctttgagagcatcaacgccgaaatggagaggcggaagaaagttctcaccgaggcaggatgcagggatattgctcaatttaacagccgtgccgcaaaggacgatcggcttccggtgctttgggtgattcatgacgagctggccgcctggtccgcggataaggaatataaagaagcggtctacgcgcttctgaagaaactcgccacccaatcccgagccatgggtatctacctgatcttcatcgcgcagaggccggataacgaagtgttcccgatgcaggttcgtgccaacatcggtaaccgtcttgtcttgaagctgaacgatgaagaaacctcaaatatcgctttgggtcaagccggagctgagaagcttctcggaaaaggccatatgcttgcgaagcttgaaggcaagcttgtccacgcccaggcccccttcctgcatgatgacgaagataacaacgagatcgagcaggcagtcgacatgattatccaggccgataaagagtgggacgaactcgatatctgatcccttttcagattgagcggtgaaagagctcagggattccggaggacatccggaatttcctgagctttttctttatcccgccctttccctcttttcatagatcctgatagttcctgatagatcctctatagaaactcatatttactattaaaagcgatcgagtgaaatcgggctcccgcttttcacttcgccgcgcttggtttccacacccccgaaattccctttcatctcagcggcatccccctgttttccccggtttccggggatctccgtaaatcattctcatttgatcaatttttatttacttgctgaatcagcaattttttgttgtcagcctgtcattcaaaaatcggattgttctccatagaatccgcccccaggagatgaatctcatctcgtccagaacagcaattcataaataaaacaacaggaaatcaaaatgaccttccaactgacccgccgcgccctgctgcagggcgccggcatcacgcttgccggaagcgtctgtccgcttaccgccgtggcgtcaggtgtcaaaaaagcgattgacgcgatgcctgacatgtattggggcgcctgcgtggtgaactgcggcaaccgctgcgccctccgtgtctttacgaagaacggccaggtgatccggatcgagaccgataacacgtcgaacccctgctgcccccagccttatcagctgcgggcgtgcctcagaggccgctccatgcggcagcgcctctataaccccgatcgcctgaagttcccgatgaagcgggttggtgagcggggagaggcgaagttcgagcggatctcgtgggacgaggcctatcagctgatcgccgataactggcagaggatcctgaagaactacggcccggattccgtgtacatcaattacgcgacggcgcagcagacgtcagtgagcggctctaactgctggaagcgtctcgcgaacctcacgggcggctatctgaattggaagggctcctactcctccgcccagattaccgcggccttcccgatgacctacggccgcaaggtcgcgtcctctcccaccgaaatcgcccacgcgaagctctacgtgtcgttcggcgacaacctctcggtcacccggatttcaggcggctcgatgtcctggcagttcctgcaggcgattgagaagaaccacgtgaagacgatcgtgattgacccgatctgcacggatacggtggcggggaaagtgaatcagtggatcccgattctccccgggacagacgccgcgctctgcgaagcgctcgcctacgaattcatcacccacaactgggtggatcaggagttcctcgataagtactgcgtcggctacgacgagaagacgctcccgaagagcgccccgaggaacggcgactacaagtcctacattctcgggaaggcggacggcgtcgcgaagactccggcgtacgcctcagcgattaccggtattcctgaagaaacaatcatcgcgcttgcccgcgagatgggaacaacaaagcctgtctttgtcgcccagggactcgggccgcagcgccgcgcgaacggcgaggaaacggcacgggcaatcgcgatgctcccgattcttctcggtcaggtgggactccccggcacgtcaagcggcatggaagagtgcggcaccgactggtggccgatcgggatcccgcgcggcaataaccccgtgaaagcctcgatcccgagcttcatgtggacagaggcgattctccgcggccacgagatgacggcaacgcacgacggcgtgaagggaactgaccatctgaagaacgacatcaagatggtgatcaactcaggcggcaacatcctcatcaaccagcatagtgactgcggccgcacggataagatcctccgcgacacgtcgaaatgtgaattcatcgtggtctgcgacaacatgatgaccgcgtcctgccggttcgcggatgtgctcctcccagatacgctcggaaacgaaaccgaggacctcgtcggaaacggcgactcgatgggcgagaccgcctttatcacgccgatccacaaagccgtgaacccgcagtgggaacagcgttccacgtgggaaatctgccgcgggatcgcggaaaagatgggcctggaagccgcctacaccgaaggccgcacgcagcgcgggtggatcgagtgggcgtacgagcagaaccggaagcagaaccctgagctcccggacttcaagaccttctgggccacggggccgcatcagctcctgcacctcaagtgggaccggatcgcgttctcggacttccgggcggaccccgcgaagcatcctctgaagaccccgtccggcaagatcgagatctattccgagcagctcgcgaagatcgcggaaacgtggacccttccgaagggcgacgtgatcaccgcgctcccgaaatttgtccgcacgtgggaaatggcgggagacccgaaggcgaagacctatccgctccagtgctacggctaccacggtcacggccgcgttcactcctccttccacaatctcccctgggtacgcgaggcgcatccggaccgcatcctcgtgaatccggtgaacgccgaagaacgggggcttttcgagggacagaaggtgcgtgtgttcaatgaccgcggcgcgattgagatcgcggtccacatcacgccccgcatcattccgggtgtctgcgcgctcccgcagggcgcgtggtaccgcccggtgacgaagaacgggaagacggtggatgtcggtggctgcatcaatacgctcacaagcccccgcccgagcccgctcgcgaaggggaacccctcgcacacgaacctcgtgcagattgaaccgatcagcgcctgaactggagaaacaacatgaagcagcttggatttttctttgacgcaaggcgctgcaacggatgcaagacgtgcgtagtcgcctgcaaggacgcccataacctgccggtcgggcggaatttccgccacgtgctggaagtgacggacggcaagtggtcgaaagacccgaagtccggtgcctggaagcagaacgtctacgcgtactacctctcgatcgcctgcaatcactgctcagaccccgcctgcgtgaaagcgtgcccgacgggcgcgcaccataagcggacggaggacgggcttgtcgtcatcaacaccgataagtgcatcggatgcgggaactgcgcgaaggcctgcccctacggcgcgccggagcttgacgaaaaggcgcacaagatgacgaagtgcgacgcgtgcctcaatcgccttgagcaggggcttcagccgatctgcgttgaggcgtgcccgcagcgcgcgctcgaattcggggatattgaggaactccggaagaagcacgggaacgtcgacacgatctacccgcttccgcagccggccgcgactcacccgaatctcgtgattcacgcgccgctgaagcacccgtgatccgctagataaaacttctattactcttctctccttcgccgcggctctgagtccaccagggctgcggcgtttttttgtccgggagaaagaagcccgagttttcagtaggagcctttggacggaatgacgtgccggacgccgccccgcgggttctcaacgtcgcccttccggcgcgggatcaggtgcacgtggcagtggaagaccgtctgaccgctcacaaacccgttgttgatcccaatattccagccttcgatcgtcgggtcgtcggtttcgagaatctttttctgcgagtggatcaacgcgttgatcgcgtcacgctcttcctgtgagagcccgaaatagtccggaacgtgacgcttgggaataaaaagggtgtgacccggcgtcaccgggaatccgtcacggatggcgtacgcgtagtcattctcttccacgatccgcttccggtcgtccgtctgaatcgcgcagaagaggcagctttcaaccgctcccgtattgccgctttctttttctgacatcacttctcctcaccgaaaccttctcatctttcactccggacagtgtaccggagcttctgaaagccaaaaaaacggcacccgaagatgccgtttctcacacaccggatcctagtctcttacctcagaagattccgctcgtacatcatgcggcggttatcaaggtacgcgcgggcaaaacccgggatacggaagatatcaatcagaagcagcaggcttccaataacgaggaacagcgcgcccaccgcgttgatgaggccggggccgtcagacccaagcgcgaagacgaggatgattccaagccagatcgacgcgatacggaagagaccgctcatcggcttcccgagatagaagcagtggacaccaaatgagccaaagaagaaccagaggacgtaggcgaggaacacggacttcttctcgtttgaaagacgcgtctcgatcagcgtcatcttggcgagattctccatcttattgctttcctgggggatggaggtcggagcagaagacccctgaatcggggaagagtggacggtcgaagattcagacatacgcttatcctgcatattcagttaacatggatagcgttattttatacattcctgtttatttttatatcgattagatcaaaaaacagtactcataaaaacataaccacggattcaaaaataagctatttaaataacgtttttaaaagatagcgtaggcaaactgtcgataagattgcctatttaaaggaaagtaagacaattacactaccaacaaaacgctgactgatcagcaggataaagcacggtgttcaagccgacgcagctgatcctatgacgttatgtattgacataacgacagtcccaattgctgtgtcattttgttttgtttaactcctcaggcgagcgtttttgtgcggctttccgcagctcagtcgccgctcttccggcaggcggagcggaaactttcccgcgtttctccgatatccttgctatggtgactgttttccgagaggtttctgagcccccggaggttatttttttgtcgctcaggtaaatcctcgtaaagatcgctaatcagcctctctgcccccggaattccgaacagaaattaatacataaaatcagagatatccccgcacgccggctttctcgtacctccaaggtaagacaccgaagcgccctaagcctcaggcggtttcttctattctggtattctttcgactgccgctatggcttttaggctaaacggttattattttctttcgcattcggaactttaccgcgacgcatgcagatacctaactttccgatcggtcctgaccaggaggacaaaactcctcacggatccgatgagtttcctttcgcgctctatgagtccaaactctcctggaacgcgagtcatcgggcggactggcactggcactctgagatgcagctctgtcttgtgaagagcggcgcggtgtatgtctgtctctccgataagaagctcgaactgaaagcaggcgaaggctgtttcatcaatagcggcatgctgcacatgatcgccccggtggaagacccggacagcacctactactgcatcgactttcttccggcactcctctcactcttccccggctccattttcgaaaagcgctatatcgacccctatgtcgggaacccggcgtttgccgagatggcgttcaggccttccgtcccctggcaggatgagattctcacgaggcttcagacgatcgcggatctcgcggagtcgaaactctttggctacgagtaccaggtcgccgagtgcctgatgcagatctggctctcgctccttcagaatttcaggcccgacgccgcgaagaagacggtcgtcagccgggcgaggaacgacgctgttgcccgcgcgatcatgacgtacgttcaggcgcactataaggaagagatcacgatcgacgcgatcgcggaggcggttcactacagcccgggcgaatgctgccggctttttaagcgcgtcacgcacgacacgatcttctcctatatccggctctaccgtatcacgcaggcctcaaagctcctccgcgaaaccgggctgtcggttgaggacatcgcgacggaatgcgggttcgcgagcgcgagttacttcatttccgccttcaagaagtgcttaaaaacaacgccgctccggtatcggaacggcgcttagaaagctgaaactttctcaccagagcttcagacctgaagctcccagtactgcacgtcaagccacttcccgaatttctttccggactcgtggatcgtcccgacgtacttgaacccgtatttcttatgaagcgcgatgctcggctcgttgacaccggtaatcagggacacgacgagatgcgtctcgggatcctctttcgcgagattcaggatcgcttccatgagaagcgtccctatgcggtgaccgcggcagtcgggggccacatagatggagagctccaccgtgctgtgatacgcggcttttgaggagaaggaagagagtgacgcgtagccgacaggcttcccgtcgagttccgccgtgatcagcggatgattctccttgttatgctcgtaaaaccacaccgcccgctcttcaagcgtcagcggcttcaggtcaaacgtcgcgacgccgtgctccacctcgtggttatagatgtcgaggagcgcgggaagatcgctctcaacagacttacgaattgtgactgccattctctttctcgctttttagtgttctgcaggaagggtctgcataggaagcaatcataaccgcggcgacatgcgccgaatcccggagtaacccgggaaactgtggtttccgaggtaatacatctatcatcagtaaactaaccggttatcagggcggcttccgcctgccctttctcctcatttcttctgaattcaggatcgctatgccagacaccacgactctcatcatcacgcgctgcgaagaaaaatcgggtgaagtcctggtgtacggacgggagacgtcggatcctgacaccgcggagcgcctcctcttcacgaagaaggggcggcttcgggcgttcagtcagacgcaggtcgcggtggagttttatgacggagcgacggagtactacgacgcgcggggcgcgatggtgatgccggacttcacggcaaacggcgcggcggacacccgatggatcaagtacgcgatgatcgcggtcgtcatcctcatcatcgtcgcgaccgcgatgggagtgccgatcggataaagatcgctttcatccgaagaccgctcttcttcaccccaaaatagaaagcggagttccctctgaaggaactccgctttcgtcaatcaatcaatgaaacttaaagccgcttacttcgtcgtctggaagaggaagtacgtggtgccggccgccttcacggactcgacgacgattccgagcttctcctcaaacgtgaagtcagagcccgcggccgggacatcaccctcggtcttcgcgaagaccatcgtcttcccgaatttcgccatgttgttatggacgcgcgagatcacttcctgtcccgggtagcagcccttgttgtaggtcacgccgccgagcgtgtcgtaattgatcgcctgcgggacaaatttcgacatggagctcgtgaacaccgtcggaacgccggcggagatttcagcgagccaccagaaggcttcgggaacgcgggtgccggcgagagccgcgatctgatccgcggacccaagaacgaggaggcgttccgccggggtttcaaagccggggacgggttcctccgtcggaatcacgcggcccgcgatcgcgccattcgcgcgggcggtggtccagaggcagggcggcacttcgagcccggcgggggcgagagcggctttcagatcgtcgttcgaccccatcacgcccgcgaccttcaccgtgtccgagacgtcctcgaacttcaccttggagcggaagatatagatgctgatccgtttcacaaactccggcagcgtttcgcgcggcaccacgaggaacacagactcctcgttctccatcacgatacgcggggtcgcgagcagccgccccttcacttcggcccagcccgcgagtttcatcgcgtcgccgagacccgtcacacggacgcagaaaagcttatcgagaagatccacggcgtccttgccgctcgcgcggacaacacccagaccggcaagctccgtgataagaggccggttcgccgcgagagagagttcatctgcagaaagttcccagcttccgttatcgctcatgttctttggttcctttcgggttgtgttgtgaaacgtgagaaaacgcgtaattccgagcgtttctctctgaattgaccgaaaggatacacgcgttaaaagaaaataacgcggctttttacgattttgattggggtacgaaaccttcgggcatcggaatcccaagcttcccgtaccagaactgccactggttcgcgaaggtcgcgaagacgcctcgctccacgtacgccatgagttcccggagcaccttgtcgtcctgcgaccccgcccggcagtagacgtgatagtgccagggctcgcgatgccaccctttcagcaccgggaagacaaagccgctcgcaaggtaatccgacacaaagccgggcgtgaggtcaatcgcgaggccttcacccgcgagcagcatctcgcggcacgccgcggcgtccccgtgctgcacccggtgaccccggtcgatgtaataggtctcggttccgttctcgagcttattcgagtacccaaggttctgcgtgtagcgaaggaggattgtgtggtgcttcagatcctcaatcgtttccgggagcccgtacttccgctcgtacttcttcgtcgccatgatgaaggagtagcagatgccggcgggaagcgcgaagagcctcggatccggccggtagtagctcccgagtgacacatcggttttccccgcgatcagcgccgggagccccgagtccgctgagatctcgacccggacgtccgggtgccggtcttcgtacgtcatgatctggctaatgagggtcacgcggttgagattcatcgggagactgagccgcagtgtccgcttttcgccttcccgggcttcaagcgcgtggacttcactcgcgagttccagcgcgtcacgcctcgccttcaccatcttctgcgcgaaaacggcgagccgtgtcccggtttcagtgagcaccgcgggccgcacgcggcggtccagaattccgaccccgagttccgtctcaagccccgcgatgaggcggctcgcgacagaaagatcaagcgactccgcggccgcggctttcgcgagcccgccggttttccggcaggcggagagcagcgaccaggcttcaaaattatcggttttcctcatctttcgggccttcccggcgttacgtctgacgctctcattctagcttgttaaatcagcaagtaaagtttgccgctttgtcattcactaattctttcggactacatatattgtccagtaacggagaaaagcgccgaagcctgattcatcgggcttccggcccgattccccaactctcaatcttgaaggacgggaaataaagatgactgaaactctgaaaggcaatgccctgcttcagaacgggacactcagcaaaggaacggcttatacggcggaagagcggaaggcgctcggactcacgggacttctccccccgatgccagcctcgatcggcatgcaggaagaagcgatgatggaggtctatcacagcttctccacaccgcttcagaagagcatcttcctcgacgcgctccgcgcggcgaacgagacgctcttcttccgcatgctgatggataacgtggatgagctgctccccgtggtctacacgccgaccgtcggtgacttctgcaagcagtacagccatctcctccgcttcccccgcggcatgttcctctcgatcgaggataaggggcatctcgcggagatcctcaataacgccccgcagaaagaagtggacatgatcgtggtgacagacggtgaacgtatcctcggtctcggggacctcggcatcaatggtcacgggatcccggtcgggaagctcgttttctacaccgtctgcgcgggcgtggacccggcgaagtgcctcgggatcacgcttgatgtcggcacgaaccgcgagcgttatctcaaggatccgctctacctcggccaccgtcatgagcgtgtccgcgggaaggaatacgacgaatttattgaggagttcttccaggccgtgaaggcgaagtggccgaactgcgcgattcagttcgaggacttcgcgaaccagaacgcgttccggctccttgaccgctaccgtaaccgctacgcctgcttctcggacgacattcaggggaccgccggagcggtcgtcgccggtttcttctccgcctgccgcgcgaagggcacgaaggtgtcagacgaacggatcatgttcctcggggccggtgaatccggcacgggttcctctcggctccttgtcgaggcgatgaaggaagaggggctcacggaagaagaagcccgctcgaagatctggctcttcgatatcaatggcccgatttcgacgcgccgcagcgatatcgcggactacatgaagcccttcgcgaaggacgtggatccgagcctgacgttcgaagcctatgtcgacctcgtgaagcccaccgcgattgtcggactctccacctgcggcggcgcgttcactgagtcgattgtccggaagatggccgcgatgaacgaccgcccaatcatcttcgcgctctcgaacccgaactcgcactccgaatgctccgcggaacaggcttacgagtggaccgacggccgggcgctcttctgctcaggctccccgttcgagcccgtcacctataacaggaagacctttgtgccgcgccagggcaacaactacttcatcttcccggggatcgggcttggcgcgattctctctggctgcaccgggattccgcctgaagtcctgcttctcgcgagccacacggtcgcggactgcgtgacagacgcggatctcgctcaggggtcgctcttcccgccctcttccttcatgcggaagatcagccacgacatcgcggtgaacgtgatccgcaacgcccagaagaccggacgctgcgcgagaaccgatatcccggctgacctcgatcagtacgtgacggactacatgtattcgcctgagtaccggtaatccatgaaaggccgcgagtcgggtcccggcggtttcgggcccggctagcggcacccccccacgcctcccctggcttccctctccgcccgggtccgttacttcgatatcggaccaggccaggggcaggcgtccctaaattcgcggttcgggcggattttctgaccggatgcctaccatgtctgatacaaaaagtaatgaagcaccccagcctcagccctctaaaacggagtggtggcgagcggcgattccgctcgcggtgctcctcattctctggttctgcccgctgccggatggcctgagcgccaagggcatgcacatgttcgcgattttcgcggcgacgattgtgagtatcctcaccgcgccgcttccaaccggcgcgatcatgtttatcgcgctcacggtcgcctacttcaccgggacgctcacgctcaaagaagacctcgcggggttctcgtccggcaccgtgtggctcattttctcggcctacattctgtcgcttggcttcgtgaagtccggtctcggaaagcggatcgcgtacttcatgctctcgaaattcggcggcagctctaccggtatcgcctattcgctcggtctcgctgacctcatcatggcgtccgcgatgccgtctgtcaccgcccgaggcggcggcatcatcatgccggtcgcacgttccatctgccgtgtgatggggtcggagccaggtgaatccggaaagaagatcggtgactacctcatgatgacctgcttccaggtcacgccgatcacgggcggcctcttcatgaccggtatggcggcgaatctgctcgccgtgcagctcgcgaaggatcagcttgggatccagctcacctggggcgggtggacgctcgccgccttcgcgccctgcgtcgccgcgttcctcattctcccctggttcacgaagctcctcatccgcccgacgatgaatcacacgccggaagtgaaggtgcacgggaaagaaatgctcgcggagcttggaccgctctccacgcaggagaagaaggtcgcggtgggcttcaccctcgcgctccttggctggggcaccgcgatcctcacgggcttcaacgcgaacgcgatcggtatcgctgtggtcgcgtacctgatggtcacaaaggcccttgagtggaaagacgccctcgctgaaaaagccgcctgggacacggtggtgtggttcggtgtcttcatttcactcgcgaccggtctctcgaaactcggcttcatcaagtggttcacgggtgtggtctcggcgcagctcgcgggttccgcctggatcgccgcgttcctgctcctcctcgtgatctatgtctacacgcattacctcttcgcgacggtggcagctcacgtgatcgctatgtatgtaccgttcgccgcggtcgccattgcctgcggcgcgccggtgggactcgtcgcgatcgcgttctgcatcttctctaacccgatgtggggtctcacggaatacggttccggccctggcccgctctacttcggtcaggggtacttcgagcgccccaggttctatgcccttaatttcgccgtgatcacgatggatgtggtcgtgatgcttgcggtcggcatcgcctggtggaaggtaatcggtctctattgataggaatggaaaaatgacgctgaagacgtatgagctcccgtatggcgacaccgtgaaaaccgtggcgctgccggaggacgaagtaatcgctgaagaccggacgaagtccttcaccccgatcccgaaggaagcggtgaaatcgaagatcctcgaagcgatccggaacccgattgggatcggaccgctcgacgaacgggtgaaacctggcgacaccgtctgctttatctgtaacgacctcacccgcgtcgcgaattcgttcgacttcatgccggtgttcctggatgaactgaaccgcctcggggtcccggatgaccacatgaagatcgtcttttcgctcggagcccaccggaagatgacgcgggacgagatggcggaagcggtgggggaagaggttgccgcccgtgtcccgatgtttaattccgactgctacgcggaccaggatttcgagtacttcgggcagacgacgcgcgggacgccggtgctcatcaataaactgctctgcgacgtcgaccacgtgattctcacgggaacgatcgtcttccactacttcgcggggttcgggggaggccggaaggcgattctcccggggtgcgcggcgatggaaacgatccgcatgaatcaccagtggatgatggatgaccgcgtggggctcgggatcaccacaggcaacccctgttacgaggaccaggtggaaggcgtggagcggttcgcgaagggccgcgacctcttcctcttcaacgcggtgctgaacgcgaagcacgagttcctccggatgtacgccgggcactgggtgaaggcgcatctcgaagcctgcaagtttgtccgcgaggtctacggcgttcccatcccgcgggaagccgatctcgtgatcgtgagctgcggcgggtacccaaaggacatcaacgcgtatcagatgcagaaaacgatggataacgcgaggatcgcggtgaagaagggcggagccgtgattcttgtcgccgagtgccgcgagggaagcgggaatcagaagtttgaggacacctgccggcggcttgggagctacgacgcgatcgtgaaggaactgaaggaacacttcgtgatgggcgcgaataaggcgttcgcggtcacgcggaatatgcagaaagcgccctacttcctcgtgtcttccctcgacccgaagcttgcgaaggaactcatgttcgcgggctgcgtgacgacgattgaggaagcgcttgctctcgtccgcccgattgtgggcgagcatccgtctgtcatcctgatgccggaaggatcgctcaccgtcccccttttgcctgaaaactgagaaggaataagacaaccggtactcacataccactctctgctcagaagtgtttttttcaggcggcagatggggccaaaaccgcagaatcggccccatctgaactgactcccatttttaggacacacctaaaaaaagtgggagtcagttttttatgaaccgaaca

SEQ ID NO: 1337 - DNA, 22612 bp, Unknown
  gut microbiota DNA sequence
gttcagacccttccccgggtcagctttttttctgcctaaagttagctttttcagtggtatctgcacgctgtgtggtctattattagcaatccaattcaagcaaatgaaacgcggttttcattgccataaaaatttctaaataaacttttggatcttcccaatggattttgacttctcactcgtgatgtcatctctgccgctactcctgcagggcgcgctagtgacattgaagattacggccctttctgtcggcctggggttgattttcggcttgctcgccggcgtcgcgtcactcacgccgtactggtgggtgaggattcccgcgcgctgctacgtggatttcatccgcggcactccgcttctgattcagatcttcctgatttatttcgctctgccggtcattctcaatacccgagttgacccgttcgttgcggcggtgtcggcctgttctatcaattccggtgcctatgtggcggaaatcttccgcgctggtattcagtccgtggaccgcggtcagactgaggccggccgctcactcggtctcacctggttccagaccatgcgcgagatcgttattccgcaggctttcaagcggatcattcccccgctcggcaacgaattcattgccatgctgaaggacagctcccttgtgtccgtgatcggtttcgaagaactgacccgttccggtcagctgattattgctcagacctacggctcgtttgaaatctggaccagcgtcgccattatttaccttgcgatgacgctcacgatttctcagtttgttgccttccttgaacggaaattcagaacagatgaacgataataaaaccatgattgagattaaggaccttcacaagcggtatggtgatatcgaggtcctccacggcatcaacctgaccgtggctccgaaagaggtggtcgttgtgatcggcccgtcgggttccggcaagtcgaccatgctgcgctgtatcaactacctggaggaagcttcctcgggcgaaatctgggtggatggcgagaagattgagccgaagacgaacctcaaccggatccgtgctgaagtcggcatggtgttccagcacttcaatctgtttgagaataagaccgttcttcagaacatcatgctggccccgatgcgggtccgcggtgaaagccgtgaagtggctgagaagaaggcgcttgagcttcttgatatggtcggtctgaaggacaaggcgaacgtttatccgaagaatctgtctggcggccagcagcagcgtgttgctatcgcccgttctctcgcgatgaatcccaaagtcatgctgtttgatgagccgacgtcagcccttgacccggaaatggtgaaggaagtgctcgacgttatgaagaagcttgcgaatgacggcatgacaatgatcgtcgtgacgcatgaaatgggttttgcccgtgaagtgggtgaccgcctgatcttcatggccgacggccagattgttgaacagggtgttccggaagaagtcttcgcgaacccgcagcataaccgtacgaagcagttcttctcgaagattctgtaaggcggccgggcttcagttcttctgagtcccatcagccggagccacatccggagcgatgaagcgcatgtgatactgtgtcacggcccttccgatcagctccgggacggcttcggctttttctttcttttccagatactcgtcggccctcatcaggcgcttcttcccgtcctcacggatgagaaagtaacctgttgagggttcctgggccggtatagagcggatgaccatcaggtcgcccttcgaaatgccatcggcttccagctcgctgtccattacctcgaagatttcctgaacatcagaacctcccacgtgaagcctctcgttctgaattacaagcggaatatttttcagaccgagttttttttcttctttgggaagcgaggactttggagccgatgtgacctccagacggatgccgcgagcctggtgcggcatggtagaaatcagtcctttcctttccagcgccctgaggtggctttccgccgcattcggggaagaaaagccgaaatggtccgagatttccttccgtgacggggggactccggaggtggaaatctgatcgcggatgaatttgaagacggcaaactgtttcggtgtgagtcgcttctttcttccgttggttgcgggcatccgtatctccatcgccttcaggcgtatttctagcccggtcagcggccggggggtcgtgttaaactcagtgccggtctgatgtgtccctgaccgggggaatttctccggcggtttctccatctcagggggaatattccggaccaaaaaatattaatcgattaatcgctttttaatagacgtttagagaagatgccgctagaaaatcctctggtgatcttggagggtgcgcttttaaccgccggccgtccgctgactgtccgcgaaatgcggctccttttttcgaatgcctacagccggagcgacatcctgaagtggctgggcgaaattcagcagaaatggtccggtctcgctgtgcacctcacagaggtcgctggtggatggcggttctcgggcagctcggaacttgagccttatctgaggcggcttacgactgataaaccgcctcgttactcacgaagttttctcgaaacgctggcgattatcgcctataagcagccggtgacgcgtggtgatattgaagatatccgcggcgtcacggtgaattccaatatcatgaagcagctccaggaccgggactggatcgagtgtgtcggtcaccgcgatacgccgggccggccatccctctgggctacgaccgctaagtttctggaggacttctcacttgagtccctcagagcgctgccggttattcctgaaagcacggaagtgcagccccggctgccggggttcgaggatctctcgaaaaacggcgcgggatcgggatctgatatcaaaccggatcctgaacctgtccaggaaccggttcccaatgaacctgatgaacctttagaaacggaagagcagaaaaatgacgaatcctgaagaaaagcccggcatgccggaagtgccctccggctcggagctcgaggctgagcgtacgctttccgcaatgaaggccaaagcaagcggcaagtctgagaagcttcagaaggtgctcgctgatctgggactcggttcgcgccgcgccatggaagttgtgattgatgaaggccgggtggaagtgaacgggaagaccgcctatctcggactccgggtgtttcccgaggatgaaatccgcgtggacgggaaaaaagtctcgcgggatgacgctgaggaagatttgccgcgcgttcttctgtacaacaagcctgagggcgagattgtttctatgaaggatccggaaggccggccgagtgtctttgatcacctgcctccgatcgacaaaggccgctggattgtggtcggccgtctcgacttcaatacggaagggctgctgatctttacgtcgagcggccagctcgctaaccttctcatgcatccaagaaacgcgatcgagcgtgagtacatggtgcgtgtgacgggtgagctcaccgacgaaatgggagagcgtctggtgaccggtgtcatgctggacgacggtccggcccgttttgcccatatttctgatcagggcggcacgggactgaatcactggtatctcgtgagactctctgaaggccggaaccgtgaagtgcgccgcatgtttgaagcggtgggacttgtggtgagccggctgatccgggtgcggttcggcgacctcgagctgccgcgcggcctgaggcgcggcgaaaagtcagaaatgagccgggaatcggtgcaggagtggctccttcacctgaagctcgcgcagcagaaggcggcagagaagggggagttttcacacggccacggcagaaagtccgcgccgcgaagagaccgtcgatcacaggctccaaagagggaaaaccgggagggtggatcaggccgtaccggagcccggcgtccaagggcccatggaagcggtacccgcctttaactttgcgggattttcctagcaatgagagaaaaaaataggttataattcaaaaattaaatcgcaggactgctgtttggtcctgcgtctcggtttcatatatccggtttcgttttttcagattccggaatgcccggaatgaattcgggcgaatgaaaatgggcgctgtgcccatttttttttgaacatttttaattgtcagttagttatctaacgaagaacatataaagagtacatgactgccagaacaatggatttgagcgaggcaattgcccataccgtcgagggcatgggatatgaatttgttgaactggaacgccttcctggctctatgctccgcgtcacgattgacacggaacaggaggggggcatttcggtcaacgactgcgaggccgtcagcaatcagctgaccgctcttttcgccgcggaagatgtggattacaagcggctcgaagtcacgagcccgggtgttgaaagacctctgaagaaagcaaaggactggatccgtttcgcgggttctctggctcacgtggaactcttcgccccgatgtttgccgaaggttttcctgaagcggggcgccgcaagcttgatggccggattctttcggtctcaggcgagccgggcagcgaacagattcaatttgaattcacgggcgagaagcccttccgcacgccgtcccaggcgttccgcggtcggctggaggcccgcaagggcggacgttctcatgagcaggcagcccccattacggtggaattccccctctccgaagtagaacacgcgcacttgattgcagaacttgattttaaaggtggacgtaaatgaataaagcgatgagcggcaaagatcttcttgatatggtcgaggttcttgcccacgagaagagcgttgacatcgacgttgtgtttggcgttgtggaagtggctctcgccacggcaatcaagcgctcgactttcccgggcgaggatgcggatgtggtggtgcatatcgaccgcgaaacgggcgactattccgctgagcgccgctggctgattgttcctgacgatcagggtctgcaggagcctgaccgcgaggaaatgtacagcgacattcatgatgactacccggatctctccgagggcgattacatcgtccgcccggtgactccggctcactctgacgcccgccgttttgctcaggatgcgaagcaggtcatcctgcagcgcctccgcgatgctgagcgcgctcagatcgtgaaggagttcctggaccgcggcgaatcgatcgtgagcggacaggtgaagcgtatggataagggcgacgcgatcgttgaactcggccgtcttgatgcccgcctcccgcgtgatcagatgatctcgcgcgaaaatattcatcctggggaccgtgtgaaggcttacgtgctgcgtgtcgaagacagccagcgtggcaagcaggtcattctttcccgcacgagcccggacttcctgaagaagctgttcgagcttgaagttcccgaaatcgaagagggtctcctcgagatcaagagcgtcgcccgcgaccccggccttcgcgccaaggtggctgtgcttgctcacgactcccgcattgacccgatcggaacctgcgtcggtatccacggcagccgcgtgaacgcggtgaccgccgaactttccaacgagcatattgatatcgtgctctggaacgaggatccggccctctacgtgcttgaggctctgaagccggctgaagttcagtccatcgttctgaacgaagacgacaagagcgctgatgtggtggttccggaagagaaactcgccgtggcgatcggtagccgcggtcagaatgtgcgtctcgcctctgagctgaccggctggcagatcaatatcatgacggcagatcaggcagacgaaaagcacaagaccgaaaccgacgccagccgccgcgagttcatggaacagcttgatcttgacgaagatgccgctgatgctctgatcgatgcaggccttgcctccatcgaagacgttgcctacatccccgagaaggagctgctcgaaatcggcgcttttgacgaagataccgtcaaggaacttcgttcccgcgcccgttcagtgctgacgcgccgcgctatcaagcgtgaagagaacctccgcctcgccgataagagcctgctggagcttccggggcttgacggcgacaaggtgagcgctcttgtgaccgccggcgtcagaaacgttaatgatttggctgatttggccactgacgaattggttgaaaagactggctttgatgagaaaacggccgccgatctgattattgcagctcgcgcagtggtttatccgtaggctgaaagagattaggggaaaaaatatttatggcaaataaaacagttttcgaattcgcccaggaattgaaggtagcagccaagaccctgctcgctcagctgaaggcagccggtgtgagcaagaactctgaaaccgacgaactttccgaaggcgataagacgaagctgcttgaatcgctccgcctagagcgcgcgaatgaggaaagcagcgaggcgccgaaaaagccccgcagaattacggttacccgcaaggaaaagtccgtgatcaagaaggctgactccacgggccgcacccgcaccgttcaggtggaagtgcgccgccgccgtgttttcgtgaagaatccggctgccgaagctgcccgtgacgctgagatccagaaggaacttgcggcccgcaatgctgaggacaaagcccgcgccgagcgtgaggcagctgaacaggcttcccgccaggctgaagaggctgcccgcgccgctgaagaaagcgagaagaaggctgctgaagaagccgcccgcaaagaggctgaacgccgcgccgctgaagaaaaggcccgcgctgcggctgagcatgaaaagaaccagcgtgagcagaagaacgcctcgcgcgcccgccgtcaggctgaggaacgcgcccgcgccgagcgtgacgcggctgctatccgcgcatcccacgctatgcaggccaaggctgccgctgaaaaggccgccaaggtggatccggctgaagccgcccgccgtgaggctgcccgcgcaaaggctgctgctgaggctgccgctctgaatgccgcccgcgcaaagcagcgcgaagaggaagagaagcgccgcgccgctgcccgtgcgaaggctgaggctgaagctgccgccatccgcgaaatgctgaaccgtccgaagaatgctccgaagccgaagcccgctgaggaagcgaagcccgagaccaaggctgaagaagcaaagcccgcgaagaccgccgccaagaagaccgagcagaagcgcccggctcatctgcgtccggccgccgctccgaaggcttccggtgacggtgcctccgcccgccccgcgaagaagacccgcaaggccggcgaacaccgcgatgacgaaggccgtcatcgtcagatcaagacccgcggcatggatgatgatggatcctcctggcgcagcggccgcggccgtcgtcaggaccgtcatcatggcggcaactcctcgcagaatcagtcgaatgaaccgatcgtgcgcgaggtggaagttccggagaccatttcggtcgcggatctcgcccgcaagatggctgtgaaggcgacggaagtgatcaagcagctgatgaaggatggccagatggtcaccatcaaccagatgctcgatcaggacaccgcgatgatcgttgttgaggaaatgggccacaagccggtcgttgctaaggctgacgatccggaagccttcctcggcgaaatcggtgacaagaatgaataccccgcggttccgcgtcccccggtcgttacgatcatgggtcacgttgaccacggcaagacctccctcctcgactacatccgccgcacccgtgtggcggctggcgaagcgggcggcattacgcagcatatcggcgcctaccacgtgaagacgccgcgcggcatcatcaccttcctcgataccccgggccatgaggcgtttaccgccatgcgtgcccgcggtgcccaggtgacggatatcgtgattctggtggtggccgccgatgacggtgtcatgccccagacgaaggaagctattgctcacgcccgttccgccggcgtgccgatcgttgtcgctatcaataagtgcgataagcccggcgcccatccggaagtggtgaagcaggaactcgttcagaatgaggtgattccggaagagtacggcggcgacgctccgttcgtgaacgtgtccgcgaagaccggtctcggtatcgatgagctgctcgaaaacgtactgctccaggccgaaatgctggaactcaaggctccggatcagggtctggcccgcggtgtcgtgctggaatcccgactcgaccgcggccgtggcccggtggcctctgtcctcgtgcagtccggccgtcttaaccgcggtgacgtggtgctcgccggtgctcagttcggccgtgtccgagcgatggtcggtgaaaacggcaagccggtgaaagatgccggtccgtcgatcccggtggaaatccagggtctttccggcattccgcaggccggtgacgaattcttcgtcctgcctgatgaacgcaaggcacgtgaaatcgctctcttccgtcagggcaagtaccgtgacgtgaagctcgcgaaggctcaggccgccagcctgcagaacatcttcaaggacaatgacggcaagcagaagactctgcccctcatcgtcaaggctgaccttcagggttcccaggaagctatcgtccaggccttccagaagctgtcgaccgacgaagtccgcgttcagatcgttcactccgcggtgggcggtatttctgaaaccgacgtcaacctcgccattgctgccggcgccatcatcgtcgggttcaatgtccgagccgatgctggtgcgagaaagcttgccgagcacgaaggcgttgagatccgttactacgacatcatttacgatgccgtgaacgagatcaaggctgccatgggcggtatgcttgccccggtgaagaaggaaacgaaccttggtcttgccgaagtccgtcaggttattcacgtgccgaaggttggcaacatcgccggctgccgtgtcgtggaaggcgttatccgccgcaacgcgaatatccgcctgctgcgcgacaacgtggtgatctggaccggcgaactcgcctctctgaagcacttcaaggatgacgtccgcgagatgaatgccggccaggaatgcggtatctcgctgaagggctacgaggacatcaaggaaggcgatcagctggaagtgttcgaggtgacggaagtcgcccgtacgctctaagcagcggaacgcatgccgcctctccccggagcaatccgggggcaggtggcattctgattttttgaattttgatttgaggtagagataacgtgagaaaggctaagcccgggcgctcgaccagaattgccgatcagattgcgcatgatatcgccgaactgatcccgaaagaggtgcgtgatcctcgggttggttttgtcactgtgaccggatgcgaaatcacgccggactacgcgcacgcgaacatttatttcacggtgatcggttctgaaccggaagcctgccgcgaagggctcaacgccgcggccggtatgctccgcagcctgattttcaggcagctgcgcatccacacggttccgacgcttcacttcgtgtatgacacgagtgtggaccgcggcttcgcgatggataagctgatcgcggaagcgctggatcagaatccggggaagtaacgtgccaagaggtcatcatggcgaccgcgtgaacggcgtactcctcctgaataagggggaaggcgcgagctctaaccgcgaactgcagacggcccgccgcctgctgaacgcggcgaaggccgggcactgcggaacgctcgatccgatggcgaccggacttctgccgctcgctttcggtgaggcaacgaagttctccgccgatctgctgcacgctgacaaggcttacagagccgtggcaacgcttggcgtggaaacggataccggcgaccgtacggggactgtgctgaagacgcatgaagtctctgtgacactggatgaagtgaaggccgctgccgcgaaacttaccggcccgatcaaacaggttccgccgatgtattcggctctgaagcgtgacggagttgcgctataccgcctcgcccggcagggtgaaacggtggaaagagagccgagactggttacaatctaccgttttgacattctgtcgcttgatggaaatacggtggaaatggagtgtgtggtttccaaaggaacctatatccgcactctgattgaagatcttggacacctcctcggatgtggcgcgacgatgtcagcgctttgccggacccgcgttggagatctggatctgaaggatgcaattactctggagacactggagcgggaacccgacgcgataaaacgccgggcgatgctccgtccgccagatgagctgatccagagcctcgcgcccgttgaactggcggccgctgagactgagaggtttaagaacggacagaggcttgcgcttcacctcgcggaacgcgggagagtgcgggtctatggaccgggaaaggaattgctggggaccgctacggtgaatgaacgcggcgtgcttgctccggaaagattaatagctactgattaaagagactaagagaaatgacaagagccattcgcaatattgcgattattgcccacgttgaccacggtaagacgaccctggtggacggccttctgaagtgtgccggcaccttccgtgaaaaccaggaagttgaacagcgcgtgatggacagcaacgcgatcgaaaaggaacgcggcatcacgattctcgcgaagaactgcgccgttgagtggaagggcgttcacatcaacatcatcgatacccccgggcacgccgacttcggcggtgaagtggagcgcgtgctctccatggtggacggtgtgctgctgctcgttgacgcggttgacggcccgatgccgcagacccgcttcgtgacccgcaaggcactcgcccagggcctgaagccgatcgtgatcgtgaataaggttgaccgtccgggtgcccgtcctgagtgggttgtgaaccagacgtttgatctgttcgataagctcggtgcgaccgaggaacagctcgacttcccggtgatctacgcctccgccctgaatggctacgcaggcctcaccgacgacgtcgaagagctgaagaagatcggcaaccttgacgccattctcgacaccgtgctcgaaaaggttccggtccgtgaagacgatccgaacggcaacctgatcctccagatctgctcgctcgactactcgagctacgtcggcaagatcggtatcggccgtgtgcaccgcggcaccctgaccgctggccagaatgtctgcttcatggacggtccggaagatacgccgaagcgcggcaagatcaatcagattcttcagttcgaaggccttgaacgcaaggaaacgccctccgctcaggccggcgacatcgttctcgtcacgggtattgaagatctgaacatcggcacaaccatcacgagcacggatcatccggaagcgctcccgatgctgcacgtcgatgagccgaccctcaagatggaattcatggtgaacacgtcgcctctcgccggcaaggaaggcaagttcgtgacgagccgccagatccgtgagcgtctcgcccgcgagctgaagtcgaacgtcgccatgcgcgtcgagaacacgaaggatgagaaggtgttcctcgtgtccggccgcggtgaactgcatctcacggttcttcttgaaaatatgcgccgcgagggattcgaaattgccgtttcccgtccgcgcgtgattatcaaggaagagaacggcgtcaagatggagccgtatgagctcctgacggttgatgttgaagaagaacatcagggttccgtgatggaagagctcggccgccgcaagggcgaactcaccgacatggagccggacggcaagggccgtgtgcgccttgagtaccgtatcccggcccgcggcctgatcggtttccagagcctcttcatgacgatgtgccgcggcaccggcatcatgagccacgtgtttgacgactacgccccgatcaagcagggcagcgtcggcgaacgccgttccggcgccatcatctccggtgaagacggcaatgccgtggcctatgctctctggtacatccaggaacgcggccgtctcttcgtgagcccgggcgacgctgtgtacgaaggcatgatcatcggcgagcattcgcgtgaaaacgacatcgtcgtgaacgcgatccgtacgaagcacctcaccaacgtgcgtgcttccggctccgacgaagcgatccgcctcgtgcccccgacccagctcacgctggaaagcgctgtggaattcatcaacgacgacgaactcgtggaaatcaccccgaagtcgatccgtctgcgcaagcgctatctgaaggaattcgaacgcaagcgcgctgcccgtgcggctcaggctgagttcggcgatccggacgtttccgaggaataattccttcggaatcgcttcagaaagtgaagaaatcgaagcataccgctccttccctctgcccctgcggcagcgggaagacgtatgaggactgctgcggcaggtatcacgccgggactccggcgcctgacgcccggagtctgatggcaagccgctacagcgcctacgcgctgggactggagaagtacgttcgggacacgtggtgcgaggaaaactgccccgcggacctggatctgaaggccaatcccatcacgtggctcgggcttgaaatccgctcattccgggaaacggggcctgacaccgcagaggttgaatacgtggcgcgaggccgctcgggaggcgccggagccttcaggcttcatgaactgtcgcggttcgtgaagcgggaaggacgatggctttatctcgacggcgactgcttcgagaagtaggtttggagaagggcggcagataaaaaatgccgctctttttttcaatcggcgggaggcttcccgccggtgttatcaggacggaaaaagataatggcacttcagacagagctgaagcctgaggactggcgattctgcgtcgcgccgatgatcgactggacggacgagtggtgccggcactttcacaggctcctctcaaagcgcgcgagactctacaccgagatgatcgcgtcgcccgcgctggtgcatgggaaccgggcacggctcctcgggtatgagaagggtgtgaatcctgtcgcgctgcagcttggcggatccaatccggcggagctcgcccagtgcgcgaaatggggggaagaggctgggtttgacgagatcaacctcaactgcggctgcccatcgccccgcgtgcagtccggggacttcggcgtggtcctgatgctttccccgcagaaggttgcggactgtctcaaagccatgcaggacagcgtgtcggtaccggtgaccgtgaagcaccggatcggcgtggatgatcagaactcctacggctttgtccgtgacttcgtcggcacggttcatgaggccggcacccgggtcttcatcgtgcacgcgagagccgcctggctgaaggggctgtccccgaaagagaaccgcgatattccgccgcttaaccgtgagcttgccgcacagctgaaggcggatttcccggacagcatctttgtcgtgaatggcgggatcaagacgctcagcgaatgtcagacggaacttgggcgttttgacggtgtgatgctcgggcgtgaggcgtacaacaacccctggcttcttacggaggtggatcacgcgctgtacggcgacccggagagcacgctcacgcgggatgaagtggtggagcagatggcggactatgtggatctcgtgcaggagcgcgaaccgctcgccgcgagaaccgcggtgaaccatctgatgggactcgcgctgggacttccgggcgcccgtcactggagacggctcctcacggatccggcgctctggaaaacgaagaaagccggtgagattgtgcgtctggcctggaaggaagtgaagccagaggccggtatggaagattagcctcacgtctctttcccggagacagacagaatgaagccctcaggttcccgatggaacctgagggctttctttaagagagacgctgcctgggggagaattacttctgagcctgctggcggacagaggcgagcgcttcacgcacagccttggcggctacgccgttgaagcggtactggaagtccgtgatcggcttatcagccttcacaaagtaacccggaacgaccgtggtcgacttgccgcggtggatttccacaagggcgagcgacaccgcgtcgcgcgacagctcaaagatgcccgtatcaggtgccttcaccgtggacgggaaggagaaggcgatgcccttcgtaccgtcaaccgtcttgatgctgtaggaaccgcgggtttccggagtcttcgaggtgctctggcagaagaccgtgccggtcttcacagagtaaaggctcacttcgccgttttccgggatggcagacgctcccgttgccgggagtgcgactttctcctgataacgctgcttcacgcgcttgccgcgcttattcttcacgtagcgggtcttcgttacaaccttgaactgggtcggagcgggggcgcctgcagtcgggtcaaagacaacaccgtaagctttgaagccaacgcgcgggaggtagctgaggcagtaaggaatatcgcggctgaacgtgcggacgaacccttcaacgttaccggcacccgtgaaggcatccggcttcagcaccacatactgatcctgcgtcatggcaatctgaggcatgtagaccacagagcccttcgggaagcgggcggagatcacgccggcagccggggtcggatagttcgtgcgggaccggagatagtgatagatgtactggccggacacatcaaacgcgtagagcttcagacgcatcgcgaccgggttctttgagttatccgagtaaagcttcaccgaaccgtcaggctcagaggtgaggtagctcgggaattctgcggaaaccgagtttccggagcggacgatcgaattcacgttcgtgccccaggcaaacccgtgagccttctgtcccttcggataggtctctttcacagtgtaggtggtgtcattcttcttctgatcgatgcggaagttcgactcctcgcggtcattgaagtagtacacgccttcaccctcgaacgcctgcagtgtggtgagaccgagcggcttcgcccccttgatggaaggaacctgagtgagcatgaaaccgtaagtgccgtcgtcaaagcggttgacgctttcggatacgaccggagaagattcctgagcggaaggggcggatgccgtcttctgaccggttgtctggcagccggcaagggtcagcgcgcagaccgcggcggcagaggccgcgagactgaagcgtttggtgaaatgacggatattttccatgatcagtgcgacaaactttcctaagagaggatctcccgggcaggggctgccagagagtgttccgcgtacagcgcgggatatttttctatgataccgaaccgggggtgaaagggccgttacattctgttaaggtcaggggagttccttagagggctgtacgcctggggcagtcccgaaaacaatacggcctgccaggcttactgccggcaggccgcatagcggaactccgcgtccggtgtctgaattacttcagagcgtcgaacacacgggccgtgatctcatcaatcgtgccgagaccggaaatcgcgcggtactgcggagccgtcttgtcgccggacttcgcgagatcgccgtagaacttcacgagcgcttcggtctgattgtgataaacctcgagacggtgacggacaacgtcttccttgtcgtcatcacgctggatcagcggatcacccgtcacgtcgtccttgccctcaaccttcggggggttgtagacgatgtggtaagtgcggccggagaccgggtcaacgcggcggccgctgatgcggcgcacgatctcatcatcaggcacggagatttcgagcacgaagtcgatcggaataccggtcttcttcagggcttcggcctgcggaatcgtgcgggggaagccgtcgagcaggaaaccgttcttgcagtcaggctgcgcgagacgttcttccatgagcccgaggatgatgtcgtcgctcaccagagcgcccgattccatgacggacttcgccttgaggccgagcggggttcccgccttcacagccgcgcgaagcatgtcgccggtggaaatctgggggatcgcgaagcgttccttgatgaaggcagcctgggtgccctttccggcgccgggaggtccgatcagaataagacgcatatttttatctccaaaacaagttctgcggacggatcgggtaccgcccgcttgggcttttaagtccgttattttaagcgccggtgagtctccgggcaatcctgcatacccctataacagggggcagaaatcagagcgggagattgccccgggcatacacctcgcggacccgttcgaggtccgactccgtatccacaccggccgggagctcctgctcaagcacgagaaccgcgatccgctcgccgttccagagagccctgagctgctcaagactctccgtctgctctatcggagccggcgggagctcggaaaacgcccggaggaaccgcgcgcggtaggcgtagagcccaatgtgatggagagcccggaatcgttcaggaagctcatacggaggaccggcgcggaaagcgtcgcggggccagggggtcggcgcccgggtgaaggtcatcgcctcaccgagcgcgttcagctctaccttcacaacgttcggattcagaaaatcctctactgtggcaatcgggtgagccgcggttgcgatggcgcagccaggcttctgtgcgaggaggctcgccacgcggtcaacgacggacggcgggatgagcggttcgtcgccctgaatgttcacgacgatctcatcctcttcaaagtgcagcttctggcagacctccgcgatccggtccgttccggtcgggtgggattcctgcgtgaggacggcttcaacgccttcgcgttcgcacgcgtcaacgatctgggggtgatcagtcgctacgacaatccgggaggcgccggtgagcttcgcccgttcagcgacgcgcacgatcatgggtttccccgcgatatccatcagaggcttgccgggaagccgggtcgacttcatccgggcggggatcacaatgttgtaggtcatatatctttcagctttttcagagccgggcagcggaagcctcggcttttttctccttcagccggagctcctcaagctcttcctctgtcatttcacgcgcgtcgtgcgcgatcatgtcagggatgccgtcccggacggcaaaggcgaggccgcaggccgtgcagaggaattcctctgactctgcgttccagccgagcctgcccttgcagaccgggcagacgagattctcagtgacgttaggattcatgagtggctccattggcggatgggttcggatgacgggcttcccgcgccttctgatcaatgaagtcgagcaggtagtcttcgagggcgatatcgtaccccacagtccagatccgggagtcggaagcgattccgggcacctggcggcactttacggcatccttttccgtaatgaggatacagtcagccgtgatgtcagcaaaggggttcgcgcggaaatcataatgatctcccagctcaacgcacggactgcaggcaatgccgcggccccggagcatggcgaagaatctgcccggaacggcaatgccggcggcggccgcgaaggattttccttcaaacctctccgcgaggtcatcaatcgggagcgtttcaccggtcgcgagattgcggcattcaccgagatacgggctggaggcaaaacgcggggttctcgtgtcgagaatctcatccgttgtattcagaataatcgcatccacacggtcaagccttgacggcggctcacggaggggaccggcggggagcacccagccgtttccgataccgtgggctcccaccacgcagagttcaacatcgcggtgcagcgagtagtgctgcagaccgtcatcggaaatgatgatgtcagtgtccgggaaagacttgagaagcagccgccccgccgcgactcggtcgcggtcgacagccacaggcgcggcggtcttgcgggcaatcagaagcggttcgtcgccggacgaggctgcgcgcgagtcaggtgtcacgagctgcacagcgtcggatttccttccatagccgcggctgatgatgccaggcttccagccgcgcttcatgagaccgcgggcaatggcaatcgtgaccggagtcttccccgtgccgccgacatagatgttcccgacaatgaccacgggaaccggcagacgctcgggcgttgcgtgcttctcacggtaccgtgagacagcgagaaacgcgagagaaagcggggagaaaaccagagaaaaaagaccttttttcgaccactggccatgcagccagttttccagcgttgcgcgggcgcgcgaagccggtttcatttcaggtttgggagactgctgtgagttacctgatcggggacgatctgaatccattgccgttctggaagaaagaatatgcggcgcctcgagcggagatgccgggggaggttcgcaggtgtgattagtcatgcatgcaatgataatggatcggggattgacgtgcgaaggcgggatcccggtatccggtgaaatctgtggacaactccggggaaaaataagtaaccctctgattgattgcgggaaaaacggcctgtggataatctgaactttttaaaattataaattaaatcaatcagatccgtgtttattaccggagtcatgtcagagggtcggaataattttccccgtcagtgaccggtatcgggcaagaagccggaagcccgtggataccgcggtttcactcctatctctatgaaaaatagccatttttggtgatgccagcctggagcttgtccaaaaacagcggttatatcggtaaaagtagaatttaatcaatcacttgatatctttatcacgggtctggtgaacagcgatgttgactgccccgggaaaactcatacaactatatgaaaaaaaaggataaaaatttattgattaaaaattaatcagactgaagatccccggaaacaggggatccggcaaaactgttctgtctggattcaggaaagaaaagaggacttatcccccggctttgcaatccacaggggaaagcgatattccgataggcatgatgaatgctgttatcagaattaaaaacagagaaaaaacaaaaaaataagcagccttttatcagtaaagtatcaaatgatgatctttgacttcataaatgggaactggaaaagcctgtggataagtgtgtgaacaattgtggagaaatcccctaagtggctgaagaaccgtcacttttcgaaatcatggaattccactgaaataaaaatttaatcttttaaaatcatattgttataggttatactcggggttcccgggaagccctcggggatcgcgggggttgacaaaaccggaaaagcgtaaaactgtgcagaaaccgaggaggggaaaatccgggaccgtgagatccgcttcggccttttttaaaaccggcttatcatcactctcacagtggactgcagagaacagaaagaggacggatatccaatgaaggatgatttcgacacgtattcgcttttcggcggagacgccgcgggcggggctactccccgggaacccgcgaagcgctccagcctgagagccgcgcggcccgcatccacccgttcccgctaccgctcggatgtgctgtcaggggacgcgtacggattccgggccccggaacctgtacgggaaacccgtgccgcggtgatttccgtgtccgatatctgccgcggcattcagaattcgctcagggcagcctttcctcccgcctgggttgagggggagatcgcgagcttcatggtggcttcaagcggtcactgctactttgatctgaaggaccgcgaggcacagatttcctgcgtcatgtaccggtcccagtaccagtcggtcgggtttgagccgaaggttggtgacaagatcgaggtctacgcggaaccctctctatatatgaagagaggacggctgcagctgacagtgaaccggatccggaagtctggtcttggggcgctgtacgaagagtttctgcgcctgaaggcgaagcttgagtgcgagggactgttcagcctggagctgaaacgcccggtgccgtctgtcccgcggacagcggcaatcgtgaccagtctgaaagctgcgggactgcgtgatgtcatccagaccttcgaaaagcgcgcgccctacgtggcgcttgaaatctatcccgcgtcagtccagggacccggagccgcggccgagatcgcggaagcgctccggcgggcaggggaatccgaaaaagcagaagtgattctgcttgtccgcggcggcgggtcttttgaagatctcgcctgcttcaatgatgagcgggtggcgagagccatcagaatgtctccgattcccgttatcaccggaatcgggcacgagtctgatacgacaatcgcggatctcgcggctgatctgagagccgctacgccgaccgcggccgcggagcatgcggcagctgcggagtctgatctgatgcagcggctcggaagtctcgttaaccgtctgaagcgggccgaagagggcgtgatgcgggaagcctcgcagcggctcgatatggcggaaacgcggctgggtacaccggaagagctccttcgcggcggccgggccgcgctgcagcttgcggaagaaaaaatcagaaaatcgccgctgcttcttattcagggcggccgttcgaagctttccgaagcgatccccaggcttcgccgtcggctcgagacggttttcggccgggcagagcttcagccaattgtcatgcgtaatttccttgaagatcggctgaagaagtcgcttcaggaggaaacaaagcgtctccggaattcggaatcggtgattgtctctcaccgaccgaagcttgacgccgaggggcgaaggctggatgccgcggcgtccggcctgaggggcgggctttcagagaaactgaagcaggcggaggaaaccctcacgagggcgacgcttttcttttccggggccgatcctggggtaagccgtgaaagcgcgaggctcgggcttctcgctcagcgtctcgcgaccgcgaaaccggcattcagagagtcggggaaagatctgctgaccctgcggacgagactcgccgcggtggcagcctcagggctggatgaacgccggaccgcgcttcggtttgaagaatccaaaatgaagtctctcgaagtgagccgcgtgctggagagaggattcgcgctgctttaccgtgacgcggggattgtccggagcgtgaagtcgctgagaaagggggagtcggtgaccgcggtgctgcccgacggtgaggcgtccctcactgtttctgaggtccgtccgaagcagtcctgaggtcaggggatcagggacggcgggtcacgctgagcgtgtcaccgggggaaattccccgggccctgaaccaaccgtcattcatttcaagcgcgtagcgcgcggggttcagcgcgcagtgaatttccgtggaccagggcgtcatcgaggcaatcgaaatcaggcggaaattgtcgtcaaagaatgcgacagagagcggaagcggggtgtttttcatccacatgcaccaggagccgcttttcggaaagacaaacaacatgccccgattctcaggcatcgcctgaacccccatcagtccgtgctgcagctcttccgctgtctctgcgactgagaccgacgcgctgtggccgcggatctcaatcgacgcggtgccagaggcgccagccgcggcggctgtgactgcgaaaacagcgggggcaaaaatccggagcagttttttcatggcaataaaaaacccgctgttcccccacagggaggaaacaacggggtttcggcgtgaagcagttattactcagccgacatgatgttcgcggcctgcttgcccttcgggccatcgaccacgtcaaacgtcacgcgctgcccttctttcagggacttgaagccgtccatcttaatcgcagagaaatgagcgaagaggtcttctcccttttcatccggggtaatgaagccgtaacccttggcgtcattgaaccacttcacaataccggtagccatttgtaaatctccatctgatacagattctgcctgatgagccacaatagagggcctgataggacaggcagaagaaccaccctgcggaaaagcccgaaggggtcgagcagcgagcgtgatacaagttctgctcgatcaagcttaccgcacacttcagacaatacgccatattcctaaaacttgcatacctcacaagggatttaactgataaaaaggtgggtttcgtcaataaaaatatgcgttttcactcagacccgtgatgagaagcctcactgctctccgtttttttttgcaaaatggaattactt

SEQ ID NO: 1338 - DNA, 32957 bp, Unknown
  gut microbiota DNA sequence
aaaattgaaagatgcagcggtacgtgccttgcggtgaaggaacacagagcctgtgctcttcctccgatgtggcgtgttgtgctgctgaatgatgactacacgacgatggacttcgtagtcttcgtgcttcgcaagctttttggcaaaacgtgcgaagaagcggaaaagctcatgcttgaggtccaccagaccggccgcggcattgcaggcgtctatgtaaaagatgtggcggaaagtctggcggcgagagcgatgcatctcgcgaaggacaatggcttccctttccggtgcttggttgaacggcaggaataatcatgatcgacagacagctggaaaagaactttcagaacacattcgtcacggcgacaacggtccgcagtcagctgattacggtcgaggcgctgctgctcgaactgctctcgaatgaccgtgtcagccgcgtccttgcctactttggctgctccaagtcgcagctgaagaggaatctcgaggaatttatcgatacgaaggtgccgaagctcgcgacactgaaagaggatccgcagccgtctgtcgggttccagcgtgtgatcgagcgggccctggtgcacgtgcagcagtccggccgcaaggatcaggatctgcatggggaagatgtgctcgtctcgatttttgatgagcctgacagctgggctgtcgcttatctcaccgagcagggactcgataagctgagtcttgtcgaatacctcacggatcttcatcgggacgactatcaggagtctttcgccgaacccgcgggtcccgccggagacgagggacctgaagccggcaccgcaggtgccgctattcttgatgcctttacggtgaatctgaatgagaaggccaaagaggggaagcttgatcctctgatcgggcgcgaggaagagatgacccgcgtgatccaggtgctctgccgccgcagaaagaataatccgctgctggtcggtgagccgggggtcggcaagaccgcgatcgcggaaggtgtcgcaagccgcattgtttccgggaaagtgcctgatattctgaagaagcgggtcatccgttcgctttccatggggaggctcgtggccggcacgaagtatcgcggcgactttgaggaccgcatgaagcggctcgtggacgccgtgaaggaaagcccggaaacggtgctcttcattgacgaaatccacacggtgatcggcgcgggttccacctcgggcggccagacgctcgatgccgcggatcttctgaaacccgccctcgcgaacggtgagctttcctgcatcggcgcaacgacctatgaggaattccgccgcattttcgagaaggaccgcgcgcttgcccgccgtttccagaagattgacgttccggcgccgaccgcggatgaatcagttcagatcctgaaggggcttcgcgcgaagtttgaggagcatcacggcctcaagtacaccgataaggcgattgaggccgcggtaacgctttctgagcgctatatgagtgataagaggctgcctgataaggcgatcgatgtgatcgatgaggcgggtgccgcgcagcggctcctgccggccgaatcccgaaagagcgtaatcgacgagcgggagattgaggaaaccatcgcgaagatgacgaagatcccggtggcgacgctctctcagggcgacgaagagaagctgtatcacctgccggaagacctgaagaagcggattttcggtcaggacgaagcggtggacgcggtagtgtctgccatccgtctctcccgtgcgggctttgacaagtcggaccgcccggtgggttccttcctcttcacgggtcccaccggtgtcggcaagactgagcttgcgaagcagctcgcggagtcgctcggcgtcagcctgatccggtttgatatgagcgaatactcggaaccccacacggtgagccgcctgatcggtgcgcctccggggtatgtcggtttctcccagggcggtcagctgacagaacaggtgacagcgcatccttactgcgtgctgctgctggatgaaatcgagaaggcacacccggatattctgaacgtgcttctgcaggtgatggataacggcacactgacggataacagcggccgcaaggcggatttccggaacgtgattctcatcatgacgtcgaatgccggcgcccggatgatctcgcgtaacgtgatcggtttcggtgaggcgaaatctgagggagatgacaccgcggagatcaagaagtatttctcgcctgaattccggaaccgtcttgacgcgattatccgcttcaagccgcttgcccacgccctgattctcaagatcacggataagttcctgaagaacgtggctgaaagcctcaggaagcggaatgtggagccggtcttcacgtcgactctgcggaattacctcgccgagcatggctttgatcctcagatgggagcccgtccaatgcgccgcctgattcaggacattgtggagcggccgctcgctgaggcagtgctcttcgggccgctgaaaaacggcggcaaggtgacggtcggcttcaaccgcggaaaggttcagctgaagttccccggaagcgaagcccaggggccgaagaagcaggaagcgcttcccgcctgattctgtttcagacgccggacagaaagacgccctcagaggagagaactccctgagggcgtttctgttgccggcggaaccgctgtcttatcgggtgccggtagaaccgaagccgttcgtaccgcggtccgtttcgccgaattcatccacgagttcaaactcaggctgggcaaccgggacaatcacaagctgcgcgatgcggtcaaagggattgatcgtgaaagcgtcccgcccccggttccagacggagatcatgagttcgccctggtaatcagagtcaatgagaccgacgagattgccgagcacgatgccgtgcttatggccgagccccgagcggggaagaatgagagcggcgtagccgggatccgcgatgtgcaccgcgagccccgtgtggacgagggtggtttcaccgggattcacggtgaggggggaatcaagaagcgccttcaggtcgactccggcagagcccgccgttgcggttttcggaagatgttctttcgcccgggggtcgagcactttgagagcaatacgaagcatgtttactttttacggccgttcgccgcgaggttgaaggtgaaaagagtgaggatgatgccgaccacggtgagccacggtgtctcaagaatgatgccgagcacaatgagaccgaagctcacgaaggaaatgagccccgaaaaagcccgcgccgcgttgcgggcgttcgcttcacgcgcgcggcgcctgagacgctcggacggtgtttctcctgcggggccagggtccattgtggacggcgcggaggacggtggctccggaatcggagaggggaccggaatgccgattttcgcgagctccgccatcacggactgttcccgctcctcggcagcctcagctgtcgactccggggttccgggaggaacaggatttgtcgcggcaggcgaactcgctgcggtcttcagaggatcgagatttctgattttccctgcctgcagcttctcaatataggcaacatagtcgccgtcagctggttcaagcccgaaaggatctttcatctttttccccctgcagaatgcggatatgatccgtacccattcatcctacaacactaggcaaggagagaggcgaggcggtcaagaatagcctctgccacacgggatttcgggccggggccaagcggttcggctccggattccgttacgaaaaccgcgtcgttatcctccgacccgagcgcatgggcagcgtcattcgcgatgatgagatcagccgctttcgcccggagtttcttactggcgtaggaaatgatgttctcggtttccgccgcaaaaccgatcaccacggccgggcgtccggcactgagatgaccaacttcggaaagaatgtctggattctctgtgaggctaagggtgacggcttttccgtcctttttgatcttctgatccgagacgtgctcgggacgccagtcagagacggcagccacactgatgaaggcgtccgcgcccgaggtgcgcttcagaacctcatcccgcatggcggaggccgagtcaacagaaatccgggtgacaccgaagggaaccggaagggaaacaggtcctgagatcagcgtaaccgcggcgccgcgcagcgccgcttcgcgcgcgatggcgtagccctggcggccgctggatcggtttgtgatgccccgcaccgggtcaatagcctcgtaggtgggacccgcggtaatcagaatgcggcgtcccgcaagcggtttcctgtgaagaaagagttcggtccgcgacgcgatctcctcaggctccagcatccggccggtacccgtgtcaccgcaggcaaggcttccggcggccggcccccagacttcgatcccatcctgcttcagcgtttcgatattccgggtattcgccggattctcccacatgcgggtgttcatcgcgggggcaaaggcaatcggagcgcggcgtgcgcagatgagtgtcgagacagcgttatccgcgatgccgcatgcggccttcgcgatcgtatttgctgtggcgggggcgacaataatgaggtcagcgccgtcagaaagacggatatgaggcataacgcctgagcgggtatcccattcgctggtgacgacaggatgcccggacagcgcttcaaaggtgagcggcgtcacaaatttcgccgcgttttccgtcatgacgacacggacgtcggctccccgcttcatgaggagccgcacgagttcgcagctcttatagaccgcgatgccgcccgtcgcggcgaggagaatggttttacccttgagggtcagttcctgctgcaatccttttcccccttgcggacgcggcttgccgcgtcacttgttgcgttcaacggtgtagttgatgatgagttcaagcgcgtcgcggtagcggcttgccggaatggccttcagcgcttcaatgccgcgggccgcttcctcacgggttgtctcacgggccgcttcaagcgctccggtgtcgcgtacgatcgcgctgatgcggtcaaagtcaccgtgtcccttgcggatagcttcttcgatcagggcccggtccgagtcagaggcacgctgcatcgcgtagatcagcgggagcgtgaccttgccttcctcgaggtccgcgccgaggttcttgccggttgtagcggcgtcgcccgcatagtcaaggatgtcatccacaatctggaaggcatagccgagacgcagcgcgtagtcgcagagcgccttttcctgttcttcgggcggattcgcgatcgagcaggcgatctgagccgcgcacttgaagaggcaggcggtcttccgttcgatcacttcgtagtagcgctccttcgagagcgaaggatcatgcgcgttatccatctgaagcacttcgccttcagaaagacggttcgcggccgcagcgatttcagccatggcacgcagattccctgtgctcaccatcatctggaaggcgcgcgtgtaaaggaagtcgccgaccagaaccgcggtggggttatcccacttctcatttgccgtcggacggccgcggcgcatcggggaatcatccaccacgtcgtcatgcatcagcgtggcggtgtggaggatttcaataacggcgccgaggaacacgtcctgatcgcccttgtaaccgagcgctttcgaaatgagcagcacgagcgccgggcgcatccgcttgccgccggagctcgtaatgtagtcagccacttcggcaacacggtggatgccgctgccgagtgacgtgtggatcatggcgtccacgcgtttcatatcgtcggcaatggggttcatggcggcctttacgccggccttggcgatgaggttcttcagcatgatgcaactcattatacggagtcagaaagaattttcggcgctctgacgcatgaaaaaacctccggaaccgtgaagctccggagggctgtgaatgcccggctgtaaaaagcgcctgagacctacttctttctcagctcaatcaggatgaaaaagatgacgcccagcacgatggctgagtccgcgatgttaaaggccggccagtggatatcaccgatatgaaggtcgatgaagtccgtgacagaaccgagcatcaggcggtcgatcagattgccgatcgcgccgccgagcacgagcgccgcggcggccggagcgagcttttcagccgaatgcttccagatgaccgcagccatcgcggccgagacaccgattgccacggctgagaagagcagcttctgccagccgcctgcatccgcgaggaacgagaaggcggagcctgtgttcctcaggaggacgaggttaaagaaccccgtcacctgaatccaggaagcggcaagaacatcgtttgcccaggccttggaggcctggtccgcgaggatcacgaggagggcaagcgcgaaccagaggatcgcgcctgtcctggagcgggacacagatgccatcccggatcctcaggccttcgcccgcagttcgccgttcccgaagagattcgagacacagcgcgggcagaggtcagcgtagccttcaacggagccgacatcagactcgtagtgccagcagcgggcgcacttctcaccggcggtcttgtgggcggtgcagacagtggcttcgccgtcagcgcccttcacgagggtggcggcgctcgtcacggtgacaaacttcagctcatcacccagagaggcaagcgcgtcgtacgtgtcgccggaggcgcggatttcgacttcagcctggagcgaagaaccgacttctccctgagagcggatgtcttccaccgccttctgagcgatgctgcgggcttcgcggatcagagcccagcgcttgaggagatcctcggcgccgtcgatctcggggagcttgtgatgcgtttccgtgaagatcgtgccgtccttattcgggctgaagaccgcaaaggcttcttcggccgtgaaggtcagaaccggggccatcaggcggagataggtcgccgtgatgtgccagagcgcggtctgggccgaacggcgcggcaggctgtcagccttcgtcgtgtacagacggtccttcaggatgtcgaggtagaagctgccgagatcctcggaggcgaaagcgtgcagctgcgagacgagcgtatggaagtcatacttgtcaccgagcttgatcacttcagcctggagctcagccgtgcgggcaatggcccagcggtcgatatccagcatgtctttcacgtcaacggcatccttctcaatcgagaagtcgctcgtattcgcgagcaggaagcggagtgtgttgcggatacggcggtaagagtcaacaacacccttcagaatggtctgaccgaggcgcatttcacccgtgtagtcggtcgaagccacccagagacggaggatttcggcaccgtacttgtcggagatttcctgcgggcggacgatgttgcccttcgatttcgacattttttcgccgttctcatccacggtgaagccgtgcgtgaggagggcgttatacggcggacggccgtcaatcatcgaagcggtgagcagcgagctgtggaaccagccgcggtgctgatcggagccttcgaggtagaggtcagccgggaagccgagatcatctttatggctgccgcgcatcacggtgtagtgcgtggtgccggagtcaaaccacacgtcgagtgtgttgttcgtcttctcgtaaagcttggcctcttcttcaggcataaagtcagacgccttggcggtggtccagacttcgatgccgcccttctcaactttcttcgcgacttcttccatgatttcaagagtgcgcggatgcagttcaccggtgtccttcttcaggaagaagggcatcggaacaccccagatgcgctgacgcgagaggcaccagtcggggcggttagcaatcatcgcgtggagccggttgtagccccagggcggatagaaggtcgttgcgtcaacgccgcggagcgcgacatcgcggagcggttcgggttccgcggcgccttcaggctgcagcacgccgcgcgtgtcgctgttcgctttatccatgcgcacaaaccactgggtggtcgcgcggtagatcagcggcgtcttgtggcgccagcagtgcatgtagctgtgggtgatggagctttcgttcagaaggttgccggcgagacgcagcgtgtcgagaatcttgcggttcgccttccagatattcatgccgccgaagagcgggaggctctcagcgtacgtgccgtcgccctgcaccgggttcaggatttcgtcattcgtcatcccgtagcgcttgcaggagttaaagtcgtcgacaccgtaagccggggcggagtgaacgatgccggtaccggcagaggcgtcaacatagtccgcgaggagcacgggagagaagcggctgtagcccttatccatctcagcaagcggatggcggaaacggatgccttcgagcgccgagcccttcaccgtggcgagcggcgtgcccgtcatgccgtaacgctccagagcggaggcggcaagcgtctcgccaagaatcaggaggcggctgccggtatcgatcagctgatagctgagttcggggtgaacgttcagggcctggttcgcgggaatggtccacggggtcgtggtccagatcacgatcgcgcagggcttcgtgatggcgacaccgaaagccttctcagctttggcgtggtcctcatcagaaagcgggaaggcaacgtcaagagtcggccccttgatgtccttatattccacttcagcctcagcgagcgcgctctggcagtcgaagcaccagttcacgggcttcaggccgcggtacacgtagcccttcttcatgatttccgcgagagcgcggatttcgctcgcttccgtgtcgtgacggagcgtgagataaggattgccccagtcggcgagaacgccgaggcgcttgaagtccttcatctgacgcttcacctgctcgtgcgcgtaggcgcggcacttggcctgacgttcttcaggcggcaggttcttgccgtactgcttctcgatctgaatttcgatcggcatgccgtggcagtcccagcccggaacgtacggcacgtcgtagccttcgatcagcttcgtcttgttgatgatgtccttcaggatcttgttcaccgcgtggccaaggtgaatgtccccgttcgcatacggggggccgtcatgcagcaggaacttcttcgcgccctgacgggcacggcgcacgacgtggtaaatgtccttcctctcccactcgtcgatccaggccggctcacgcttggcgaggccgccgcgcatcgggaacggcgtgtctggaaggttgagaggatacttcttggtgtcttcagttgttttggccatattgctttaatctccggccccctcgggctcttcggatggattaagttttggttgtattaagaatttcgcggtcgcttcaacctttaagcgacaggggctcccccggcttcaatagaaagcccgaagatgcggcgcgcgcggatcgcgtcgttatggatcgcggcaatgagttcatcaaggtcggaaaagcgtttgttgtcccgaagtttttcaacgaaccgcacgcggatcagcttcccataggcgtcgcctgtccagtcgagaaggttcgtttcacaggtgaactgcaggttgccgccgattgaagggcggttgccgaggctcgtgacaccgggcagctcttttccggggacgatgccggaaaccatcacggcaaagacgccggtgagagcgggctgagcgtggcatcccggaggcaccgggcggaggttgagtgtcggaaatcccagcgtgtgaccgagatgctcaccgtgcacaacgcggcctgacatgcagtacgggcggccgagcagccgctcggcttctttcaggtcgccagcagcgagcgcggcgcgcagccgggtggacgagatattctcgttatccttcacgatcagatctttggcggaaacttcaatgccatacttcgcgccgatgcgcacaaggtcatcagggcccgcttttccgtcctgaccgaaggtgaaattactcccaaccgtgacaaaggaggcgtgaagccggtcaacgagaatttctttcacaaactgctcggcgctgagacttgccatgcggcctgagaagtgggcgaagaaaagtttctcgataccgcaggatgcgatggcgtccgccttgtccctcagcgtggaaatacggcacggggctttctcaggcgcgaagaactccttcgagtgcggttcaaaggtgagcgcacaggggatttcgccgtgggaagcagcgtggctgcagaggcttctgagaagcgcctggtgtccgaggtggacgccgtcgaaatttccgatcgcgacagcggcacggacttcaccaggcagataagggatgccgcggtagacctgcatgagagtgaattaagaaaatcggggtaacagagaaaatccattataagaataaggatgctcagttgggggatggcgggacttaccatagggggagtcgtgacttttcaggcctcttgttctgtaaaatagcgggattatgaaaaatatcgtcatcctgatttccggacgcggctcgaacttcgaggctattctcgaagcctcccgcgccgaacagtgggagagcgcggttcctgcccggatcgccgccgtgatctctaaccgtccgctcgcgaaaggtcttgaaacggcccgacgcgagggaatcgacgcgattgctgtggatcacacgctctaccccgaccgcgagtccttcgaagaggaactggggcgggtcgttgaccgctataaccccgacctcatcgtgctggcgggcttcatgcgcattctcacggaaaagttcgtgaagccgcgcgaaggccggattctcaatattcatcccgcgcttctgccgcttttcaagggactgaacacccatgaacgtgcgcttgaagcgggggtccgggtgcatggttccaccgttcactttgtgtcagcggcgcttgatggcggcgcgatcatcggccaggccgtggtgcccgtgttgccgagtgatacgcctgatactcttgccgcgcgcggtctgaagcttgagcacgtgatctacccgaaggtctgccgcgcagtccttgaggatcgcgtgaagctggtggacggaaaggctgtgatggatgacgaaaccgcccggtcgctcgctgttttctcaaacgagctctaactcttgattactcttcggacgcgcaggagccgttgtgctgccccgcgtccagatgaaggccccgtgaaagcgggtctttatttactatgccgaaaaaagaacagcggaagcgcttcagccgtcccgcttcctcctctccccgccgcccgcagcggcagtctgaaagacgggtccgcgaacaggatccgaacacgatcccttcctatctcgtgaatcacctcgcgcaggcgctgcgcatggtgctgaagctggacggtccggcggatgtcctgctctctgtctacttcaagcgtaaccacgagctcggttcccgggaccgcggctttgtcgccgaagcggtgtacgccgcgctccgtcatctcgctggcatccgctggagaatggcgcctgcggtgcctgagcggtctccgaggctcgcggctcttgtgacgctcgcgtcgctctacgggatggaagctcttgacagccgcgatgtcggaaacgaccgcaaggcgcttgaagcgattctcgataagaaggactctgacgcggatcccgcgacccgcgccgaactccccgggtggctttatgaacgcgtccgcagtcagtatccggatcacgacctctttttcaaggaaatcgcgaccggcgctccgcttgatatccgcgtgaacctcctgaaggggaagcgtgatgaggtacttgagcagctgaaggatgaagggaagaaagtcgtggcgacaccgatttctcctgatggcatccgcttccttgataaacccggcatcacgcactggccgctctatcaggacggcgtgattgatgttcaggacgaaggcagccagctgatcgcgcggctcgtcgcgccgaagcgccgtgagatggtgtgcgatttctgcgccggtgccggcggcaagacgcttgcgatcggcgctctcatgcgttccggcggcagcctctacgcttttgacgtgaatgaaaagcggctccagggcatggtgccccgtctccgccgctcggggctcacgaatgtgcatccgatcgcgatccgcgatgagcacgataagcgtctcggccgtcttctccggaagtttgaccgcgtgctgattgacgctccctgcaccggcacggggacgcttcgccggaatccggatcttcgctggcgtctttccgaggatgagctgcaccggatcaacgagattcagaagtcggtgcttgaatccgcatcccgccttgtgaaggccggcggccgtctcgtttacgcgacgtgctccgtgctgaaggaagagaatcaggctgtggtggaggcgttccttgccgcgcaccccgagttccacctgctgaacgcctctgaggtgcttgagggacagggtgtcaaggttcccgctgaagtgaaggaccgctttggcccatggtttgtgatgctgccccaggtgacgggaacggatggattcttcggcgctgtgcttgagcgcgatcctgatgctccccgccgcagaaaacccgcgccggaagccgaagcgccgtccgaagaaacggaaagcgtgaaggctgaggtgacagaaacggccgcgccggtttcagaagaacagaaagccgaataaatcggagggagggagagcgctcctggggcgcttaccttccactgataaaaaagaagagccggcaggaaattcctgccggctcttcttttaagtctttcaggcaataaaaaagctgaatccgaagattcagcttcataaaggaatgaacctcaattacttgagcttcgtttccttgtaaaccacatgcttacgggctaccggatcatacttgttgaattccagtttgccagtcgtcgtgcgcttgttcttggtggtcgtgtagaagtgacccgtaccagcagtcgactccagcttgatcttttcgcgagctccctttgccatggtgaacctcctaattaaatttcaccgcgggcgcggagatccgctaaaaccgcatcaataccaaccttgtcaaccatacgcagacctgctgtcgtcaaacgcaggcggacccaacggttctcgctctcgacccaaaaacggcggtactgcaggttgggcatgaagcgacgcttagttttgttgttcgcgtgcgagacggtatggccgaccatcggcgccttgccggtgacttgacacactcgtgccatcgctatctccagttaaaattatcaaaaaacgccgggtgctgacgtaacagggcatctcgcacgcactggcgctgtgaaaacaattattctacgtcaaaaatttagttttcgccaatcaaaaggaaaaaattacaaatacttctcgctcttcacctgaaaatgaaggcttgcagtgttttccaaaaaggcgaaaatttttggcgcagtcgtgcattatacgtaagtcgcggaaatctgtgttggaaaccgtcccgcttttttttctgataccgcctggaggccagcttgtccgaaccgaataccaagagaacccctctgaaaatctatctcgcccagccccgcgggttctgcgcgggcgtcgatcgggccatcgcgattgttgagcgggcgctgctcgtttacggccgcccgatctatgtgcgtcatgagattgtccataaccggaccgtggtggaaaacctgaggagccgcggagcgatctttattgatgatctctctgaggtgccggacggggcgacgcttgtcttctcggcgcacggtgtcccgaaatcggtggaagaggaggccgcgagacgcggtttccgtgtgttcgatgccacgtgtccccttgtcaccaaggtgcatcgcgaggtcgcgcggatgcgggatgccggctatacggtcgtgatgatagggcataagggtcaccctgaagttgaagggaccgtggggcaggttgaggatggcattctcgttgtggaagatgaggcggacgttgaggcgcttcaggtaccggatcctgaaaaagtggcctacgtgacccagaccacgctttcgcttgatgactctcagcatctcgcggagacgctgaagaagcgcttcccgcacatcgtccagccgaagaaagcggatatctgctacgccacgcagaaccgccaggatgccgtgaaagagctcgcgcagcacgtggatatcgtgcttgtgatcggaagctccacgagttccaactcaaaccgcctcagagaagtggcggaacgctatcacgtgccggcgtacctcgttgatacagcggaagacgtggatccggcctggctcagcggccgtcaccgcgtcggcgtgacagccggagcgtcggccccggagccgctcgtcgcggaactcgttgaacggctgaagggactcgccgaaacggaaatcgtgccgctcgaaggcgtcaaggaaaatatggcgttcccgctcccgaaggggctctggcagaaggatgtggacgcggcgctcgctgcgaagggccgcaccgaatgacggaggcggtgtatcaggagaaaatcctgtggcgccgcgcggtgtttgtgatccggtccgatgcggcgggcggtctcctttcaatcagcgctctccgaagggaagcggctgatgacattgagagcgctcttccgccgcggggaagccggggggcagaggcagcggaagctcttcggatctacctggacgagccagagactctggcgcccgaaaaatggttttcggaacccgtgattctttcgcttcccgaggccgttcaggaagtgctccgcgcagtttcccggattcccttcagtgagaccgcggcggcaggagatctggggttttcgccggtagccgtcatggatgctgtggcgcttaacccgctttttccgctgattcccacttaccggattgaagatgtcgccttagaggcgggaccgcgccataatgacggactctggatctgcggggatcttcgggaacttgagaaatcgccccctgtccgctggtggtactagcggggaaggcgctttgggttcccgccccggcctgaaataacacgcaagcaggaaggaaaagatggcaaaagagaagcatgtgagcgcgacgcccgcaaccgactggcttaaggcgcacaaagtcaatttcaagctccatacgtatgacttcgttccgcacggcggtacaacccagggtgccaaggaactgggaatcgataatcacgtgatgatcaagacgctcatcatggaggacgaaaacgccgagccgctcgtgattctgatgcatggcgactgcgaggtttccacgaagaatctcgcccgtcaggtgggaagaaaacatattgctccatgcacgccagaacaggcacagagaaattcgggctattttgtcgggggcacgagccccttcggaacccgaaagagaatgccgatctatgtccagagaacggtgtctgaacttccggtaatttatatcaatggcggccggcgcggcgtcgtggctgagatggcgggcagcgttctggtggatgtgctgggcgcgacgcccgtggatgtggcgaatccgaaagatgaataatccttcagaagaagggataaaaaagggaaggctctttgccttccctttttcttacgcgtaacagccaatcaggcggtctgatcaggatgagcggcttcagtcaatgtccaccgaggtttggcggagaatgaccagcgttttctgcatgcgtcgagttcttcaggtgtcatcgcctggagccgcttaaggcccgcaatagcgatcatggcgccgttatccgtgcagagcgagaggggcgggaagaagatcttcccgtgacgcttttccacttcctgagtcaggcgggcgcgaagctgtttattggcgctcacgccgccggcgacgacgagagagttgagccgggtctttttcagcgcgcgaacggccttggcggcaagcacgtcggtgacggcatccacaaatgcgcgggccacgttggcgcggaactgaggatcctcagggttcggagcctttgtgacagcattcagcacagcggtcttaagaccggagaaactcatattgagatccggtgaatgcatcatggggcgaggaagctcgatcgctcctgacacgcctttttcagcaagagcggagactccgggaccgcccgggtagcacatgccgagaagctgagcggttttatcaaacgcttcgccggcagcgtcatccagcgtttcaccaaggagctcgtagcttccgaacttctgcacacgcatgaattgtgtatggccgcccgacaccagcagagcgacaaaggggaaacggggagcgggatccgcgaggagcgaggcgaggaggtgcccttcgagatgatggacaccgatcacggggatgccgagcgcgtagccgatcgcgtgagccactgagataccgacgagcagggctcccgcaagaccaggcccctcggttacggcaatagcgccgaggtcagagcgggtctttcccgcttcttccagcacttcatcagtcagtgcgagaacgcggcgaatatggtcacggctggcaagttcaggcacaacaccgccataggcgcggtgcatgtcgatctgcgtatggatgcgatgggcaagcagccccttctccgaatcgatgagggcagtgcctgtttcatcgcaggaggattcaataccaagaattagcatgacgcttattttagtgaagagttggtgagctaatttacctcagacggcaagaggccgggctgaggaacagggaaggggtgcccgcgggattccggaaggaagggaaaatcccattcactatacaaacgtttctatttatgagataatccaagacttgctgtttctattcaaacttttgtctgaattgcgaaacagtgtttttaacttttcgggaaaacacacttcccttttttaatcaaggttttactcaatgcctaccattcgcgttaaagaaaacgaaccctttgaagttgcccttcgccgcttcaagcgcaccatcgaaaagtccggcctcctcaccgagctccgtgcccgtgagttctacgagaagccgaccgctgagcgcaagcgcaagaaggctgccgccatcaagcgtcactacaagcgtctgcgcagcatgatgctgccgaagaagctgtactaattcttttttagtgatgatgacaggctcatttacatgagccgccagctgttgtttcaggtcaaataaagatgactcttagagaacagatccagtccgatatgaaagatgccatgcgtgcgcacgatgctgccaagctgagtgcaatccgcatgctttggtcctcggtgaagcagaaagaggttgatgagcgcattacggctgatgactccgtcatcaccgccatcattgcgaaggcagtgaaggagcgccacgactcgatcgagcagtaccgcaagggcggacgtgaagatctggcagccaaggagcagagtgaaatcgatgtgttcaccgcttatctcccgaagccgctctcagaagaagaaatcaatcaggtgattgatgaagctatcgcgaacgccggcgtttccggtatggccgcgatgggcaaagtgatgggcctcgtcaagcccaagcttacggggcgcgcagatatgagcaaggtctctgctgcgatccgcgcgaagctgctccagaaataacaagaagaatttggcgggccgcggttcgcggccctcaatcatccattaacgcattgagttgctccgggtaaaggaggtgtttccacccgtgagcgagaaaaaagaacgcccggagaccgttggttcatccgggcgtttcgtttttttgtaatctgtgtactgtaatcagaccttagccgaattttcaaaggatccgtgatgattcctgagtcgtttatcaaagacctcctggatcgggtggatattgtcgatgtcgtttccccgtatgtgagcctgaagaagaaggggatcaactggtttggactctgtcctttccaccatgagaaaacaggatccttttcagttaaccagaataagcagttcttcaagtgtttcggctgcggagcgcatggcaacgctgtgggctttcttatgcagtacaagggcatcacctacccggaggcaatccgggaacttgcgcagagcgttggtcttcccgtgccggaagagcgcggtgaaagaaagcgccgtgaaagaagcgagtcgctgtccgatctgatgctgaaagcgcagaacttctatattgcggagcttgcgaagtcccagattggtctctcctatctgaaagagcgtcagatcagtgaggcgacgagacagaaattcggtcttggctattcaccggataactggcaggctctcgaagcggttttcggcgagaaatacagctcaaaagcacttgaggactgcggccttgtgatcacgaaggacggccatcgctatgatcgtttccgcggccgagtgatgttcccgatccgcaatccgagagggcaggtgattggtttcggcgcccgggtgatcgggaaaggagagccgaagtatctgaacagtccggaaaccgatatcttcaagaaggggcaggaagtctacggtctttgggaaggccgggaagcgatccgcaaggctggccgcgctattgtgtgcgaaggctatatggacgtgattcagctttcgcaggctgggtttggcgaagctgtggcggcacttggcacggcaatcggcgaagcgcatatccggaagctcttcaaaattgtgccccagataatcttctcctttgatggtgatgatgccgggcgtcacgcggcaaggcgggctctagagcaggcgctccctgttattacagatactcaggaagcgagatttattctccttcctcctgaacatgaccctgacagtcttattaaggctgaagggtctgaggcgtatgagcgcgaaatccagcactcgttcccgctttccacgttctttatcgattcgctgaaagccggaaagtctatggggactcctgaaggccgatcccagtttctcgcggaggcaaaaccgctccttctctcgatgaaagaagcgccggttctgcgtcagcagctgatcggcagcatcggtcttgtcgtccggatggaacccgcggaaatctgcagcctcatcggtattccctttgccgccgcggcgaagagcgcgccggcagagcgccggaggaattttttcccggtgagaggccgcggcgtgggtaataacgggcgcccaatggcaggaggagctcttcctgttctggatctccgggatcgcatgcttcgttcgtttttcgcgtggcccagtcttttcaaagagtttcaggctgatattgaggaacatatgaccgggagccatctggccggtgatcagaagattcttgaagcctggcgcgctgcgatgggcggtgaggatcaggaggagggcggttcggtcgactctctcaccactggcactttggttcagcttctggccggaagccagtacagcgatgagtacagcaagattgcttcagaggaaatgtcggtcggaactccgaaagacgtcgcgcggcgggaaatccgcaccgcttttctgaaaatagcgcttgatgaggtgagattccggctggatgaggtggcttcagcggaagtgtttgatgctgagctttacaacggtctgcagacacgtctgaagcagctgggcactgcgctcaagcaggcggcctcggaggacgttccgatgccgggtcagggttaatactcgagatttcgagacttgtcaagtggtctgtgctatcattttgatcaactaggcccgcagaaaggcagaacgttctgcacttttgtacgggggcgcccaggagacacataccagtcggaggcgtcagtaacacattgactttccagatagatcctgtgccgcagggaaaccgatgagaggaattcggctcttgccggatcagtgtttcccattatcacagaggccagatatctggattcagggtattgatgtgactgttgcaggaatacccgccgctaaaagctgcagtgccggaatggctctcaccgcgggaacccgtgaggctgcgcttgccttgaaaaaacattggaacagaaatggcaactaacaaaaagtcgtctaaaaccactcagaaaggcaaagcggctcaggctgtgcagcctgaagtcgtctacctgattcccgaagctgaactgaaacagatgaagcctgaaggaaaagcgccggaagcggctgctgatgagtgggtgttcctcatttccgaggaagagttcaaggcggcttctgctgaagttgccggtgacgctcagccatcagaaactgagaagaaggccgctgctcccaaaaagtcaaagacaaagaccaagacgaaatccaaggctgcgaagaaatccggaaaggctgatgacgctgacggttcggatgacgatgtcgttggtgtcgacagcgatgacgagaattcggatgatgatgaggccgtgagaattgccgaagaggcgctcaccaagcagcctaagcgccgccgcggccgcggtgcttccaagctcgcccgcgaaaaggcgatgaaggaagctatcgcaaagtcctatcacgcgaaggaagaaggcgcggaagagcgtcagaccaagtggcgcgccctgatcaagcttgggcgtgaccgcgggtatctgacgtacgctgagctgaacgactatctgcctgagaccatggtggagcaggacgatatcgatcaggtggtggctaccctctctgacctgaatattcaggtctacgaccaggcaccggacgcggagtcgatgctcctgaacgataacgccgtcacggattcggatagtgatgatgaagccgatgccgccctctcttcaatggacggagaattcggccgcacgacggatccggtccgcatgtacatgcgcgaaatgggttctgtcgaactgctcacgcgtgaaggtgaaatcgctattgcccgccggattgaagacggtctcgggcatatggtgaccgctatttccacgagcccgacgaccatccgcgagattctcgcagatgccaagcgtattcgcgaaggcacgctctcgattgatgaagtcgttgacggcatcaacgatcctgagaacgagaagaagggcgacttcgctgatatcggcgcttccggtatgacggcggggcagcttgaagaactgaaggaacgcgttctgaagatttttgaccgcgtcggcaagcagtttgaagagatcaaggcgatttatgagcgtgaccgttcccgctctccggcttttattgagaagcaggaagagatccgcaaggaactctctcaggtccgattcacggctaaggctgtcgatcgcctctgcggaacgctccgtaagacgattgaacagatccgcgatattgagaaagagatcaagggactggccgttgaccgttccggcatcgacctcaatttcttcctctctgactttatgaagcatgagacggatctcaactggggcaagcgtctgctggaatccggtaagcccttcgttcccgtgttccgccgcaatcttccggcaatcgagcagctgcagcagcgtctgattgatatggaagtggaagcactgctgccgatccaggatctccgcgacatctataagcagatggcgaccggcgaggcaaaagcccggaacgcgaagaaggagatgacggaggccaaccttcgacttgtgatctcgatcgcgaagaagtacacgaaccgcggactgcagttcctcgatctgattcaggaaggcaacgtcggtctcatgaaggcggttgataaatttgagtaccgccgcggctacaagttctcgacctatgccacctggtggatccgtcaggcgatcacccgttctattgcggaccaggcacgtactatccgcatcccggtgcatatgatcgagacgatcaataagatgaaccgcatcacgcgtcaggtgcttcaggaaaccggtcaggagccggatccttcagagctcgctgaaaagatgcagattccggaggacaagatccgccggattctgaagattgcgaaagagccgatttcgatggaaactccgatcggtgatgatgaggattcgcatctcggagacttcctagaggatacggaaactgaagcgccggcggaagccgctcagaatgagaacctcgaagaagcgatcaagcaggttcttgacagcctgactccgcgtgaagcgaaggtgcttcggatgcgttttggtatcgagatgtcgagtgaccacacgctcgaagaagttggaaagcagttcgatgtgacccgcgaacggatccgccagattgaagcaaaggctctccgcaagctgcgccacccctcacgttccgataagctgaagagcttcatcgacggagaggataaaaagtagcagaccgcctactcaggcggaattccccggaaagcggggtgaaagcaggacattcatttttattctgatttgtcaatcaggatagaaacggggcggatacggtcgcagagatttcgctcttagtttatgctgtcactccctttcgacaattacagctcctgagttgtgcaggagcagaaaaatttcatttttacgctgccccgtgagccggctaagccggatctccggcgctgcggcgtgaatttccgcctccaggcggaacaaaaatgctggatgtttcaattggctacgctacaagataaaactgaagagacgaaggccgccgaacccgcggcgtctgagacgctttctgcggctgcttcggcgcctaagccgcccgtggtggtgatccggcgcagaagacggcgcattgtgaatcctgaggctgaagcggctgtacaggctgctgtggcttccgcggtgcagcctgccgaagaaacggtggaaaagcctgcggagaagccggttgagaagcctgcggtgaagcacgtccgtaagtctgaggcaaaagctgttcagaaggtctctgaagcaaaggctgagacggtttccgaggcagataccgaagaagccgcggaaaagcccgcaaagaagctcaaggcagcggcaaagacagctgccgcgaagactgccaagacgacgggtgccaagcgccccggccgtccgaagaaggccgttgctaaagtctctgacgatgattctgactccgaggatggaatccttgatccggaaagcctgatggagggagatgacgactcctccgcagaggacctgtcggatgaggacatcgatctcgaggaagttgagagaagcgccaagaagagctcccgggaagccccgtctgaggaaatgacgaaggggtacaaggcgctcgtgaagcttggccgccagagaggctggatttccgttgaggacatcaacgatctgctgcctgagagcgctgtgtcgactgaagagcaggtttcggatatttccgagcagattgccattctgggtattcaggtgttcgagcaggccccggacagcgatgacatcattctcgcctccgtgacctctgacagccgtgacgacatcgatgaagacgatgccgctgaaatgctgtcgcctgaggagagcgcaggtctttcccgtgatcccctccgcgcctatctgcgcggtgtcggtacgcataagctgctgacccgtgaagaagaaatcgaagtcgcgaagcagattgagtcctacacgcagaaactcgtgtcggtgctcgctggcttccccttcgtgatggacaacctgctcaagatccgtgatcagctgcagtccggtgagctgacaatcgataacgtcgctgatggcttcaatgagccggaaggcgcggaagaggttgcagaaggcgatgcctctaacggcgatatcggagctgccggcatgacgaccgaacagctttccgatatgaaggaccgtgtggtgtcgatcatcaccgagtgcgaggagcactacaagctcgtgaaggagtatttcccggatcccgagcagcacgccgcctataaccgtgagcgccgcgctgtggtgaagggactctcccagatccgcttctccggcaagattgtgtcttctctttccgatcaggtgactgagcatgtgtccggagtgaataaactgctctcccggatgcgtgcccttgcggttgatgactgtggcattccgatcgataagttcctgaaggactttgatcaccgtgcgacggatcctgactggttcccgtccatcgtgcgtcagggcgcttcttattcaaagcgtgttgagcgccaggaagcggtgctgatggctatgcaggaagagcttcggaatgaagaaaaggcctcctgcatcaccatttccgagcagcgtgagcttgccaagtccgtgaagatcgctcagagcaacctgtcggcggcgaagagcaagatgatcgaagcgaacctccgactcgtgatttcgatcgccaaatcctatgtgaaccgcggtcttgccatgactgaccttattcaggaaggcaatctcggtctcatgaaggcggtcgataagtttgaatatcgccgcggttacaagttctccacctatgcaacctggtgggtgaagcagtcggttacgcgcgctgtggcggattatggcgcgacgatccgagtcccggttcatatgaccgagtcttataacaagcttcgccgaatcaagcagcgttatctgcagacacatgacggcaaggcaccgagcgattctgaacttgcaaagctcggcgatatgccgctctccaaggttcatctgctgatgaacgcgatgcgcggtgtcgaatctatcgacgcgccgatcggcgatgacgatgatgcgacgaaactcgatttcgtccggggtgaggatgatgcggatccgcagcgccgctatatggagaccgcgatgagcgatgaaatcgttcgctctctcgacgatctcgcggcccgcgaagcctctgttatccgtctccgttacggtatcggatctaaccgcgatcacacgcttgaagaagtcggcaaggccctcggtcttacccgtgagcgtgtccgtcagattgaatctgcggccctcagaaagctgcgcagcaatgccgcgaaggcgcgcctgaaggactacaaggacttcgaggaataagcgcaccgccgcttgattttctgtacaatagctttctttgtgatctccccggcccatcagggttcgcgggagaccatcgggccagtagctcagttggttagagcaggggactcataatcccttggtcgttggttcaagtccaacctggcctaccatcgtcacgttttttgcatcgggaagcctcagcgcaggcttctaattttgtcagtgaatgttccggttccgatgcagcgaagattcccactccatactcgcgaggcagtaccgttcttttgactatgacagaatcgcaggatttttcatctttccagcttgatccccggatccttgatgctatcaaggcaatgggctatgtgagcccgaccccgattcaggcgaaggccattcctctcgtgcttgccggacgggacgtcatgggcgccgctcagacgggtacgggaaagactgcgggctacggcctgccgatgctgcagcggattctcccgaaagcgaatacgagcgcgtctcctgcgcgacaccccgtccgggccctgattcttgccccgacccgcgaactcgcggatcaggtgaatgaaaatctcgttgcttatgcggcgaagactggactccgggtcggcgtggtgtatggcggtgttgatatccgcccgcagagcgatatgcttcgccgcggcattgaggtgctgactgctactccgggacgtctgcttgatcacatcgagcagaaggctgtgaatctctcccaggttgagatcgttgtgctcgatgaagccgaccgtatgctcgatatgggattcctgccggatatttcccggatcctcaacctgattccgaaatcggttcagagcctcatgttctcggcgacgttctcgcctgaaatcaagaaactcgcgagccagttcctgaaggacccgcagctggttgaagttgcccgccagaacgccacggcggatacgatcacgcaggaactctacgaagtgaagggtgagagcaaggttcaggccctgactgagctccttcgccatcatggtgacgataacggtccgatgcgccaggtgctggtttttgtgaatgccaagctgacctgccgccgtcttacccgtcttctcgtcaatgccgggattccggctgactccattcacggtgataagactcaggatgaacgcctgaaggcacttgaaaatttcaagaacggcacgacgcatgtgcttgtcgctaccgatgtggcggcccgcggacttgatatcgccgagctccccttcgtgattaactttgatgtgccgttcgcggcggaagactatgtgcatcgtattggccgtacgggccgagccggtgccaagggtctcgcgatttctctcgcttcgggcgagaacgacgagaagcttgttgaggcgattgagaagctgacaaagcagaagtttgcgagaaagcctcttgagctgacccgcgaggatcgccgccgttcgacctctgaccgcggtcagaggcgtggtcacgagacgcatgcgtatcgctatactccgcctcccgcgcctcaggatccgctttttgatcatccctatattgaaaagactggcgctgtgtcttcatccccgaaaaaagaagagacgcagcatgcggcccgggcgcttaccggatatcggaatccttcgtcccgccgcccggtctgcgcacttctcgggggcggcttccgaaagaagcggaatccgaatccgtaatctgtcagagaggattcaggattattgcaattaatcctggatccgctaaaattaaagtgtcattacgagttgcggtttaaatacaccgcacgccaacctgcctacccgggtaaggtggtggctctcagagcattgagagaatgaggtctcctcgagcggaggcaatagagcgggaaagacaagagctcctcacgtaatgcatgaggagctttttttatgcagcaacctggatgcgcggctcgaggcatccagggcgccgggtgatctcccgggccatcaggaagatggcggatagatcgggttggatttgttccatattgccggacccggcatggtgccaaaaccggataaaaaggagccaaaaatggcaaaccgtcttacgatcaaaggtcaggtcacgatcccgaaggaagtccgggattttcttcatctcaccaacggcgattccgctgtcgaattcgttatttctcctgacggctcggtgagtctccggaaagcagaaaccgaggtctcagcgccgtccacagaccgttcccgctctaagagcggccggcgtgtcggcgtcgatgtgcttagtcttttgtcaggagtctgcatctgagcggtgcagtcgctggctaaaaaataattgcctgattttatgtaacttttaaattctttctctaaggttttgctgggttaaacactgatgtcggtcaaactacgtacgtgtttgatcgacggataatacccaacataactggaaaactacttcttttgaaggtagccaataaaaaggagaaagaaagatgactcagctctcccgtcgtacgattctgaaggccggcatggctggattcgccgcttcggcattcccgggaatcgcctttgctaaagcaaagaaggaagacaaaaaggccgcgaagtctgctgccgcttatgacgctatcgtgctcggcgccggtgctgccggtctgatcgccgctattaccgctgtggattccggcgcgaagcgtgtcgctattctggagcagatggaccgcccgaacggcaacgccatttacgctctgggcaatatctgcggctggggctccaagcgccagatccgtcagggcatcaaggatacggccgaggatttctataaggccatgatggtcacctccaactggagagctgatcccgccctgacccgtacctatacgaacgatattccctccggcctcgactggctcgaagagaacatcggcattgaattcggcaaggtgaagaaagccccgtatccccgtgaatggcgtattaacccgattctcggcaagggcattaccggcggctcccagatggtacagatgctcgtcgctgccgctaagaagcgcggtgtcgttttcctctggcagcatcgcgcggacaaactgatcacggacgatcacgaacgcgtgatcggcgtcgaagctgttgctccggatggccgcaagaagttcttcacgaagggcggtgtcacgatcgcgacgggcggcttctccgcaaatcctgaaatggtcgataagtacatcggcggctgggcttcccgcctggctatccgcggttctctttctaccacgggcgcgaatatttctctcgctctcccgctgaacgcgaagttcgtgaacatggatcagttccatgcgggcccgatcattgctgaaacgcatgtgaacccgaatgaagttctgaactccggctatggcatcatcgttgaccttcgcggcaagcgcttcgtcgacgaggtgaacacctacgtgatcaaggccaaggcctgcgcgcagaacacgatcgagaacaaggcctgggctattgttgacgccgactgcaaggtgatcggcaacatgacgcaccgcttcgagctgctgaacaccaagtactacaaggctgattcgatcgaagccctggctaaggacatcaacattgatccggccgtgctgaagaaggacgttgacgactacaacaacgccctgaagaatggcaccctgaagcagatgaatcctccctgctcctatcgtcagccgcatccgatcgcgaaggcgccgttcttcgccattccgtatgaaggcggtatgacggctacgttcggcggtccgctgatcaacacgaaggccgaagtgcagacccttgaaggccacagcattcctggtctctacgcagccggcaatgccgctggcggcctcttcttccgcgactacatcggcggtgcccagctgggcggcgctacggtcttcggccgtattgccggccgtgagatggccgcccgtgccaaagcggctaagtaatgcccggacgtaaagacaaacaggaatagaggagaatttgatatgactaaagctttagctgtcctggctgccgttgctttcggcctcagcctttccatgtcggccggcgctgctgataagacgcttgctgagattcacggttcggcctggccgaagagcgtgaacggatacgtcgtgaaggagcagtgcaaggcctgccacggtgattattcgaagctcgccaagatgacggaaaatcttgacccgaatccgcatcacagccaccttggtgacgtgaactgcacggattgccataagcctgatcaggagaagccgcagctcgtctgcaaccagtgccacaagttcacgatccgtgaaaagaaggctgctgccaagtaatcattggcttaaataaaagcacagatgccggcaggtctccgcggcatctgtgatgagaggtctgaggcattctgcttcaggcctcttcttttacgcctgcatggatgaattcctctgaatgcggcaggggatcgcggccaaagaccactttttcagttcctgcggcaatcgcttcatcgtagtaggcgcacttgtagttgacgacatcgagtgtttcttcaagcgctttgatccggttttcaatctctttcttctgctgcctgaagagctcgcggcgcttttcaagagtcgcatctccctcccgcacccattccgtaaagagccggatctgatcaatcgagagtccggtctttttgaggcattgaataatctgaattgaccccagatcgagatccgagaacatccgatagcctgaagctccccggctgaggaatgggagaagaccggctttatcgtagaaacggagcgtcgaggacggaattcccgtcatctttgaaacctgctgaatcgtgtattccacgggtagtccctctgactattgactttaaagttgactttaacgttaatcttatctcagccaaggaaatcagtggacgaacggagggtgggaaaagtgcccctcatccactgcaaaaatgaatgggagataggaataatgaagatgatgatgtcgaaaagactcttcgcaaaagtggccctgacgggagttggggcggcgcttgtggcacgcgccgctcaggcgcttgaccgcgctcccctgaaggattctgtcgcggtgccggaaacgattgatcccgcatagctctcgaacgcctgggacaaggtttttccggaggatccgagggtgtcgcaccggaaggttgttttccataaccgctttggaatcactctcgttggtgatctctacacgccgaaaaccatgaaggcgggagagaagatgagggctatcgcgctcgccgggccctatggcgctgtgaaggagcaggtgtcggggcgttacgctcaggagctcgcggcccgaggatttctgacgctggcatttgatccgtcattcaccggtgaatccggcgggcagccccggaatgtgacttcccccgatctcaatacggaagacttctctgctgcggttgattatctgtcgaaccgctctgatgtgaatccggaagcgattggcattgttggcatctgcggctggggaggctttgctatcaacgcggccgctatggatccgcgcatcaaggcaaccgtgacctccacgatgtacgacatgagccgggtgatagcgaacgggtattttgataaaacgaagaccccggaagcgatccgagctgaacggaaagcgctgcggaagacgctgagcgcgcagagaacggctgattacaggagcggcacctataagatggcgggcggtgtgatcactgaggtgaagcctgatacgccgcagtttgtgcgtgactatcacgacttttatcagacgaagcttggctatcatccgcgttcattcggctccacaaccggggcgaccctgagctcggttctcgacttcacgaatatgccgataacggtttacgccgaggaaatcgaaacgccggtgctgatgattcatggtgagaaggctcactcccgctatttcagcgaagacctgttcaagcgtctgaagggaagcaataaggagcttgtcatcattccgggcgctgtgcacacggatctgtactacaagatgaatgtgattccgttcgataagatcacgtcgttcttcgacgcaaatctgaagtaaatagaatcaggttctgaaagcggacgatgaaaaccgtccgctttttttattgcacccgccggagccgcgcaacgcattcaatatgcgcggtatccgggaacagatcaacgggctgcagcgtatcgaggcaatatccgaggttatggaacttcgccgcgtcacgcgccagagcctctgggccgcacgcgatatagatcactgtctcaggctccatggcggcaatgatgcctgggacagaggcttcaagcccttttctcggagggtcgacaaaaaccgttttcggctggatgccgcggctgcagatatccgggaggattttctctgccgggccgcagaaaaattcggtattggataagccgttcctcaccgcgtttttctttgcctcttcaacggattcaggaacaatctcgacgccgatcacgtgtcccgcctttctggcgagcagcaacgaaatggtgccgatgccggagtagagatcaagcacagtatcctctgggctgatggaggcaaggcggatcgcggtgtcataaagaaccggggtctgcggcgtgttgacctgcagaaaggtttcgggtctcacctcaaactcaagacctgaaatttcagcggtgacggatcctctgcccaaaagcacgactgacgtttcacctaggacaaagtttccggggcgggttttgatggaaacggtgatatctgacacaccggcagactgaagggccgaaatcaggctttcagaggcagagtcagggatggaagaggaggtcaccaaagttgcgagacgcccgttgctgccggctctaagaataagaccgcgaagcagccccgtctgagacgtttcgctccagaccgataatcctgaatccctgctccagcgaagcaccgcattcgccgcaacagccatccagtgcgggcagagtctgcaggagtcagttccgggcgcaacatgatggcttcccgcttcgtacatgcccagctttcgggttcctgcagactcttcaaagtagagcaccgctttgttgcggtacccagagtcaatcccgtgaggcatcggaatcggatccagtatctgagatgccccgccaggggtcgcgctgaaaagcttctcgaggaaacgctttttataagagagctgagcctcgctcgtgagttcaatcaaagggcacccgccgcagagcgctgaagcagggcagggagaaccccggcggccgggggatttccgaatgaaacgtgaaacacgtccgatagcggaatgagccccttttttaggcagttcaaccacggcctcaaccgcatcgccaggcagcgtgccgggaagaatcacccggacagtcttccctgaaacttcagtccaagcgatgcagctgccattttttcccagctcctcagcggtcagctgaaccgtgagagaagagggggctgttgtctcagtgcgttgggaagaaaaagagttcattcgggatcagaccggtgagtgatgacggggaaaagtattttcgatgaaattcaaggatccgtcaggtaatacatcagaaggtacacttttttacggtgaattatcaaatcaagtg

SEQ ID NO: 1339 - DNA, 53176 bp, Unknown
  gut microbiota DNA sequence
ataaaaatattttaaatttatcaataatttaagtagttaaaaaagatatcagaatcattgggaatgtaaaaatatatcataggaatacagctttttatataagctatatgcatcacggtaaatgacgtaaattcccgctattcattaaagaaatatttataaatgtatagcgatacaaatgcatgaaaggctttcttattgaatttgagaattttataatgactagtcaattaggattaccaccggagagcgcaagtcaggggtgatccgactgacttcaaacgaattcaataaggaggacaaaccaatgtcccagatttctcgtcgtacattaatcaaagcttctgcagcgacggcagctgccgcagcggttgccgcgcccggtgttgcttctgcagaaatgatggagagcccgaaggagcatcccgggtatcctgccgcaaaagagagtgcggcaatctttccggagaatccgctcccggaatcagatctttctcttacaggttcttttaatctcggaaagtcccagctgaatgaaggtgaatcgattacggctttccgctggggtgttgtccgcccggtagtgaagggcggccgtattgtgggctgcaagccgtttgagcatgactatcagccttcggtcaaccttcaggggattgcggaaatgccgtattccacggcccgtatccgctacccgatggtgcgtgagtcttacctgaagaatggcccggcttcccgcgcggcgcgcggcgacgaaaatgaaaagtgggtccgggtttcctgggataaggcgctggaactcgcagccaaagcaatccgcgatacctatgacaactatggtccgtccgcggtttatggttcttcatacggctggatgtcaaccgggaagctcaatgccgcaattacctgccagcatcgtctgctcaatctgatgggaggctttgttggccgtcggaacagctattcgtccgccgctgttaacacgatcttcccctatgtggtcggaaccggtgatcctcggtccacatcctgggatgttgtgatcaagcattcagaacgtgtcgtcttctggggctgtgatcctgtcgtgacgaatgatattgactggtacacgacgctccacaactacgctggttatctccgcgccctgaagaagaaggggacgaaaaccatttccgtgaatccggttgagacggatacggcggagtatatgggatccgaatggattcatccgaatcctggcaccgatcctgctgtgatggccgccatgatttatgaactggatgccacgggcaagatcgacaaggctttcctcgacaaatacacctatggctgggctgaactccgccgttacattgtgggtgaagaggatggtgtcaaaaagacacctgaatgggccgaaaagatttctggcgttcctgcctcaaagattcgttccttcgctcacgaagtgcaggaacatcgcacgatgttcatgatcggctggggcattcagcgtattgactttggtgaacagagccactggatgctcgcggcgctctgttcggtgcttggacagatcggtcttccgggcggaggactcggcaccaactatcactattcgtccggcggttctccgctcagcgaagcgccgttcatggctcagattccgagcagcgtaaagccggttcgtccggtgacgaagccctggaagggcagcaaggtacttccggttgctgccgtttcagacgcgctcctgcatccgggcaagacagttgactatgacgggaaaaaggtgacgttcccggactttcatctggtgatgtgggcaggcggcaatccgtttgctcaccatccggatacgaatcagctggcgagagcttttaaaaagccggataccgttatcgtgacggatatcgtctggacggctacagcgcggcacgcggatatcgtgcttcccgcctgcacggcgtttgaacacaacgacatcacgaatatcggcacatattccaatgacggttttatcgctatgaaacaggcgattgaaccgcagtgggaggcaaaaccggattacgacattttctccgctcttgctgacaagcttggcatcaaacaggcctatacggaaggacgctctcagatggactggatccgcaagttctataacgacgcgcggcagatgggagcgactctgggtcagaagatgccggacttcgataccttctggaagaagggatatcttctcttcccggtgtctgaagaaaaccggaattatgtttcctttgcggacttccgtgctgatccgaaagcgcacccgctctcaactgaatccgggaagattcagctcttctccccgaagattgccggctatcactataacgactgcctggggcatccgacctatttccagccgactgaaggtgtcgccgcagcgacgaaggaattcccgcttgcccttatggcctgcaagagccgttatcgcatgcatagtcagcttgactgcacggccacccgtctccgcggaacgattgaagaccgggagcctgtctggatcaatccgaaggacgctaaggcgcgcggcattcagaacggtgatatctgtctcgtgaagagccgccgcggtcagattctggccggagctgttcttacggatcggattatcccgggcgttatcgtggtgcatcacggcggctggttcaatccccgtcagacagctcatggggttgtggacgtccgaggcaattcgaacactctggtgctcgataagccgacctccaagctagcccgcggcaatctggcgtcaaccgccaatgtcgaagtgtctctctggaagggtgctgttcctgaggtgaccgtatacgatcagccgccccggactatcgtgtaacaaagctgaccgctgaaaggcgagtatcaggtcagacagtcaacagaagccccgaagattttctccggggcttctgaatgtttacggattttattctaaacatatgaatatctgattatttttataatattttccctctatcaggcatgtttcgtcagcagtcagattcttcggaaaatatcatccaatccgccttttgtaattcttattattacgtagtcttaagctgtaaaaagcagtatcattacgataaattttttaccagaaatagctgacctcctataagatcagtctcagtcgggcgattcagatttgagcgggtctcagttgttcagcagacgcatcctgcagaggatggacctgcaaggaccaaaaccgccgaaagcgaaggtgcctttcccagccaaacagactaattggaattctgaatgcctaaaatttcggttctgacccctctttacaatacggaacccgatcagctgaaagaaatgattgagtccgttctggctcagtcattcagtgattttgagtttctgctcctgaatgattctccggacaatactgagcttgaaagtctcgtgaagggattttcagacccgcggatccggttcttcagcaatgaagaaaatctggggatttctgagagccggaataagcttctcgggctcgcttcaggcgactatatcgccattctggatcatgacgatatctgttacccgacccgtctggaaaaagaagcagcttaccttgattcccaccccgatgtgggagtctgcagcagctgggcagaggagattcccagtggccgaatgctcagagttcctgaaagtaacgaggatattaagagagggcttctctctgactgtgcagtgattcattcggcggccatgatccggaaagatgtactgctgaaaaaccacattcggtgggaagcggtttactcaccagctgaagattacatgctgtgggtgaaactgatggaggtaacgatgttctataacctccaggaaccgctgcttaaatacaggaatacgcctgacaatacgacccataaaaaatctgatctgatggaagaccgggctaacgtggtcaggagttacgcgatcagaacgtatccatactttttgctgcagcatgacagaaaaagatgggtctacctgttcggaaaaattccttttctcaaagttaaaaattatggttccaagtccgagtatctgctctttgggatcctcaagatctggaccattctgtagcaattgttagtggagcaagcatgaagacactgttggtaaccggaggagccggttttattggttcctgtttcgttcttcagagaattgccgcgggcgataaagttatcaatctcgataagctcacctattccggcaacctgatgaatctgaaggatgtcgaaagcaatccgaactacgtgtttatccacggcgatatcggagacgaaaagctgctgcggaaggttcttcctgaatatcagccagacgcggtggtgaactttgccgcggagagccacgttgaccggtccattgttgatccggactcctttgtccgcactaatgtgatgggcaccagcatcctgctccgctgcgtgaaagactggtggaacaccctcgaggcggagaagaagagtgctttccgcttccatcacatttcgacagatgaagtgtttgggacgctttccatgacggatccggcctttacggaagaaaccaagttcgcgcccaacagcccgtactctgcttccaaggcgtcgagtgatcattttgtccgtgcttttcatgaaacgtatggtctgccgactgtgattacgaattgttcgaataattacggtccccgccagtttcctgaaaaactgattccgctgatgaccctgaacgcgattcaggggaagcctcttccgatttatggatcgggtgaaaacatccgcgactggctgcatgtggaggatcactgcgaagcgatttatgacgtgctgacccgcggccgggtgggcgaaacctataacgtgggcggtcgctcggagcgtaacaacatcacgattgtcacgaagatctgtgagattctggatgagcttcgtccgcgaaaagacggtaagtcttataagaaacagatcacgcacgttgctgaccgtatggggcatgaccttcgctacgcaatcgactgctcgaagatcgagcgggaacttggctggacgccgaagcataagtttgaagatgggctccgcgaaacaattgagtggtatctcaataacagtgaatgggttgagtccattcagaccggtgaatacaagaactggcttaagactaattacggcagcagaaacgaactgtcctgaaggagctgattgtggaaaacaacaagaataaatggcgcggcattgtgcttgccggcggatccggaacgcgtctttatccgctcacgcgcagcgtcagcaagcagttgatgccggtttacgataaaccgatgattttttaccccatatcggttctgatcaaggccggtatccgtgagattgccattattacggccccggatcagcagcaccttttcaaggaacttctgaaggatggttctcagtgggggtgctcctttacttacgttgtccaggaaaagccggcggggctcgctcaggcgtttacgctctgcgaggacttcatcaagggctaccacacgtgtctgattcttggtgacaacctgttcttcgggcacggactcgctgagatgctggagcgcgcgatgagccgggatcacggagctacggtgtttggttatcacgtgacggatccggagcgctatggcgttgttgagttcgatgatcagcatcgggcaatcagcattgaagagaaaccgaagcacccgaagtcgaattttgcggtaaccgggctttatttctatgatcctgacgtgcttgaaatcgcgaaacaggtgaagccgtccgcccgaggcgagcttgaaattacggatgtcaataaagcctatcttgaacgcaaggatctttgcgtggaactgatgtcgaggggcattgcctggcttgataccggtacgcatgaatccctgcttgaagcggccatgtttattcacgcggttgagtcccgtgaaggtctcatgattgcctgcccggaagagattgcctggaggaagggctacatttcgagtgaacaggttgctgaactggcaaaaccgatcgcaaagaatcactacggtcagtatctgctgaacttgatcgaaggagataaataatggaagtcgtaaagacaccgatcgaaggtgtgctgctcatcaagcctcaggttttcggcgatgaacgtgggtattttgtcgaaacctggcagaaggagcgttacgaagccgcaggcatcaatctgccttttgttcaggacaatcactccaagtccacgaaggggattctccgcggcctccatttccagaagcagcacccgcagggcaagcttgttatggtgtctcttggagaagtgttcgatgtggcggtggatatccgcaagggatctcccacctttggcaaatggtttggagccattctgaaccaggaaaatcagaatcagctttggattccgccgggaatggctcacgggtttgtcgttctgagcgatgtcgctcacttccactataagtgcacggacttctatcacccgggggatgaaggctcaatccgctggaatgacccgacgattgggattgactggccctataaggaagaaccggttctgtccgcaaaagatcagatcgctccgttcttcaaggacgctctggagttctgaccgatgaaagtactgattaccggcgcggatggcatgctcggccgtaccctgcagcatgagctgcagggagtcgaagtgattcccaccaatcacaaaacagcggatatcaccgatgccgccgcctttgatcggtgccttgctctccataaacctgacgtggtgattcactgcgcagccatgacagccgtcgataagtgcgaaactgaaattgatcaggcttaccggatcaatgcggtcggcactgaaaatgtggcatctgcctgctaccgccacggcgcgaagctgattgccatttcaacagattatgtgtttgagggcgattctcccgttccctatacggaattcgatgctccaacaggggggcactgtgtatacggtcagagcaaatgggcggccgagcaggccgtgagaacacactgcccgaaccacattattgcccgcgtctcctggctttacggtcccggcggcccgagcttcctcgataagatgctttctcttgcggatggcacccgcgaggttctgaaggtcgtgaatgatcagaggggtaatccgacgagcacaatcgccgtcgctcaggccctgaatgagcttctccgtcatccggagctggtgggaacctatcacctcacttgcgaaggagaggcgacctggtacgatttcgcgtgccggatttttgagctcgcgcacgtgaatcagaaggtgattccctgcacatctgaagagttcaggtctccagcgaagcgtccggcaaattcccgcctggcgaagaagaagcttgaatacacgctgaactacaagatgccgagctgggacacagcacttgcggattatctgacgcggttttatacgaagtaactgaggtcaggagcggaagtgctgtgaaaggctgattcaccactcattgtggatcagccttatattttttctgggttcagcaaaggcggaaagttagtttgaaagaagaaatgcttcgggcatgaaaaaaatcccagacagcggaactatctgggatttcttgaattcgtttggtgcgcccggtaggattcgaacccgcgaccccctggttcgtagccaggtgctctatccaactgagctacgggcgcaactcagaactgaaatattacacatgaaaattaaaaaaggcaaatttttttgatgccgttttttgatttaacgtcttcattattgatttaattagaaagtgcgcttcagaaggatgcctctgttccgccagagtaatgaatggggtcaaggtgggataacccattcatgcgtcacgccttataagagcggcagggggcgtgaggatcgcaggtatccatcagttttctgaaacaattcagagctcacgccgacttcaatacggggctatccttcatgacacaagccgggcggtgttgtactattcttcaattacacactgcaaacaggggacgcgtccgactgtccccagtccccatcttttttcgaggttagttagtcatgaccgctttggttctaggccacaagaatccggataccgattccatcgtttctgcactgtccgccacgtatctctaccgcgcccgcggcattgatgctgtttccggcgctcagggtgatccttctcctgaaaccgctttcgtgttgaagcgcttcggtctcaaggctccggaagtggtgcattcggtcgaaggccgcgaggtttatctcgtcgactactccgatcttgctcaggctccggacgacttcccgaagtgccgtctcctcggcatcatcgatcaccataaacttggcgacgtgacgagcgactacccgctcgaatgctggattcagccggtcggctgcagcaacacgatcgtgaagctgatgtacgactactacaaggttgaagtgccgaaggatatcgccggtgccatgctctgcgcgattctttctgacacggtgctgttccgcagcccgacctgcacgccgacggatatccgcgccgcgaaggaactcgccgctatcgctggtgttgacgacatcgaggcgctcggtattgagatgttcaaggccggcagcaacctcgacgcctccccgcgcgacctcgtgttccgcgactataaggacttcgatatgaacggcaagaaggtcggtatcggccagctttccctcatttcgcttgatctcatcacgccggaactgaaggcccagctcgcagccgaactgaaggaagtgaaggctgaaggccgcgacaccgttctcctcgttttgacggacatcatgaaggaaggttccgagcttctgatggagtctgacgacgccgatattgtccgcggcgctctgaagcctgacgcgaacggctggatggctggtgtcatgagccgcaagaagcaggttgttccgccgcttcagctcgccttcaaggcttaatcagcgatccttatacaggtagtctgattccatcccgcagggtttaggctctgcgggattttttcggcgcttggttctcagagaagagaactgaatccggaatctatcctcactgtgacgggttttccgtcagatacccgagggaaggtcagttcctcgaggtgcagataaagcctttgttctctgagctcgaagagcccccgtttcccatagagtgcgtccccgaggatcgggcacccgaaccccagtgccatatggatccggagctggtgcgtgcgcccggtctcaggatgcagtcggacgagggtacgggtgaacccaaggtgttcactcaccgcgatgatctccgctgctgatttcgcgctttttccccggttggattccgagagcacgatctggcgcggaagatcgaacggatctcccccgagaggaagccggagagtctccacactgcctgcgattcctgcttcgccctcgagaatcgcggtataggttttccgggtcagccgtgaagcaaaagcgtcagagaggcttgctgccgccgcggcgtttttggcgaagagcaatacacctgatgttccctgatcaagtcggtgaacggtgtaaagcggaccggttttttcttcaagaaccgacttcatgctgatcggctcaaggatccccgggaccgacggaataccagagggcttcaggatcgcaatcgaatcctgatcctcgtacagcacctcgaagtctggatttttcccgagactgaatgggattctcggagcctgctcgacctccggcatcagagaggctatgagtgggcgcgtaaatgtccggaccggatagggcgcgccaaccgttcgggcttcaaatgagaacggcgttcctgcccgtgtttcaaggagctcaaccggacgccaatcgcggaagtgttctctccaggtattgatgacggacacaggagcgctctggagctcccgcaggatagcgccgcgccagagattccgattccttcccggcttagaagcccaggcgggagcggagtgctcgaaaaagcgggataaatcaactctgcgtccacccgcggtctccaccggagtctctgggttcaggcgttccccggattcctcaagattccgataaaaggagctccatgagatttcagcaggcggcattccggcactccccgggaacctctcgtctgaaagcgccgtgagaatacgggtgctcccatccttttcaagcagaagcccggccccccgcattggatggctgaccgtgtgggcaagtttctgaagctgcgccgcgagttcaggagtcgggggaaccgattccggcattcggaaaggcttcgagaagttatccgtcatgaggcgattcctctctgcttaagccagggaaccagaaagcgaagaaaagaccgggccggggaggcgaggcggtttccggcgtaatacgcgtaaccagaactcggcattgtgagatccggcaggatctgcgtcagtttcccggactgaagggcgtcagacaccgcccagcggcttctcagaataacgccgagaccagcctcagcccatcgggttgcggtttcacttgaatttgtgcggagtgatgaatgaaagcggattcggacagcgccgttttttcctttcagctcccagatgtttccgggtaggcggtcctcatcgattgaaatggcagggagcttcgcgagatccgcaggtgatgtgacggagcttccggttttctgaagcagggagggagacgcgcaaaggatacggtcattccggaagaggcgcttggcgtgaaaacggctctcggggagctctccgatatgaatgaccagatcgagcccggactgtaccggatcgagaggaggatcggagaggaggagggtgagttcgatttcaggattcgcggcggcaaattccgctgccgcgaggctgagaacccgttccccgaacccccagctgcagttgatgtgaagctttcctttcagagtgcctcgcgctgacgtcacagcgtcttcaagagcggcaatccgttctagaatgtcgtccgcgcccgcgagaaaccgctttccttccccggtaagcgccatcccgcgagtattgcggagcaccagggggcagcctaaccgggtttccatcgcggcgagccggcgtgacacagcgccggcggtcagtccgagacggcgcgctgcctcagaaagacttccgcttttcgcgattgcggagaagagttcaagatcagttgcccggctcaaaccgaaaccctcctggaagagaccttccggaggtgtggcactccggaaagccgtgacaagtaatgtttattttgcgggctttctgcacgctgcctgcgtgaagggattcacattcccctgaatcgccgcgatgcggctcgccccctcacactcccaggccgttgccgggaacgtcttatcccaggcgttcatcagctgacgggtctggttactcatccggtacttcgagtaggcccactccatgtacttatacgtgcgggcgacgagccccttcacggcgtccggcggttccgccttccggtcctcaatcttcatagggcacgtaccgaaggtgttcggggtccctttcgcgaactgcgtgtagtcgtagttctgccgcgcggcattgacggagccgattgcggggtagaggttatacatatccgcctgcatcaggcggtactccgcgctcgcgcggtttgcgcaggcacggcccttataaggcttaccgtttccttttacgcattccggcgcgccttcccgccattccgtgaaggcccttccgaagttttccgccggcagaatatgttcccattcaattcggtttgcgcgtttcggggatttggccgcgatgaatcccttcggcagaatgacctgcttatccggcgtgaaagacgcgccgcagtaaatcgtcgtacggtgatcgttgaagacctgattgagcagaatcttcttcacctgggaaaagctttcaaactgggtgttcccgcggggagcgtcagcagcagacgcggccgaagcggcaaaaatcagagcgggaaggagcagcaacacgcgtttcatgaattttcagtcctaaaaaatctgaaaaaaccgaaaagagaaggcaggaatagggttggaaaatcggtcttcctgtttcttatctttgattttttctcaaaactcttttgattttatgcgtgattcagactatcgggggtgggggagaataaaaaataaattttctttttcttcctcgaggccacgcctatgaagctcaccgagctcgatacaccgtcgcttttgattgatcgcgacaaacttatccggaatattgcccgagccaaagcatcctgcgcgaagctcggtgtgcattggcgtccgcatctgaaaacgcataagtgtctggaaattgcccgtctccagattgaggacccgactggtcccgccacagtttccaccctgaaagaggcggaattttttgcctccaacggaatcacagatctgatttacgcggtcggaatcgccccgcataaactgccccgcgttgatcggattaataagtctggggctgactgcaagatcattctcgacagcgttgaggcggccgatgccgtgagccgctatgcgcggacagctggcaccagttttcgggtactgattgaaattgactgcgatggacatcgttccggcctgaaaccgggaagccctgaaattcttgaggtagcccgacatctgaaagatggcgtggcgcttgtcggcgtcctgacacacgcgggcggcagctattcggcgcacggggacgccgagctgaaggccgcggccgagaatgaagtgactgcaattacccgagtcgcggatgaccttcgcgctgccggtttcccgattgaaatcgtgagtgtcggttccaccccgacactctgcgccgcggaaaaggctcctggtgtcacggaatatcgaagcggcgtcgggaccatctttgatctctttatgcatggtgtgggagtttgcgagatcggggacatcgctgagtccgtgctggtctctgtcattggccggcagcaggagaagggctggctgattacggatggcgggtggctcgcgatgagccgggaccgcggcacggcttctcaggcggttgactggggttacggagcggtctgcgatatcaatgggaacctgatccctgagctttgggtggcgtccgcgaaccaggagcacgggatcattgcccggcgtgacgggaaaccgatttcagaatcggatttccctttggatacgcgtcttcgcattctcccaaatcacgcttgcccgacggcggcggctttcgaccgctatcacatcgtcgatcacggagaggctacggaagtctggcaccgaatcaataattgggagtagtctttaagcggtattacgctgaggcgtgcatataacgtcatctctaaaaaatgctgaagaattcaattcagctcacgcctccgcgaggttgtccgtcaggataaacctaatcttctgttccctaaccaccaggatggcagaagaaaacgggcatcagggtctgtgcctcaagagttatgcatcaaccacaaaggagatgaagcatgctaggtgtcgtcataacgctcgcagtgattgcggcggtcgcgtggtgtattttcaaaaactattaccctccaaccgttcttttgattgcaggtcttttattccttgcagttgctgcgtgttttggagttgatccggtgccggcaaaggcatccactcatttccttggatttgattttgcgcaggccttcactgatcgtatgaagacacgcctccccggtctgggtctcaacatcatgtggattgcaggtttctcgtattacatggataagatcggggcatccaaggctctcgtgaagctttgtgtgaagccgctatcagcgatccgctcgccttatctgcttcttgccgtgacctatatcgttggtcagtttatggcactcttcattaacagcgcagtcggtcttggattgctgctgatggcttcgattttcccgctgcttgtcgcgctgggggtttctaagacttccgcggctgcggtgattggttcgacctgctgtcttgaccttggaccgtcatcctcaaatgcgatgcgggcggcagatctccttaacacagacgtcgttacctattttgtccagaatcagattccggttgcactctgcgtgatcgctgtagtagcaatcggacatttctttattcagcgttggtttgataagaaggatggtattgaaacaagcggagccgggactcaggaagatgtagcaaaggcatttgaaggagcaggtcctgtctggtattcaatccttccgatgctgccccttgttcttctgattattttcagcccgatggtctatcagcctgtgaaactctcgcttcagaccgccatcattatttccattcttgtgtctttcgtagttgacctcatcacaacccggggtgtgaaggattcgattggaaggacaaaggctgtatatgaagggatgggcaaagtatttacatcaactgtggcccttatttgctgcgctgaactcttcgcttttggtatgacaaaggtcggcggtatcacgacgatgatcaacgccgccgcatcaatggaatcggcaggtgtctgggtgatgctcttcatcatgattgccattatggtccttgcgactctggtcacaggctcaggaaatgcagcgttctttgcattttcgccgcttcttcctcaggcagcgtcttctgtcggcatgagcgcggctgtgcttgccgttcctgtacagctgtcggcgggtattgcccgtacgatgtgcccgattgcgggtgtcaccattgccgtgtcatcgatcgctggcattacaccgttccagctcgtgcgccgcacgattccggtgatggtgcttgccctgattacaaacattgcggcttcagccgccttcctttgaacggaacccgggctgccgtaaaaaaattccggcagcctgatcccattctctttctgacaggagtcaaatgatgaatgcagttctgattagaaacgccgaggtatatgcgccggaacgtctgggggttcaggacgttctgatggtgaatggccgttttgctgcggttgggaaagatctcaacgtagtaatgcctggactggaaacaattgatgcagcagggaaactgctgacgcctggattctttgatcagcatattcacgtcacgggaggcggcggagaaggcggtcccgtgtccagaacaccggaactggtgctttcggaattggttgcctgtggaaccacttctcttgttggggtatcagggacagactttattacccgctcaattgaaaatctgcttgccaaaattcgtgcgctggccgcagaaggggtgtccacatggatgtatacgagcaattaccgctttcctccgaccacgatgagcggtgaggccgcaaaagatatctttatggttccggagtgtctgggagtcaagattgcgcttggcgatcaccgctcatccttcccgacagttgatcaggttattcagctactggctgacattcgtcttgccggcatgatttccggaaaaatcggtgtattgcatgttcattccggaaatcttcatggcgaatttgaaatgtttaaggaaatagtggaccgcggtttcccgattcgccatattcgcccgactcattgcgcaagggcaaagtatgtgtttgattccgctgtgcagtttgccaaagcaggcggctatatcgatatcacaacaggcggatcctgctgcttcgactccccggctgatgcctttattgaagcggttggcgaaggggttgaccctgcccgcattacgatgagctcagacggtcatggctccaaacctcgtttcaatgacaagggggaaatggtagggctggctgtctgcgggattgaatgtaatcttgaaactattcagaagcttgtcagggaaaaggggcagaagctcgaggatgttcttccctttatcaccaaaaatgttgcggattcgcatgggctatctacgcaaggtcgggtggccgatggagcaacggcagatgcattgctttttgatgacaatcttgaacttacggatgtttttgccaaggggcgtcagatgatgcggaatcgcgaaattattgttcgcggtacttttgaagaataattggttatcccgagcttccgataaaaacagcgtcccgttagtgatttttcggggcgctgttttattcaggcttgtgtcagtgcttcctctctgttcgatcggttccagagccgcttgaatgcggggatcaggagaaggagatgccaggtgccatatccaatcacgagtcccacggcaacaccccccagaacgtctgtcgggaaatgggcaaaaagccagagccgcgaaaaggcgatcagaagcgcgacgggaagcgccgcgagagcaattttgaattccctgcttgcgagcagaacgccgagcaccgtgaatgacaccgccgtgtgaccggaaggaaatgagaaagaaggcgggcacgcctgcagcatagagacccctgtctcaatggcgcagggtctcggacgggcaaaaagaaacttcagaaggccgtttgaaataaaaagatccgcgaacagactgacgatgatcgcgatgcttaccgggcgggtcttttttgagcataaaagcaccgcggcgagcgcgatccagatttctcccgcgttcccgacccgggtcgccgccatcatgatggaatcaaaaaatgttccatgaagcgcctggagtgagaggagaaaagacatttccgacattttgaagcaaacctcttccgggggcggtttctgggaaaccgtccctcttattaattttcgaaccggatcagcgttcaggctttctgaggaatccgaatgaagcgagccgcatggctgcgctttaacgaagacgcgagaaacgcgaggtagaccagagcggagagactccagtcaagaaggaacgtcgccacattgtggctcgggaagtggtatccccgcatcatctgaatgacaccgcagaccgttccgaagatgatagcgaaaaagagaccggcgcgggcaagggtcggacggcgacgtctgaaagcaaaccagaaggggatcaggctgaaaccggttccggcaaagcctccgggccagcagttgccaggggctgaaaggctgaatccaaagtgaggggcaagaatcggatgcgtaccgccgaagaacgtcgtggaaaccgggcagtagaccccggtcatatctttcagcactgagactgtcccgacgcagacgagtattgcggtaataagatagcccgcttcagtgacagaaatccggggggagatcttggcacggtcttttaccgcgatcgcgataactcccaaagctacgaacaccgtgagcagttttgcccatttatggaagaaaagcagcgctgcgctgttctgaagcggaaacgttccatccggcgcaaagaaacgctccaccgcgaggtcaatggagaccgggtgaaggatgatgagcgccgcgagcagcagagccggaataatcgcttcggctgcagcggaaagaaaacgtcttttcacgggattcagagtgccgacggacggaagtccggcagcagataaagggagacagttaaagtgtgttccctgccgtgtgaaacccccgttcaaagcgcgtcaaaacagtgtgaagaataagagaggagagagccagattcaaaaccggccgagggtctttttgaagaccaagcttctgagggggaaatgtgaacggggagacaaatgagggaaaaagaaatatccctccttccatgaggagaacttgcagggaaggagggaaaaagacctcatctccgaggagagagtcacgggatgaggctgtacgcactcatgcttctacagatgccggagcagtgtctccggattcgccgtgatgcttccgctgcaaggacttcgggaaaatagcggaaccggcttccggctgctcctaaacccgcttcgcggagaagagaagaaggaagaaatgctctcggggtttcttctttttcttttctctgcaattcatacattacgcctttttaaaaatatttatgtatcaccaaatagggattccaggaagaaatgccgtaatttattcatcatgatggaggcttctgtcttggatttacgggtttctgtaaaagctctatttatttataggtatcaatattgcggcaggcggcacagagcgtttcgtatggcggtcaggaggaacggttcacggttttattcagaaaaaaacgtgaacgaaaaatagcgtcgttgaaatttaaaaacgttacttgatggtgatatccggaaaatgtctgatgaaaacccgaaaagagagaaagcgggggaaagtctcagacgttttccttatctcagtcgaccgtggtcagagaacggctttggagcgctccttcgagtcacagtgccgcactaacatggaagatgccggagcctcggggcttcctgccttccgcggattcggcagtccatccaatttcactcaatataaaaaataaatcctatgacagaaaccagaattgaggcgtcaagcccccaggccgggggtctgaaacgcacattcggcatgcgggaggcggtgacgatcacggcgggctctgtgatcggtgtcggtctctttacaacgggttccaatgttgtcggcacgctcgggccagcggtcattcttgcaacgctcctcgcgctcgcggtgagtatttatccggcgctcctatacgcggaaatgggagccgcgcttccttacgcgggcggcacctaccagttcgcatctcttggtcttggacgtgcggccggaatgctcgcgggctggaacttcatcatttcgcttgtcgcagtgacggggggcgaagcgctcgctttcagttactacttccgaacgcttttcctcgcgtttggctacgacctgccgatatccgacgtggtgctcgcctccattgtgaccgcgggcttcattgtggccaatgttttcggcgtgaagctcaccggaaaactgcagaacggcttcatgttcttcttctggggcgtcgccttcatctggttccttacgatgattccgaatgtccacctgccgtcctttgtgcgggctccggaattccttcacgcgacaacacctctcggattcttctccgcgacctgcatgatctggtggtgctttgctgggtttgaggcctgcgtggcgatgggggaagaaatcaaatacccgcatatcaatgtgccgcgcgcgatgttcctcgccccgtttgtcgtctttgcggtgaacgcgcttttccagtggtacctcgtcggcatcacgcctccggatcagatcgcatcgctcgcggatgcggaagcgccgtttgcccaggcgatgaaggcggccgggatcctcgggttccctctcgcgctccttgctgccggtatcgcctttggcggcgacttctccacgctgaacgcctcgatctcgacgcctccccgctatctcttcacgatggcgcgtgacggctccatgccgaaggtcttcgcgatcacgagtaagaaatatcagacgccgtatgtcgcggtgattgtgctcggtgtgctgtccgtagcgctgattgcgacgaattcgcttgaatacatcgcgtcgctctcccttttcgccgacctcttctactacgtgcttggcatcattgccgcgcttgctcttcgtaagaagcatccggaactgaagcggagctacaaggctccgtggatcaaggtcggggctccggtgagcgcggtgatctacgtgctgatgatgacgcagctggacgcgaacgccttcatcactggcgtgctctggtgcgtgctcggtatcgcgatttatcttgtctgccggtggaagtacggcaaagccggggaattcacgctggatctcgcggcgtccggtgcggatgacgtaccgccgcctgaggaaaaacgggcgatggatcgtgagtacctgatctggaaagtgattgtttcagcgtcctgcgtgattgcggttgttctctatatcttcccgttcttcgtgaagtagccgggaagagaagactgttatccgccaggaaacagcgcgcccctgtctgaaagcttcaggcaggggcgctcttcgtatcacgaggattacttcagtgtgtaggatctcgcctttgtggagcagggcgaaccttcagtcagccagagtgtccgttcgtcaagatcgagcaccatggaccagagtgacgtatggcggtggtattcgggcggcgacatgtcgtcatggcggcagacaccgtccggattcccggcgtgatccgagaggatccggaacagtgtctttctcttcagatggccttcttccgcgcgggtaaggcgccggacgcggtcgagacgcgtaaaagtcgatgtgaatgaatagcgggtcgcctctccctgcgagagcatatagggggagagccagtgattggtgtggcagagcggatggccgtctgagagaaggatatcgagatcggaaggtgcgtattcaaccgcgaccacgagaccgtccgcgctcgcgagacccacgcaggctgaacccgcgcgcttcgccttcgcgatcgtatcaatcgccttcgggactgtcggctgctgcacagcgttcctaagaatcacatgaagcggtacgccaatctgacctttcttcacggacatggcgttcagcgatacgccgaccccggccgcattaagccccttacctccgaccagacccgcttctgtcacgatgagggctttcgggtacggctgctcgtccacctcaagaatcacggtggtgccggctccgatcgaccaccagtcccagttctgcgcgagataggttttcccattgccggaggcttcctgcggcacaccgatcacgctgcattcgtccgccggcgcttcactcttcgcgaacatcacttccgagcggcagttcagcgtcagaatcacatcaaacggcacacctgccccttcggcgatgcctttcatttcatcgatcaggtccggccggtaagcccggattgccggttcgtagcgttttgccatccggaccgcatctttccatggcagatgcgcttctttatcgaagagaactttgtattcgtcaataaccttcaggatccgttccttcgcgaaggatccataagcgacgccccgctcatgggcctgtcccgaaatgcggatgtattggtgaactgatggtgccatgcgctgctctcccttgatttttttgtagaacagagtgcttcggaattcactttaacaccggcagttcaggctgtgtgctgaatgacgataatcagttgaaatggataacaaaaaagcctctcaatattaatactgaggagaggcttcccgtggatttggatgtcttacaggggcggtcagacgggagaggttccggaagcgccgtcctctttcgcaatcgtcgccaccgccttttcataaatatccgctacggtgtgacgcttcagctcagcttcaaaggacgcctgaatggcatccagcgtcgcgtccagactcccgtgaatagcgcgtccgaccggacacgcggggttcgggtgctcatgaaagtgaaaaagcggcgcgctgctcccggtttccacggcccggtagaggtcgagaaacgtgatggcttcaagcggcttcagaagcgtgatgcctccggggccccggcggacctcaatcagaccggcttccttcagctgcgacatgatgttccggatgatcacggggttgctgccaacggttcccgcgagcatatcgctcgtgatcttctcatcatccctgaagtattcaatcgcgatcagcacgtgcacagcagtcgtgaatttggtggaaatctgcatagagtcctgattctccggaagtgtagatgcatcaaagcgtcaggcatctcacaggacgcctgacgcggtaaccgttcttggggaaggtggggattttaagcccagcggaccgaaatccgctcgcggatgtgattcccgtgctcaatctcatccaccatcgcgatcgcgtagtcggcgtaggagatttcagacttcccgtccttattcaccgtgaaatcctcgccggtcagttcatagaatcccgtgcgggggccgtccgcgaggaagactgcggccgggctgatataggtccagcggacatcgtttctcgtacggaggtagccaagcgacttcttcatagcctgggcgagcgggcggatcgcctccgggaagtcttttccgtcagcaagggtttccgtgcgctccgggttcgtgtagagagaaccggcaccgccgacaaagagcagacgggtgtcagaaccggcgaggatatccgcgaggtgctcagtcgtggtctggtagagcgggaaagtttcaggcgtgaaagccccgaacccgctcaccaccgcgtcaaacccggcgaggtcttcgcgtgtgagatcaaggatgtccttacggacgtaagtctttgcttccgtattgttctcttcgtgacgcccgaaagcggtcacgtcaaaaccgcgggaaagggcttcagagatgattttgcgggaagctttgccgttagcggcaacgactgcgatttttgccattttgcattctgccttattgatgtaataagtgttgtttcatctgttaagaagaaatatagcgaagaaaattttagatgtcaatacttttattacatcaaaagaaattctgaaggggaaagggaacggccggttttcatcaagcccctgaatacaggcatttcgctttaacattgggggcatgacggccggaaaggtgccggaatcagggtgcttcaggcgcttcctgcccggccgcaaggacaaaggagataggaaatgacgctcggtgttccttcaaccggcgaggcaggccgcctcgcggacgcatctccgtggacgggcgagagaccgccgcgggatgagtttttctggctttcccagatcaacaaagcgacgtttgttgtcaatacccgaagcgggcttctcgaccccaggcgggcaccgggttgggcaagagctcagagacgcgtgatcgagaaaggcaatacacccggaaatccccgtcccaagatgtatgtgcgttacgagccgcttctaattgccgaggccggaatcgatgtcacgctgatccacgcggggcggtcctcccaggatatgcacgcggtgtatcagcgagcgatgctccgggatcagacgcttgaagtgatgaccgcgctgaactcggtgcgtgagacactctttcgcctcgcgaaggaaaaccgggacacgatcgctccctgctatacgaatggggtggcggctcagccgaattcgctcgggcacacctggctcggacaccttgaaggcttccggcgtgactttgagtcgctgaaggaattctgggcccggctgaatctcagtcctatggggaccaccgtgctgaatgggaccccatggccgcttgaccgcgagtcgatggcctcactcctcggttttgaaggacttgttgaaaacgcgtatgacgcggcgcagatttcatccactgacaccgcggtggaggcaagtctcaaactcgtcgaaccgatgctgcatatcacgcagtttatcgaggacatcatgacgcagtatgcgcagccgcgcccctggatcctcgtgtccagcacgtatgcctcaaccgccatgccgcagaagcggaaccccgggtcgctgatcgatgtgcggcgggacgcgaatcaggtgcttggggaactcacgggaacgatcttccgggcgcacgatctgatgcccggaatgtatgacccgaaggatgaggccattaatagcacagtgatggcggagggcgcggcggtgcttcgggctttcgctcacgtcctcacgcttctcaaagtgaaccccgagcgggctcttgaggaactgaatcttgactggacggcgagccagaatatcgcggacgtcctgatgaaggactacggggtgccgttccgcgaggggcatcactttgcgagtgacctcgtgacgtttgccagaagccgggactacacgccgctcacgctgccctacgaagacgcaaaggctctctatgagaaactcgcctccggggcggaagaggggattccaaagaccttcccgctcacggaatacgatttccgttcggcgttggatccccgctcgatcgtgaacagccgcgcgacccgcggcggtccgcagccgactgagcttacacggctcttccgcgaggccgaggacgggatccggtcggattctgactgggtaagcggaaagaagaccgcgcttgccgcggccgagaaaacgcttgacgaggatttcgaagcgctctgcgcgttgcccggataacagatttttttctttctgtccggtatccttaccggtcggtctggctgcccgcctcccggaaacccgaggcgggcatttttttctttttcaacaggttttaagaaggagggctgcgcgtgaagcagtttgtgagccgctggggatgtctttttatcggtatgagttcggtggcgttcgggatcgcgatgacaacccgggcggggctcggcacaacaccgctctcatcctcgccctatacggtcacgtttttcacgccgctcacgctcggtgccgcgtcgatcggtctcaatgtgtttttcttcgcgctcctctgggccgtgatgggaaagcgctttcagttcacccggaatcttctccaagtgccgattgttctccttttcggctttctcattgatttcttcatgtgggccctcgccgcggttccgccgggaccttatgccgcgaagatcgcccagaacctcctcgggaacgcctttctcgcgcttggtgttgtctttcagggggcgagctgcgcggtgacgctcccgggcgacggcttcgtgattgaggcgtcgaaacgcttcggaatatctcttgggcgcatgaaagcgatctttgactggtcgcttgtcgcgatcgcctgcgtgctcggtctcatcttccttggccgcatcgaaggggtgcgtgaaggcaccgtgatttccgctctcacgaccggaatctttgtgcggctctgggccaaatgccccgtgttctcgaaactcgttaaattcaaccgtttgaagtaacaaaaaaagatgagaacgattatatttaagtatcacggaaaataaattttccgtatctcttttatgctattagctatgctcgatcttattgagaataaatgattttttattgatcgagttattttttttactggacttttttctttctgaaccattaaaattgaagaaaaaccatgaaccggcagtcaatggctgaccggtccccccggaaagctgataagaggtctgaaatgcagcaggaagaagaaaaagaaaaaaaatgcggaagaggcggctgaagccgcccctcggtcccgaagacggggccggcccgcatctctccacacgaaggaaatggtgcttcacatccgctgtaccaccgagcagcgggatacgtttgcgaggatgggcgggtctgtctggttccggtctttccttgatacgctccaggccggtttcgaccgggatgtgaattcatcgtcaggcgaagaggattaggcagaaaccggacggggcagaaatgcatcgccggatacagaaacgggagggttgcccctcccgttttttatggcctgaaatcaggaactctgatcacggaataaagattttcggatctacggtaatttaagtgtcagtgatactaattacagggtcttcagtgtcttttcgtatttttccaaatggtaatttcagtgttttaaagtgagaatctcactcaccggcacgcggcccgtccggagacggttaagcggggagtccgccgggtaacccagtcctatcccaatcgccagaatcaggttatcggggatgccgagaacgcgcttcacgatatcggggtaacgcaccagattaaaggccggaatgctgccgactccgcgtgatgccgcggcaagaagcagaaacgcttcaagcgccccggcgtcaagcaccatccattccgaatgcactttcgggatcgtgataaaagcgactgcgggcgcgtggaagagcacggcctggctcgcccgtttgtcggcctcaagccccagcgcctcgcgttccgccgcgaccgcttccatccgggcccggacttcgggcgagcgctccgagagcgggaggttcgcgaagtcggtcgaaggcgggatacccgcccggttccgttcgtcgaactccgaacggatcgcgtcgagactcttccccgtcgaaatccagatcttccagtcctggccgttcagctgggagggagcccttgtcgcgtcttccgcgatagcctgaagaaccggatccggaacagggcgggctgagaaatgccggatcgaatgacggaaagcaatggcgcttgagaattccatgacggaaaggtcccgataaaaagatgcatcgcggaggaaaagctccgagggaggctttcaaagggcggaaaaaaaccggggcggcagaagccgcgccggtttcaccggattgataaaattttagtcccgcgctcctttggattcaggatatttcattcgtcacaaggtaacccgcgcggctgagcgcctgaaccgcgtttttgaaggtatggctcttcaccaggatatagtccgtgttgtaggtggagaccgcgaaaatcggaatctcctcatccgcgagcaccttggagatccgggcaagaattccggtgagtgacatatcgagcgttcccgcgacccgcatcatgcggtaaccccggtcaacgggataggcgtctgacggcacttctgactcaagcgccacgagcgacagctcatcatccgtcttcccgacaaagacaaaaggcgacttccagttaatagaggcgggattccggatcttcgcgatcgcgaagaagtaggggaaggtttcgatcttcagggcattggtcatcggagtctctttttttattttcctgggggagtctctgatcagagacgggtgcagctgaagcgttcggtgagcgtcttcgcgggagcagagtctgccgcgtgtcccagcgtgatgccggacttcacttcaaatccctcagggatctgaaggatcgagcggagtttcgcggggtctttcgttccgagaaggcagcctgcaatgaagcaggttccgagcccgagatccgctgcggcaagaagcatattttcaatgatcgcgccggcgtcaagcgttcccacagtgccgggtttcgcggaaaccacgatgaaggcgggagcgccgtaaagcgggtcgtggctttctgaagccatgaagaatttccggagttccgccattttttcgcttccggtgactaccgtcaggtgcacagtgccgtattcccccatgccgaccggagccgcacggcccgcggcaagaatcgtgtccagagcttcatccgacaccggcgtcgcctcataggctcttgaagaatgacgccgggccagcgtttcacggaattccatggttttctccttacagaaaaacagttcgatggaaagactagcgcaaagacactctttcggtattgtctctagcctatagaggaagaaatattttttccgaacgatagcccgagtgctcgtatgggtttgtaccggctgcagcgcgttacgtgatcattcaccatgccggttgcctgcataaaggagtagaggatcgtggtgccaaggaaccggaatcctctcgccttgaattctttcgcgacccggtcggagaacggtgtggagggcggcacctgcgactcatccgtccacgcgttctcaatcggccatccatccgtgaagctccagtaccagcggacaaaggacccggttttctcccggatatcaatgagtgtccgggcgttcgtaatcgccgcttcgattttcatccgatttcggatgatgccgggatcgaggagcagccgattgacgtccgcctcaccgaaggacgcgaccgtttccggatcaaacccggcgaacgctttccggtatccctcacgtcttccgaggatcgtggaccaggagaggccggcctgagcggattccagaaccagaaactcaaagagacgcttttcgtcaatcgtcggcacaccccactcggtgtcgtgatacgcgcgcatcgcgagggatcccgaggctccccaggcgcagcagcggtcgtttgtcatgatgtggtttcctcctgatacctgaaacggctttctgaatggatgccatcagagtctgagcgcggatttccgccggggccgttcctttttttactgttcaggccagatttccgagacattttttgacgaattcagttttcgtaactgattgattccgttcgctgtcatgattccgtcatatttctgtcacggaaccgtcatctcgctgaagcctttctgacatattcgcccggcatactcagcaccgctaatggaggcggagcgggccttaccggttttttatgggcaagtaaaagactggcagctgacgggcctgatctcctgcttccgacaacagattcctacttccatcactcaccattatggatacattctttctagttctgctcgtgttcctcgcgattctcgccgcggtggaccttttcgtgggcgtcagtaacgacgccgtcaacttcctgaattccgcggtcggcagccgcatcgcccccttcaaggtggtgctcggcgtggctgcggtcggcgtgctgctcggcgcgacgttctcaggcggcatgatggagattgcccgaagcggcgtcttccatccctcgatgttctcgttctctgacgtgattgccatttacttcgcggtgatggtgacagacgtcctgctgctgaacgtcttcaataagatgggccttccgacctcgaccacggtctcgatcgtgttcgagcttctcggcgcggcggccggtgtggcgatcaaccgtctgatccagaacggtgagtccgctcttgggttcggcgcttatatcaatgactcgaaggcgctcggaatgatttccgcgattctcgtctcggtcgttgtcgcgttcctcgcaggcgtcatcgtgcagtggatcacccgcgtgatcttcaccttccgctatgaccgtctcttcaagaagctcggcggcatctacggcggtttttcgctcgcgatgatcttctacttcctcgtgatgaagggggcgaaaggcgcttccttcatgacgcctgacgtgctcgcgttcctcgatgcctacggtacggaactcgtgctcgggatcttcgttgtctgctcgattctcctgcagctcgggatgatgttctttaagacgaacgttttccggatcatcattcttgccggtactttcgctctggccttcgcgtttgccgggaacgacctcgtgaacttcgtcggtgtgccgatcgcggcgctcgacagcgctcacatctttgaagcggccggtgccggcgcttcggcctccaccttcacgatggcgggtctcgaacaggcgatccccgcaccgactgcgctgcttctcctctcgggtgtcatcatggtgatcacgcttttcacttcgaagagcgcccgtcacgtgattgaaacctccgtgaacctcagctcctccgccgcgggcgaaaaggaacagttcggcgcgacgcttcctggccgtatcgtggtgaagggcgcgatgaagttcggtgccttcctcacctcagtcctcccgaagccgttcctcaagttcctcgcgagccgcttcgaaccgaagccggtagagaagggtgaggatgtgctcccgtttgactatatccgcgcgtctcttaacctcatcgtgtccgcgattctgatcgcgtccgcgacgtccctcaagcttccgctttcgaccacttacgtgaccttcatggtggcgatggggtcgtcgtttgcggatcgtgcctgggaccgtgaaacggctgtgtaccgcgtgtccggtgtgatcaccgtgatttccggctggtttgtcaccgctttctccgcgttcgttgccgcggcgatcgccgcgaccctggtgcttaagggcggcgaagtggtttctgtccttctgatggtgatcgcgatcgctgtcatcgtgaagacgaacttctggccgaacaaggttgaagaagccgagaaggaaagaatccgtcttacggaccgtgacggcatccgcacgatgctcgaccacgaaattccgcgccactttgataacgcctctgaactctacggcgcgatggtctacggcttcctgaatgacgatgagcggacgctccgccgcgtcgtgaaccgcgcaagtgaatgcctcgatgagctcaccgaaaagcgctcgctttactaccagatagcaaagcatccgacggaccgcgcggacagcgatgcgaagtacttctactaccgcagcttcaccggcatgcgtgaaatcgcccgtacccttgtccgcacgtcgactctcacgcgggaccatgtcgcgaaccgtcaccgggtctttacgggtgaactcgctgaatacctgaagcggctttctgttgaagtggatgcggcgcggcgcgatgtggcggccttctgcaaggtgggcggcgacctcacaccgctgcacacccggatgaagaacctctctgagcttgtggatcagagccaggaggcggtgctttccgacgtgaaccgctttggtctgtcgcttcgcggctccgagctctacctcgtcctcgtgcagtttgtccgggaactcattaaccgctacgaaattgtggtgacgctgcagtggcacctgaatcaggtgtgccggaaggaaaagctcgatgtgctgaatgaagcgcactcggcggctgtccctgaaaactcgggccgcccggttttccctggcacccgaaggggcgctgtgacgggatccgccatgatggctgatacccctgtgagactctccgcaccgtttgtgaataaggaaacgaaattatgacaaagaagcatggtcgcgctgaaatccgcttcaagctggagcatgacctctatgacgcggcggaagaggctttccgtgaggcagggctttcgatcgaaaccggactcacgctgttcctcgcgcaggtcgcgaagcagcatatcgaaggcaaggtggttgacgagccgcatgatgttttcgcgacagttgacgaactgatggagtatctcgaggaacgtgaggagcgccgcgcggctgaaaaggccgccgcccgtcaggcgaagaagaacgaaaaggttctcgcggagcttgagcgtgaagagaaagagaaggaaaaggagcgcctgaaagccgcgaagaaggctgagaaggcggaccgtgaggcggctgagaaagcggctaaaaaagcccgccaggaggcgaagaaggcggagaaagcggcgaaagacgctgttccgcagactgaagccggggtggagcctcaggcagccgctcagccggaaccgaagtctgagaagaagcccgtgaaggcttccgaaccggtgccgaccgaagtcgcgatcgcggtgtccaggacggcaaattcctgatttttcgttcgcaggaaatgcggcccttcccggcgacccgttcggaccggacgctggccgcacagctgaaagctctgggatttttccgaaccctgggctttccagggggaacgctttcggaggaggttgatggtggtcaggccttcggaagctttttgagtgaagcggtctcttgcttgccctgagaggccgctgagcgcggggtgcgttctgaacaggtgagtgatcagaacgcaccccattttttatggccgggagcgggagccgcggaagacatcaggaaccgttggaaagttttccgatttcccggagcacctggctgaaccgtgtgacgggctttgcccagtcgggttcgctgtgcagctgtgcgaagtaaagccgcttcatggggtctgcccgcagcccggtctgacggaatttctcctgagcgatcatctcatccgcgatcgggtgcatatcgattccctgaagcaccgcgcgccggatcggggcgggaagcgagaagagtgagaggaggaccggaatcgcgaagtgaagcgcggctccgagcgcgggattcacctgtccccagtcagctgccgcggtgttcagtgtgccgctcgcctctccccagtcttcctccgtgacggcggaggcgatccggtgccgttcctttgtgaaccgcgccttgctgatcttcgcgaagggaaacgtgagcgggtaaaacacggcggacagatcctggatgatcgtggcctgcgggaagaaacgctgcgccgcgtcagaccagaagggctccgtgtcgtcgggcggcacggcgataaaagcggcgtccatgagcccccggacacgaagcgacgtgaaaaccgatttcggaagctcaatcgcgtttccggcgatccagccgccaagcgataccggaacgcccttcttatcaaacgaaaaggcgagtgccgcgaggagctcggtcacgcggccgccgtcctgcttccgcactttgatgggcttgatgaagaggatgggaagcgtctccggcacgggtccctcgctccatagatccgcgccgctttgcagtttcccgaccgcggcctcaataaattcccgcgtcacccgggtgccgtggcgggacagtatggagtcgtggatttcagtatctgtttttccgctccgagagagccggtacgcttctttttcgatctggggaaaaaggcccatggagtgatgatcgagaggctttccgggattaaggagccgcggggaatcgagttctccctggagttcctctttcagggtttcaagctcaggcggcagcccggcatccgaccctttgtaggagttgaggagaatctgaacgagagagtccgtctccgggccgcccctgcggcgggaccggggttctgattttgcggaaatcttcttctcagccataacgggttcagcggatctgtgtcagaaaacttttcaacgaagtgagactaccctaaatttggtaggagcgggacagtttttgacagcagggaaaacatccgccggggtcagtcggctgtcggaagttattgattgctaatgattctcaaatgcaaaaaatccccgtctgacggggcctggagggctgcgtcggggagccgccgaaaacgctccgaagacggaaattcattacgccttaaggattttcacttatttcatttcgtgttacatctctgttttaaattaagaaaaaattaaggaaaccgcattattgatctaagcacatgtccccttttttagtcacggaaaaaggcctcccacttttttccagtttgcctagaatcgtttcagacatttgagaaaagacggagtagtatcgtctaattgagggtttgccactagctcttagccgggatgccggcggagtgagcgcggtcaccgcgcggctccagggcaggggaagagcggaccccgcttaacatgaggagtgtttatgaacaacatttgtgatgcgtcctacggtctattcatcaataacgaattcgtgccgtcctctgacggaaagactttcgcgaccgtgtgtccggcaaacggcgaaaagctcgccgatgtgtctgccgcgaccccggaagacgtggaccgcgcggtcaaggtcgctactgaagcgttcaagacctggagcaagacgtcgcctgctgagcgtgccgctctgcttctgaagatcgcggacgcgatcgacgcgaacgttgagcgtcttgccacggtggaaatgctcgataacggcaagcccttccgtgagacccgcaatatcgatattccggccggtgccgatcacttccgctacttcgccggcgttctgcgcgccgccgaaggccgtgccgcccagattgacgaaaacacgctctccctcgtgcttcacgagccgctcggcgttgtgggtcagatcattccgtggaacttcccgtacctgatggcctgctggaagctcgccccggcgctcgctgccggcgatacggtagtgatcaagccggcttctgacacgccgctctccattcttgaactcgcgaagctcctgaaggacatccttccggccggcgtcgtgaacgttctcccgggttccggccgcgtggctggccaggcgatccttgagcatccgggcttcgcgaagctcgccttcaccggttccaccgaagtgggccgcaatgtgggtcttgccgctgcgaagcgcatcatcccggcgacgctcgaactcggcggcaagtccgcgaacatcatcttcgacgactgcaactttgataaggcgctcgaaggtgctcagatgggcatcctcttcaatcagggccaggtctgctgcgccggctcccgcatcctcgttcaggacacgatctatgacaagttcatcgctgccctgaagaaggaattcgaggctgtgaaggtgggccgtccgtgggaagaaggcgtgcaggtcggcgctctcgttgatgagcgtcagctgaagaaggttctcagctatgtcgatatcggtaaggaagagggcgctaccgttattaccggcggccgccgtctgacggaagacggtctcgacaagggctgcttcatggctccgacgctgctcggcgatgtgacccccgatatgcgcgtcgcgcaggaagaaatcttcggaccggtcgctgtggtgatcaagttccacaccgaagaagaagcgctcgcgatcgcgaacgactcggtctacggtcttggcggcgctgtctggacgcaggatatcaaccgcgcgatccgtgtggcccgcggcgttcacaccggccgtatgtgggtgaacacctataacgaactgccggctcacgccccgttcggcggctacaagcagtccggtatcggccgcgagacctatctctcgattctgtttgcctatacccagatgaagaacatcttcatttcgcttaacgaaaagcgtatgggtatgttctgagcggcatgatcagatggcaccgcgctcggtcagtctgacctcccgcgcgacgcctataacggttatgctcagagctcccggattcaggtcccgataacgggccggatccgggactttcgtttttattacggttcagagttttttgtagcaatggatggagttttcttaacgatttacggaagccccgcttcctataatcgttattacccgagatggacagggaccgcaccggaaaatttccgagctgatcgcctgcccgggtgcggggaacctgaatgctgccgtccgacccctcaggaaacggatggatccgggaactctttccgggcccttccaataaggagataagacaatgcgtattgcaattccggttgaaaacggcgaaatctaccagcacttcggtcacgctccggctttccgcgtctatgacgtggagaacagcaaagtgattcaggtgcaggaagtgccggccacgggatccggacacgctgccatggcagggctcctcgcggacctcaacgtgggaaccgtgatctgcggcggaattggtttcggcgcagtgagcgctcttgagtcgatgaatctgaatctcatcgcgggcgcttccggaaacgctgacgaggcggtccgcggattcctcacggggaaactcgtgaataatccggacgcgttccacgcctgcggctgccactgaggttcgctcgaaagcacgagatgaggatctccccgtcattctctcggggcaccggatcctcatccaattcctgcagaaaagcaggaaggacgaacgatatgaaacgcagactgatgcttttagggcttgcggcgctgccgcttgccgcaattgcgcagcagggaccgggaatgaccccgccgccccctccgcctcccggacagcccgggacgggaccggctcccgctccggcgatgccgggctggggcaacgcgacccctgaacaggtggactggatggggcgtcatattgctgaggcgctccggatccgtccgtatcagaagccgacgttcgactcctggatcgccgcgcagcggcagctcgcggttgaccgccatgagcattggcgccgtgttagaaacgcgccggatcatcaggcgctcgcggacgagcaggcgcatttcgcgcaggttctcgcgaccgatcttgaccgcgtggcgcttacccgccgccgcatggtgtcgcatttcgatcagccgcagcggcagacgtttgagcggatggaattcggtcatccgccccgtcctccgaagcccgcgccggatccccggttcgcgcctccgccgcctggcccccgccaggcaccccgtccggctccaggccccggccccggagcctggggacccgcccggtaataaaccgcgcctgaatttcagttcaaaaagaaaccgtgcgttctttcaaaggaatgcacggttttctcttgcgatgtttaagcagaaaaaggtgaattcagtacacttctctggcttaataaaccgcggctactcccacgacacatcgacattcccgcttcccagcgcgcggatcagatcctttgtgtccgtaatacggccgatccgggtgtaggtgtagggggagttttcaggcgtcatatagaagatcacgacgtagtcatcctgatacagcatcacgtctcccgctttggcgtgcaccgcgggtgctgccgggaacgtacggtccctgaagtggaagtacttttcgttcccgttcagctcgagcatcgggagtttcgccggaagcactttcctgaaagcccgcgcggccggcgtatccgctagctccaccttgaaggttctgccgcctgccgtaaaccggatgaaatctgtcatgacacctgcctcctctttatccgggccattgactctggtaaattactgacaaccacttttcagcccggttaaatggaattatcatcttccgggtcaaatccggtgtgaaagcgggttatttttttgtccggaaggctttgcgaggccttaaatgagaagatttagcagaaatcccggcgaagccggatttcgctattccaataagtaataattaattggaagttatggcttttagctattgactggaataatttggtattacaaatatcggtttgtaaaacagggattccggatatttccgattttgtaattgaaaaatattagcggcatagccaacatagctgaaaataaggcatttttatcggtttttgtgacgcataagaagggtcacataaatgtcgtttaaacaaaaacctgatttttaatgccgtgaaactgattttcagagtacctgaatgcgcgtcggatgagaagccgccggaggttcgctgccggatcacctctgtgttccatttattcggctaactattcttatcctgctgattttgttttaaataaaagtttagttttggttgatcgatcaacgaaaaagcagaacctcgccttaaaaagttaactaaattaaacttggtttaaaagttgtcaattaatggcgggaaacagttttgaacatcctcaataactgtgctcagtcataagcgtggtctatggcaagaccctgacaggtttataattttttcaaagggatgccgtgagacaaacggcatcacggtccacaagaggccgcaatggaaatcagggtgcttcgctacttcgtgacaatggcccgcgaaggcaatatgacgcgggcggctgagcggctgtttgtgacccagccgacgctttccaaacagctgaaggacctcgaggaagagctcgggcggaagctgtacgagagaacgaattacagtatcaggctcaccgacgccggcatgcttctcagaaagcgggccgaggatatcctggcgctcgtcgataagactgaggaggagttccgggccctgaatgacctcgattccggcagcgtctcgatcggggcggcggagtccgactcgatcaagtatttcgcccgcacggtgaagcggcttcatgagcggtatcccggaatccgcccggactttgtgagcggggacgccgatgacatcacggcaaagcttgataaagggctcctcgacttcgcgatcattgtgaatgacgctgatctctcgaagtacaactacctcgaccttcctggtcaggaccgctggggccttgtcatgcggcgtgacgcgccgctcgcgatccggaaagcggtgccggtggaggatctgccgtttcacccgctgatctgctcccgtcagggtctgcagcaggatctcagacggtggctcggagacaccgcggatcgcctgaatattgtcgcgaccttcaacctcgcctataacgccggcatcatggtgcgtgaggggcttgggtacgccgtggtgtttgatcacctgattgatacctgcccggcctcagacctctgcttccggccgatcgtgccggcgaagacaagcggtatgaagatcatctggcggaagtatcaggtgtttacgcccgcggcgacccggctgctcgaagtgctgaaagcggatctggagcgcgagtttgaagcggcggcgagagacgcggctgcggaagccctgaaagaggatccggagcggcctggcgcccgtccggcgagataacagaaagccccgtttcagaacggggctttgcttttttcaagcggccgcggggttcttctcagagctcaccccggcggatcttatagaggacggagtcgatgcagtcgatcgacgactccttctcgtgaagcgaccgaaggagcgactcacgtttctccttcagctcctcaatcgcggaattgcggcagccgaccgtcagaaggtcacggagccgctcggcatcttccacccggaaacccgagtcgagaagctcttcgagaagcatggcgcttcgatctctaaagtcagccatcctgctgcctccattttcatccagagcagcgaacctgcatcgccgctatccatccaaagtctaccgtgaagctgcggaaggtgcgaggttcttcgtgaagaagctttcgagcttcgcgaacggaatgagttccttccgatcgtagagatccacgtggttcgcgcccggaatgatcacgagttccttcggctcagcggcgttccggaaggccgtttccgcgaagtaccgggagtgagccttttcgcccgtgatgatcagaacagggcggggcgaaatctccttgatataggtgagaagcggcatattcatgaaggagagcggcatcgtgcggcaccaggcgctcgtcgaattgacggacctgggatggaaaccgcgcttcacccggtagtaatcaaagaactctttcagaaccggatctggattttccgggagcgtttcaggaaggatccggtcgccctgcgtgacgcgccccgctttatccaccgggagatcgtggccgccgggcggaatcgagcccttcgcggcgtcctcccagcgcttttcgttcaggaacgccttcacggcgcggcggtccgcttcggtgtagcggtcgcgccccgcgccgacaccccagcccatcgcgcggctcatgtcgtacatcacaacagaagcgaccgcgcgtacgcgtgtatccatcgcggcggcgttcagcgcgaagccgccgaatccgcagatcccgataatgccgatccgtttctgatcgacgatcgggaggataccgagcgcgtcaaccgcggcgctgaagtcttcggtattcacgtcaggagacgccatattgcgggggaggccgctgctttcgccggtccaggagggatcaaaggcgagcgtgacaaaaccgcgcgacgccatttcctgcgcgtagagcccggaactctgttccttaacggcgccgaacggccccgaaaccgcgatcgcggggagctcaactcccgctttcacgcctttcggggtgtagaggtctcccgcgagcgtgaagccgtagcgattcttgaaggtgatcttcttatggtccacattggggttcttaggaaagaccttgtcccagccggacgtgagcgccggcgtgtcagacggcaccgcggccgaggacccggcagcactcgcggcggccgggagtccgaggggagcggcggcaagcgccgcgcacttcagaaaattacgcttgttcataaaggttcctctgttcttttaataatctgagggctattgcccctgtgattcaagtttatgaaaacgctctggttatttccaatattttgttttcatatctggttatagctttcatcgatatctatacatccagcggaggaggaaaaagtccgccttttgacagtcggggcggcatttctgcatttggagacaaaacgtgggcgtttcagaccttaaagcctcacgcttcctgagtgcgaaagtagaattcgtgacgaaaactattcgcgggaacctataaaaccggttcctttctcagcaacgaaggaataaaacaaaatgaagattctgattgtcgacgccggcatgccgtttaagggtggaaatggcggtgcgcttaaccatcgtctcactgaaatcgagaaggcgacgcttgaaagcctcgggcacgaagtgcaggtgacgcggcttgcggacggctggaaaaccgaggatgaggtggcgaagtacctgtggctcgacgcggtgatttatcagacgcctgcctggtggatggaagccccggctgctctgaaatcatacgaagacgatgtgtttgggggccccgcgatgatcacgggcgacggccgtcaccatgagaatccggccgtcaattacggaaccggcggcaagctgaagggccgctacatgatcagctccacctggaacgcgccgctgaacgctttcctcgccccggatgagttcttcgaagggaagggaatcgacgccacgttcttcggtctccataaggcgaaccagtttatcggtctcaagccgcttccgtccttcatgtgcaatgacgtgatcaagaatccgacgctcgagtccgatatcgagcgcctgaaagcgcatctcgaaaaggtattcggccgcgcctgataaccgcgtgagaatcgtttcatcctgaaaccggtctcttaaaaaccctgaagccccgcaggactgcggggctttttttgagccggaacagttggattccggggaaaaacagcgtctggcatcgtctcttacaaagttaatgataatgacaatgataataattatcattgacaaacaaagatatgaagtatatctttacgggtacatgggcggggtgagattcgttccgccagtcgcaaatcattgattgaacaggaaaaacgatggaaatgaagatgccggtccacgtgatgaagcgtggaggaagcccggaagaagcgtcgtggcgtgcccgggtcaccggaaatccgctccgcgacgcgtttgacccgaagatcatgacgcacgcagggatgagcgcgagtcttgtgccggatgaggagctcgcggtccgtattgaagaaatcgccgatacggtccggggccgccggacggttgcctatatcaacgtgccgtactgcgagacccgatgcctctactgtctcttctatatcaagccttaccgcaacgcggaagaaagccgcgcgttcacggatctcctgatccgggagctggagctctggaacaaacgcaacgttcagactggacggccgcttgaagcggtgtatttcggcggcggcacgccgaccgcgctcgaagcttcggacatcgtgcggctgatccgcgcggtgaagaagaatctgccgctcgcgaacgactgcgagattacgtttgaaggtcgtctctcaaacttcgggccggaccggatggaggcctgcatggagggcggcacgaaccgcttttcgctcggtgtccagacgtttgacacgaagatccgtcaggcggtcggccgccgttccacgaaggaagagcttgtgcggcagcttgagcgcctgacgggctacaaccaggccgcggtggtcgtggatctgatctacggcttcccttatcagacacttgaaacctggaaggaagacctccggatggtcgcggagttcgggcttgacggcgcggactgctatcagctccgcgtcttcccgggcgctcccctctaccgctatatcgagaagggaaagcttcccgcggggccggactccgaaatgcggggcctgatgttcgcggaaagcatccgcgcgatggaggcctctcactggaagcgtctctcgatcagccactgggcccgcgcgacgcgcgaacggaatttctacaactacttcgcgaagggccgcacggactgcctcgccttcggccccggtgccggcggcacggtgtcgggttacggctacatggtgaaccggaatgtggacgagtggaaggcgtctgtcgcggcgggcgaaaagccggttgccatgattaccgcccccggccgcttctggaatgaggcccgggcgctgaacgagcagacggaactgaattaccttgacccggcggcgctcgagcgtctttacccgatcgccttctctgaactctggcgcccggcgattgagaactggcttgaagccggtttgattgaacccgatggcagccgttaccagctaaccgtctccggccagttctggcagggacgtcttacccaggcgctgatggatcttctcgcctcagcctcaaagtgacgggaccccgtgaaggggatctctattccagcagggaattaataacaaatgcaaggaaagcatcatctcacgctcatcgccgcgctcaccgccgcggctttcgcgacagccgccggagcggctgaaaccgcggaaaaaaccggtgaagtcgttgtgaccgcgagccgtgtcgcgcaggaattggaagacgttccgatgagcgtctccgtcatcacgtcggacgacatccgccggtcctcggcccggacggtgggcgagctcctggaagacattccgggcgttcagatcatgaatgacggaacgcaggggctgaagcgcctcagcatccgaggtgaggacgcgtttcgtacgctcgtgatgatcgacggtcagaagatttcggagcataagtcgatgtccggcgctccgatcctcattgatccgacggagatcgagcgtatcgaagtgatcaagggaccggcctccgttctatacggctctgacgcgatcggcggcgccgtgaatatcatcacgaagaaagggggcgataagccctttgaagccgaggcgtcgatcggttacaacggcgctggccgcggtttaagcgaaggcgcgacgatttcgggctccacgcacggtttccactatcggctgaatggcagctacgagagccatggcgatatccgcactccctacggaaagcaggaaaacacgaatttccgcgcgaagtcgggcggtctctatctcgcttacgacatcactgatcactggaccgcgggtctcacggcagatacgtttgactcctcaatccacgggggtgttttcggaatgtcaccggacgccttctcggttgatgtgccgaagtggcgccgcgacaaggtggggcttttcgctgaagggaagaacctctcgaagtacctctcccgcgtccgctgggacggctactggcagaagaacgacaaggaaatgctgaaccatgtgagccaggggatgacgatggacaacacggcggataaccgcgtgaagaccctcggcacctcgatccagatggattggcagctcggagcgcgcaatttcctgatcacgggctacgaatactcgcaggataagctttccgcggataccggcgttcacatggtgatgaagcagcccctcggccccggcatgtcgtccgacatggattacacgacggaccgcgtgaatgaagggaagcaaaccgtccacgcagttttcgcctccatggagacgcagctcccctgggatctcaccgcgaattacggtgtccgctacacgtgggtggattccgaaatgaataccgcgacggcgtcgaaaaacggttacacccgcatcacaatgccgcgcagaacgatcaatagagagtatgtgaatgtggatgatgggtccgccggtgacacggggtcgagcgacaacagccgcgcggtctttaatgccggtctcatctggaagggaatcgataacctcgcgctccgcgcgacctggtctcaggggttccgtgccgcgatccttcaggagcgctatctcgcgacctcgatgggcggtcagggaaccctttacgggaacccggatctgaagcctgagacgtcgaataactttgaggtcggtgcccgcttcaataacggcccggtggtgattgacgcggcggcgttctattccgacgcgaagaactacatcacgacggaataccttgcggacggcgtcaacagccgctatgtcaacgccgataaggcaaagacccgcggtctcgaactcgctgcctcctggaaggcgacggaacatattgagccctatctctcgctcacctggatgcgccgtcagcttgagtggggtgattactccacctaccagagcggcacgcctgagttctgggcccgttacggtgtccgtacggctttcgcggtcccgggcggcacgctcaccacggatctttatgcccgaagccagaacgaaacgaagagctactcgcgtacgaccggcgtaaccacccggaccgccggtttcacgaccgcgaacttcgcggtcggctaccagttcgggaagcagggcgcgtatcagctctccgctgaagtaatcaacatcttcaataagggctaccgctacaacacttccacctgggaagctgagcggcacctgaacctgaagcttacggcgaagttctaagagaggagtgcggctttcatgatgaacaccgcggttttcggggagggaaggctccccgacgccccgcggccccgttactgggccgcgcgtgagctcgtcgcgatcggcatttttgcggccgcggcgaagctcacctcgcttctcatcgcactggccgggggcggcatgaatcccgcaacgctgctgctgaaaaatctcgttttcacgacgctcgtcgttgtgatgctctacaaggtgaggaagcagtggacgctgcttctcttcaccacggtgaacatgctgatcagcctcattctcctcggagggagtgtcacgctgattccgacagcgttcgccgcggcgcttctcggtgaaggcgcgatgcgtctcgcgggaggcccgaaaagccggttcggtgtgttcgcgggggttggggtctcggatttcgcggcgaaagtcctgtcgctcggggtctcattcctcttcgcccgcgaaacgccggcccttgtctggatggtcgtgccgtttgtggcgatcggctacatcggttcatttgccgggctcttcaccggagcccgggtggttaaggaattgcgtcatgcagggatcattcagtcttagcgccggagagaggacgtggctcacgtcgctcgacgcccgatccaagatggcggtgacggcggccgcggccgcggcgacgatcgcgttctcggggttctgggctgagttcgcgcttttcgctgcgtcagcggtctacctcgcgagtgcccggcgctggaaagtgtcggcggctgcctacatcctcatggcgctcatgatggcgatgtcggtcggctgcgcgatggtgctcgcccatttcttccccgcgatggcgcgcggcctcgatatgaagagcctctcgatcccgttcctccgcggtctcacgatgatgaacgtgattcttccgctcgccttctcgacccggatacagtcggtgctcggggcgctgcagtcgatgcggctgccgttctgcatttatctcccggcggctgtcatgctgcgctttattccgaccttcgcgaacgatatccgccaggtctgggagtcggtccggatccgcggctggaaactgggccccgtggcgtgcgtgattcatccgttcttcgcgatgcggcttcttctttccccgattctcttccggacgcttaaaacgtccgacgaactcggcatcgcggctgaaatgaagggacttgggctccgtgcccggatgaccccctatcgggaatcggtctggagccgcgcggatacctggctgatggtcacgacgattctcgtgattgccgcggcgattgcgcttgaaatcgcgttcccgggtgctgtgcgagggcctcaccgatgagaaacgagaaagagatggaacccctgatttcgcttgatcacgttacgtaccgctatcccttcacggggcgggacgccgtgacagatatttcaatcgacgtgaagcctggcgaagcggttcttgtgacgggtgtcagcggctgcggaaaaaccacgctgatccgtctgatcaacggtctcgcccccgggtactacggcgggaaggtgacgggcagcatccatgttgcggggataccgaacgcgagccgcacgcttcctgagatcgcggctgactgcgggacgcttttccaggacccggagaaccagttcttcgcgctgaacgtcgaggatgagctcgcgttcgcggaagagtggcggggaacgcctcgggaaggcatccgccggaagatcgaagacgccgtgaagcggttcgggatcggccgcgtgctgtcctcatcgatccacgagctctctgaaggcgaaaagcagaaggtcggtctctcatccatcacgatgacagacccgaaggcgctcattttcgatgagccgaccgcgaatctcgacccggagtcaaccgaggcgctcgcctctgaaatcatccggctgaagaaggaagggaaggcgatcctcgtcgtggatcaccgtctctactggctcgccggagccgtggaccgcgtgatcgtgatggaggacgggcggatggcggaagagggggatttctcgattctgaccccggaactctgccgccgctatggcctccggtccgccgcggtgccggatgtccgggagacgctgccgagaaacgaggaggcatcgggccgcccggtgctcgcggcggacgccgttacctttgcctacaaggggaaggcccctgtgtttgatgacgcgacgttcggcattcaccccgggatcaccgcggtgatcggccataacggcgctgggaaaacgacactcgcccgtcttctcactgggctcgcgaagcccgtgaagggcgggttcctgcttggcggcaaacaggctgacgcgaagacgcttctcgcctcggtgtcgatcgtgctgcagaacgcggatcaccagcttcacatgaagaccgtgcttggcgaagtgatgtcgtcgcttgccgcggccggacgcccggctgaacgggaagacgcgctgccgcttctctcgctctttcaccttgagtcgcttgcggagcgccacccccagtcactttcgggaggtcagaagcagcgtctcgtgatcgcgctcgcgttcgcgaaggatcctgacgtgatcattctcgatgaaccgacttcggggcttgatggcgtcaacatgcggcggattgcccgggcgctggaatcgatggcgaaggagggaaaggcggtgcttgtgatcacgcacgaccttgaactcctgaaactctgctgcgaacggcggctcacgcttccgatcagaaacgaggttctggcgcgagccgcctgaaacccgtttctctcccggggaagccccgggaagcagctctgacacagaacagattttttcactccacctacttaaggaattaattgaatgacggaaaaaacgatggaagaaaaagtggccgcggtgctctcctccaaagccccggcgacgctgaaaacgctcgccgccgcgaccggactcacggagcttgaggcttcgaaactccttcccgcggattcccgggcttatgcggatggatcgaaatttgacgcggtctggagctcggcctgcgcctggccctccgccacgttcttccttgagcatctcggaaacgtgatcgaagtgagctgcaagctcgcggaaggcaagcacggaatgggctactacaacatcttccacggctccccgcttggcggtcacctgaaggcggacgccgtgaagacgatcggtttcatcacgcttcccttcatgggacgcgaaagccacttcctcgcgttcttcaatgaagaaggcgaatcgatgttccaggtctatgtgggccgtgagaaccatcagctgatccctgaggcccgcgacgcgttcctcgcgctgaaggccgagctcggagccgcctgatgacggatacgagacccgtactcgtcgcctacagctcgggcaccgggaacaccgaagccgtagcccgcgcgattgccgggtcaatcccgggttctgtcctcaggaaggcgtctgaggcgggtgacctctcggcctaccgcctcgtgcttctcgggttctggattgatatgggcgtaatgagcgcggacgcgaaggctgtaatgggcagcgcatccggcactccgctcgcgctattcggcacgatgggcggagatccgacgtccccccggttccagtcgttcctcgaacgggttcgaggtgaggcagcggcgtccggagccgatctccttgggatccggatgtggcggggacgcgtaagtgacgatgtggtccgcatgatgcaggaggccgggatgatgacgccagaagtggaagcccggctgaaggcgtcagcctcacaccccgatcagacggatctctctgaagccggagcctgggccgctgggattctcagcactcagcggacgccgattccggactgaggcaaacgaaaaatggaagccggttcatgtaccggcttcccgcttttaaaacataaacataaaaagaaggcaccagaatgggtttagcgaaaatgtacgaactgatcggacccgcgggtgtagcgctgattcttgtcgctgccgcgggtctttacctcacgatctggaccgtgatttatctcatccggaccggccggggcttccgttcgacgatccacgaagcggaggcggacggcggacggcatttccgcgagcggacggaggggaacctgaatccgctcgtctgcgtcgtccgggaagtggtttttacgcatggatcccattcaaacgatatccgggctgaggtcgcgtacctctttcataagcacctcgctcccgtgaataacagcatgtgctggctgaagctcatcgcggcgatttcgccgcttctcgggcttctcggcacggtgctcggcatggtgggagtcttccagacgatcgccgtgaaccaggcaccggaccccgcggcgctcggttccggcatctggcaggcgctgctcacaaccgtgatgggcctcgtgatcgcgattccggtgctcatggtctactactgtctccttctccgcatcaagggtttccggatcgaagcggtggagcatagctaccgcgcgcttgaactggtgcagggcggccgcccgacgcttgaaaaagaagtgaaagctcaggcggaaacgtcgcgcgacgcgggagtccgctatgtttgatgatgagaacgaggaaccccgcattgatctcacgtcgctgatcgatgtgatcttcatgctggtcatctttttcgtgatgacgatgactttcagctcaaagccggtgcttgatatcgtgctgccggagtccactcaggcaaaagcttctgaagtgcccgaagaactccttgttgccgtgaaggcggatggctcgatctgggcggacggacggccgataacgccagatgggctcgcctctttcattgattcaaaacccgcggatgcggtgctgaacctcgcggtcgataagaaagcgccgttcgcagcctttgttaaggtcgtggatgtggcgaaggaaaagaagtccggccgatttgtgatccggacagaggatggaggaaagtgatggtgggtgaaactgcggatcctgtgctcctctcgtcacgcgccggcggccgatggctgacggctggggctttcgtgcttgccgccgcgctgctcgcgacgcagagcttcgatctgaagcggagcgcggctccgaaaccggatttcgcgatggagttccggatcgcggaaacggtgaagcccgcgccggctcccacgccagaagtgaaaaaagtgcccgaggtgaagcaggtccccaaggcagcgcccgtcacggctgtgcctcccgtgaagcgggaggctcagaaacctcgggtgatcgcgtcgcgcaccgccgtaagcccggtgactgttgaagagccgaaaccgacagtcgctcccgcggttcctgagattcaccgtccggtaacaccgcatcctgcggtttcctcgccggccgcggttccgccgagagccgcgacccccgccgtaaaaaagtcgccggccgctcttcccgcggcaccgcagcccgcggtcaagacttccgacgtggcgtcgaaactgatcgccctcgtggagcgaaagaagcgttacccaaagagcgcccgccgttcaggcacagaaggcgttcttgaaatcacgttttcgctgagccccgcgggaaagatcctgaaagcctcggtatcgaaaggttccgggttttcagttctggacgcagcgggtgacgtgcttgcttccgcacttatcggggaatcggttggtgaaaccggccgcgcgatgaaaatcacggtcccgcttcgttattctctgaaaaacagctgatgattcaggagattgaggtaagtctctgcctgatctcaaggcagaatcataacgtcgaggaaagattcagactggggtgaatttgtattcgctctggactacatgagatccgggtaaaacgggatttctccgcttttcagtatcagtcagaagaacgataagacgacaaatcgctgacggtatcaggttgcttttacaaattttcactgtagagataacaaaaatttatttaaacttttatccagttcaaaggtgattccatctgaaaatcaggaatcgccagacggggaggatatgagtgtgaagcctcccgtcagacaggcgcacggcgctttctgccgtctgcgtgcagtctgcctttggagactggaagcagaagcggctttccagggtctaaacggagcgtcagtccggtcgtcatagcgttccgtacaggcggcaggctccgcgcgccggatgaggttttccttttgtgtttcgcatgacttcctgagctattcttatttcagatccgggcagagcaatccgcccggtttttttgtgcgtgacgcagcaaaaatcccccgggagaatgagatctcccgggggatttcggtatcagaggtttgcttcagagagaagcgaaacgctgattagaacgtgtgacggataccgacgttccagcgatagcgctcatccacttcgccgcccgaagtgcgttcgaagtcgacgtaaccgtaggtgttcttcgtgaagctgaagttggcaccgacaccgtattcaacccagaagccgccgaggtcgtccttcaggttgctgcgggcagaggcattctgagcggacatcttcaggtcgccgaggaagtcgtagttgccggacacgcgggcatagatacggcccttgttttcagcgaacttcgcgccggcgcggacaccgatgcgggcgatgagcgagttgtagtcgctctggtcaatcttcacaccgttcgaagccgtgtcatcagcgccgccgaccgtgccgtaggtgagttcagcctgcggttcaacgaaggcgtactggccgaggtccttatgccagccggtttcagcgctcaccgtgaaggcgttgttgtcatagccgcccttcatgttgccgaactcgtagtcggtgctcatgcgggtgtatttgccgatcaggtcgacatacacgccgttcgagccgaaccaggtgccgtaggccgcgatgctgtaagcgtccatatcgccgtcaccgccggtgtaatcagccttgccgttcgtgtagatgaacgcgccgccgaccttccagccggtctgggcgatatcggtatcaacaccgacctggaccgagttgttcttgctcgtgagaccgttgtcaccgtaggagagcttggagccgtagacacgggcccaggcgccgacacccttcggagcgtcgcggagttcgcccatacgtttcgtgaggttattcaggtcgtggcggagaagcgtcatcgaaatggcgccgatcgactgcaggctgtcgagcttggtgttgcggacaggcgcggcaaccgtcgtcgtgccgtcggtgttctccgtgatcgtcagagcgccgttcacatcgccttcagcgacggtcgcgacacgcgtcgtttcggtggcgagtgcgccggtcacagcagcggaagtcagtgcggcgagttcagaggcggagatcacgtctgaattcaccgtcgtgccattcgtgccgaccatattcacggtcagggtcggagtgccggacgtggtgctgaccgtggtagcggaaagagaagacgtcttataggtgccgtcagcattcttttcaaccgcggtgttcaccgtgccgcccgtgccggtcagattgtcaatcgtagcggtctgggaagcatccgagaacgtcacggtaccgttattgagcgacaggttattgatcgcgagcggggtcgtggaggagccggactctgacgaagtcgccgtagcggtgttggcaacaatccaggtgccgccgttagacagggagaggttaagccccgtcacggtgtcgctggaggagttgcttgccccgccgttactcagaaccgcattgccagtccagaaagagttggcatccgagagattgagattgacggtcgaatcagcgatattaccggagttagcttcgttgtagttgtattcaatattaccggtcagctggacggtcttgtccttgttcgggttgatcgtgataactgatccgccgcgggtcaggatggcgtcgccgctgcctgcgttcacggtcaggttgccgttgacatttacgcggctgtttgacatcgcaatgatgccatactggtgagactcaccggcgccggacgtgacattgatcaccgtgtcctcggcattgatgttgatcgtggaaacgtcacccttgtagtcaggagtcacagagctctgagcgaagaggccgtaggcgtcgtccgtatccgagtgagcgttgatggtgagagacttgccgttcaccgtaaccgtgctgccaaccttcgggccggcaaagataccgaatgccttgcccttcgtggcggtggcattcagagtcgtaacggaagaatcctttcc

SEQ ID NO: 1340 - DNA, 13825 bp, Unknown
  gut microbiota DNA sequence
aaataatgattccgcttctcaattaaaaatatcaatgaagataacgaaaattttatgatagttatgctgtttttaatgaaatccgtagatcgataaaggattaaaaacattacatcattatttttaattaattttttcacaccttaactttctgaattccgggtaaaaaaagagcctccgggcagtgatgccgggaggcttttccgaagaggttatttacggaagcttcgcggggccgtctttgtccggaacccagggccagagcaccttgggaaggtggtagctgtcatttttggattcatcgcggaatcgatcgatcaggtcatcccgtccctcacggacaaggcgcgcgagatccgggttcagcatgacagattgcccggcggccgcgaattccgtccagccggaagacaccgcgcgtttaaaatctgccccggtcacaagctccccggctccgatcacggcagtgcgtcccgccacggcttcgtgaatcagttccatccgggactttgaggtgtcggccccgcgtcggaccgcatggaagaaattctgctgcgacacatggagatactggatcggacgcttggcgatctcagacaccgcagcgagggtctctttcatcgtgatgcctttttcacccggctgctcaggcgtgatccgatagccaatgatgaaatccttctgtccggccttttctttgacatcgatgacggcatccagcaccgcgagcgggaaccgaagccggttttcaagcgacccgccccagcgatctgttctcctgttcgtttcttctgacacgaactgcggaaggaggaaaggaccggccccgtgcacttcgacaccggcgtatcccgccttcatgcagagttcagccgcgtaagcgaacttctgaatcagtgactcaatctcagcttcggtgagttctgacgccttctcgtccggcgtagcggaaggtccccgcggctgatggtccgggaggaagtcggggttagcgaggatcccgccgtggaacagctgcgcgatcgggatcgcgccgagcgaccggacgatttccactctttcccggaggctcggaaggtcagcctctgagagtgcccgggcctgtccgtagaagctttggcctccggcgtcgacgagcgtcgcgccggttacatagagtccgaaaccttcgccgtgatgcttcagaaaatcgcgttcatcgtcgctcaccgttccatccgggttctgacagtagagcgtgagcggggcgaccgcgagccggttcgggaccgtaacgccgttattcagggtgtaaggaagaaagagattgctgtaatcgtttgtcataaagggaacctttttcattcaaaagccggaggaactgcttgagagtccgtgtttccggcgttcccggtaatagtagacgcgggtactacgagctgtgaggctttctctcaaccggtaaagagaagaaaaagcccggagttcagtagaacggccgggctttttagagtggaattcagttgagttattgcgggagacggggccagagcaccttcgggcagtggtaagccgcttccttcacggggtcgagctttgtctgaatctcggaatcgcgtccctcgcggatcagcgtggcgagatccgggttcagcatgacggcgcgccctgtggcggcgagttcaacccagccggtgccgatcgccttatcaaagtcatcccccgtgaagaggttcccgagaccgatcagagcggtcttccccgcaatcgcttcgtgaatcaggtcaagccttgagcgggtttcatcagcgccccggcgggcgttctggaagaattccttctcagacacgtggatgtattggatatcgcgcttgataagttcctgaacaagggcgagcgtttccttcatcgtgatgccggcctcttcaggttcctcaggcgacaggcggtaaccgatgatgaaattcttctttccggagcgctcctttacgcggagcacggcgtcgagcaccgcgagcgggaaccgcatgcgggcttcgtttgagccgccccattcgtccgtgcggtgattggtcgcgccggaatagaactgctgaatgagatagcggttggcgccgtggatttcaacgccgtcgtaccccgcgacgaggcagagttctgccgcgtgggcgaaggcccggatgatcgcttttacttcaggaggcatcagagcccgagcgccgcgctcttcgttttcactcggccccaccggaacatgatcacgaagaaaagccggattcccgagaatcccggcgtggtggatctgcgcaatggcgagagagccgttcgcgtgcgtcagacggacgcgctccttcagggcctggaggtcgtaatcacggatcgcgcggggctggccggggaagccctggccgttatcgcttacgagcgtcgcgccatggatcaccatgccgaaattccggccgcggcttgaaatgaaatcgcgttccgcttcactgaccgttccgtccgggttctggcagtaaagtgtcagaggggcaatgacaagccggctttgcagcgtgacaccgttattcagagtgaaaggctcaaaaagctttgcgtgggaatccgtcattgaattgcgctcctcttatatcagtgattgggtcagcagaccgggcgggctgattatagggcgaagcgggagcggaaactttttttcagggttcagccgtggggaaagcggctgcggtcaaagggtttcccgtgcgcggcgaagagagcttcagccgtgatcggtacgggatcagctccatcaggctcaatccactcggggtaataagcccggatctgagcgggagagccgaagaagggcagggggagcgatccgagctcttcgatcgccctttcaagaattcgggtgtcactcccggggagcgccggaggctgccttctcagatccagcttcaaacggccgtccggaaggttcccgatacgggtcagccaggcgagcggcggtttcgtggactcgagtagctccttgatttcaaggacatcagtcccctccgggagagaaaccagagttcctcccgtaagcggaagcccccgctcgagcagcgagcggcgttccgacaggtagaagagcgacgagagtgtcgccttcgtcataacacggcccgatctgccgaggaaccaggccgtgatatccgaggctttgatgatgctgaacattttgtagttatgaaaggttttaaagccttcgtttccgactccatgaggtgttgaccttacccgtattcccgaagaggaaaacagtcccgggaaacttaaaatcagaaagaagacatcgcaaacttgtagagctttgctttcgaccctatagcatacccaaaagctatgcttaacgtatacaccgtaaagatttcgtgaatatgaaagaacagaacggcagtacatcaggccgcccgatgaggcggaaagagcgtgaactcaccgtggatcaggcctgggaggtcgtggaggggactgatcacgcggtgctcgccacggttgatgatgagggaaacccctatggggttcctatcactcctgtcgcggctgatcggaagagaatttacttccatgcgaccggaaaaccgggcggccggaaatcagacaacatgaagatgaaccgcagggtatctctgacctacatcggaaaggaactgacggttccggagctttatacggttgactacgcgagcgcgattgtggaaggcacggcatcaatcgttacggatccggcagagcgcgcggaggcgatggttgccatggtgaggcgtcacgctcccgggaattctgatgcccggaacgcgattcagtttaccaaccggctcggggcgctcgcggtatggcggattgatgtggtttcgatttccggcaaagcccgtgccgcggccaaatgggaaaccggaaagacactacaggaacctacgccgatgcctgtgcagccgtggcttgtcggcgctccaaagtagatctgaaatattttaacggataaaagtccgccgagtgactctgtgaggaattgatatcaggcacctaaatttgatattatagaagtgttaacaattacgaaagtcagaggcgcccggcatgacgagcgataacgatcggctcagagccgtatttctgaagcgttcaaaaatctcccagcgggagttcggtgagcgttatggtatcggcacagccggcatggtgaatcagctgctcctgggccgtcggccggtgagcctcgccgcggcggtgaagtttgccgaagggcttggctgcgcgattgatgacttctccccggaactcgcggctttcgcgagaaaagcggcttcctttacgcacgagattgaaaccgatattgacagcgcgattcatccgaaccggataccggtgctgacgggtgaagaggtggcctcaagaagccgcggcaaagaggatgagcccgcgggctggactcttacggatcaccgaatggctgaaggttccttcgcgctcagaatcgaggatacgcagatggaaccgcatttcaccgcgggtgacatcgtgattattgagccgatagcgccggccgcggggggctgcgtggccgctctcccgtcgggtgccggcagagcagtgtttatgcagtactctccgaaaacggatcccgtttccggaaaaacggaattcgatcttctgccgagcaacaatctctatccggtgcttcactcgaccggaggcaatatccggattctcggcgtgatgaccgagcaccggtcgtacagacggaagcgctgatcgggaaaaccgatgaaaaacaagcgggaagagatctttggatctcttcccgctttgcttatgagagaaagaaaacgccttttacttcagcgtctttccgtgagccttgaagaccgcctcgagtcgtttcgcgtgtccttcttcctcaggaatggtgtcttcgatggcgtccgcgatatcgtcgcggccggctgcacggactttatccgcgatcgactgaagcgcgggacgggcgctcgcctcagcctgccagaaagcccgggcacgatcccagatggcgtcctcagcgctcacgccttcgccgagcatggaagcgtaacggccgccgtgcgccgcgtcttcgttcgcgttggcctgcatggcgtccgcgaggtcgttgagaccgtgttcgcgcgcctgggcgatcagcacgtagtattcctcagagcctttcacttcagccgtgtgaagcatccggatctgatcctcgaacgacgcgcccttggcgcttccataaaaagccataatcgggttctccttggtattgatacggtttcagttttgagtttcttctgagaaacttatcctgtgcttagctgatggcccggtaggtatttttctgcgcttcttccaggctctcaggccagctgccgttcgcggcattcttgcgccagaacgcctcgcctttccggaactgctcgaagtcgccgcgcgggctgagaccgaactggcttcggtagtcgcgcgagaactgcgcgggagattcgtatccaaattcgtaacctgtctgagctaccggaagtcctgagagtatcgctcttcgggcttcctggagtttgagtgatttctggtattggagcggtgactgtccggtgacctcgcggaaataccggtagaacgtcggctgactcatgccgatgctcttcgcgagctcacggaagtcaatggaattgcggagatttttccggatttcaaaggcggccttacggatacggtactccggagcgccgaccgtgaagatctgccggaaggcggccccgccctggctcacgaggaaccggaagatgatttcgcgccggataagcggggcgagaatcggggcttcttccggcgtttcgaagagttccacgagtttcacgtaggcgtcaatcactttgatatccggctgcatgatccaggcggctccggagagatcctccgcgtcagcccgcttcgggatcggaatgccgcaggcgtccatttcggacgtgatcttcacgacctcatcctcctcaagatcaaatgacacgccaagaaacggtgtctcatgggtcgcgccgatcgcctggaagctgtcgagcatgtcgacaccgaccacgaggcattcacctgccgtgtattccactgtttttccgcccatcagggcgcgtttcgctccctgcacgaggagccccattccggggtgagccgagcaggtggcggcgcagttcgattcatcgcgccggtgcagcgtgacaccgcagagcgtgcgcctttctccggcttccggaagcagcttcatgtgaagtgatgcgattgagcgcagatgctcggcgtaatcagcgttattcatgagggattttctgactggggaaataaggctctgatcattttaatagtagagagaaaaggtttagaggcttttcaggactgataaaaataagcaagtaaaacagaaatttccccgtaacccattggggagccctggggctacagttttctccgtggaccggatgaggataaaagcagccgggaagtgggggaaaggcatgaagagaaggtcattattaaaagcaggggccgcgttcgcggtcccgggagtcctgagtttcggagcctcagcgaagccggtctccaaggcgaaggctccgaaagttttggttgtctatttttctcggcccggcatgaactatgtctcaggcgacatggtgaaccttccggtggggaacacggaaaagttcgcgaagatcatcgctaagacactggatgctccgctcttcaggatcgaaccggtaacgccttatccgtttgactaccggaagaccacggcgatcgcgcgtgaggaacgttcggccggaaaggcgagggacgcgaaagcgatccctgatatccggggctacgacgtgatcttctgggggcacccgatctggtacggcgagatgccgtatatcgtgcggggcgtgctttcaaagcttgactgcgcagggaaaacgatcgtcccgtttgtgactcatgaaggaagcgggatcggggatacggcgaatctcgtccggtcgttccagaagagggcggcagtccgcgaggggcttggcattctcgggacgcgtttcgcgagaaacgaaccggtggagcctgagatcactgcctggcttaagcgcctgggctatcagaaataatcaggaggaatttcagtatggatttcaacggaaagaaggttgctgtggcacggttttcgcgccccggcatgaactgggtgtcggggtcgattgtgccgcttaaggtgggcaacacggcgaaactcgcggacgtgatcgcggaagaaaccgggggctcggtgtacgcgattgaacccgcggcggcttaccccgatgactatcgggcctgcaccgatcaggcggcgaaggaactgaaggaagactgccggccggcgctgaagcacccggttccggatatggctgatgtcgatgttctttttatcggatacccgatctggtggggcgaaatgccgatgccggtgaagacgtttcttgaatccgcggatctctcaggcaagacggtgattccgttctgtacgcatgaaggaagcggcatcggtgcaacagtcgggagcgtgaagcggctcgctccgaaagcgcgtgtcacatcaggtctcgcggtgaccggatcaacggcagctgagggcggtgaagcgctccgccgccgcgtcaggactttcctctcctcgctctgataacggactgaaaggagactctccggatggtgatcgggagccagacgctccgcgcggtcattgataccgtgaagaatcggctcgaagactttgagtctcaggaagtgatcgccgcgtcgacggatatcactgagtcacgtctgtgaaaattgcccggatagaaacctatccgggctttgccgctcagaggccttttctcgggaatgagaaaaaggccttattcatttcgtccgtgtatttcgtcgcgcggacagtcagccagtcagcgaagagcctgacgcgctttttccggagtgccttttctgttgtgatcacgcagcagtgccgcggcggtctcgtccatccccgcatcacggggacaatacggccgtctttcagatagtccacacactgatcaaacgccatgtcgggtacgatgccggcgcctagaaggagtgcgtcacgagcgtttacctgactcgtaaatgccatagtctgcttccagtcgagcttttctgtcacgccgtttttggagagataggaaaccgaggttcggttcggaagtctgaggaggagtcccgtgtgacgcatacagtcagacggccgctcaggctctccctgctgtgtcaggtaggcaggagacgcacaggcgatgaaatgcatcgggccgcagtcgcggagaatggcgccttcaggaagttcgtctgacggccggtacatgaagacaatatcgtttgactcgttatctggtgtggtcagaaattcggaaacaccggacaccatatctttcacttcaatcgaaattcccggatgcttcatctggaactcgaccgcggaaggaacaatcaggctttcacggaacccggcggtagaggcgacatgaatcggaccggtaagtgaatcagcagagtcagtcagttcttcctcgagctcttcctcaagctgcaggattctgaagacgtagctgtagtagcgcttgccttccggtgtcagcttcatcggacgctggcttcgatcgaagaattttgacttcagttccttttccatcgcgcggatgatccggaaggcgttacttggctcaatatgaagcttttcgcaggcttcacgggcgcttccggtttcaacaatttcgcagaatacgcggagattttcgaggttctcgattttcttcatggcgtcctcctcctctctctgagtctgctcccgcggagttcaaaaacctgttaagtggctgaatctgaccacttattggacggctatgaacctttaccgcctcctgatgatctccaataatttacttaagtcattttacttattcagggatagggagtgggtagatgacgagtatccctgtgagggtccggggcctgggtaacagacacggcctggacttcggacacccggtcgggaagaacaggagaacgaggcggaggagttcgaaccaccgcccttccaaagcaaccaagagagaggagggaacgttttagggagggtcgcaggtctaaacctcccggagcggttccatgtcatctatgtcaatatttttctggattgagctcgtgatcgtgcttgccgtgatttttatcggcgcgcggtttaacggtgttggtctcggtatctggggcggcgtcggtctgttcctgatcgcggtccttttcggcgtgaagccgaccgccccgccggttgatgtgctgctgatcattcttgctgttgtgacagcagccgcgacgatggacgcggccggaggcatcgattttctggtgtcggtggcagaaagaattattcgtgcgaatccgaagtacattacgattcttgccccgctggtgacctggctctttaccttcctcgctggaaccggacatgtggtgtatccgctgcagcccgtgatttatgaagttgcgatgtcggccggtatccgtccggaacgcccgatggcggtggccacgattgcctctcagcaatccattacggcatccccggtctcggcagccacggcggccatgctcggcatgttcgcggcctataactggacgagtttcggtcttgcccagattctcgcgatctgcgttccttcgacgctgctcggcgtgattgtggcgggttttgtctccatgttcctcggaaaagacctcgctgatgatcctgaattccaggcccgcgtgaaggcggggcttgtgaagatgccggatccgaatggagcgaataaggtgctgaagcctcacgccaagcgttccgccattgtgttcctcgtctttgtcgcgatcgcggtggcctccggcctgattccggaactccgtacgcttcgcggggaaaccaagccgctcggtatggcgaccgttcttgaaatcttcatgctcgtgaacgctgcggcgattcttgtgacctgccgcccgaaagtggacgatatcgtgaagaccccgacgatgcgcgccggcgtggtggccatgatcggcattttcggtctggcctggctcggtgactcctttgtcggtgccaataaggcggatcttcttgccgcggtcggcggtattgctcaggcgatgccctggacctttgccttcgtgctcttcttcgtttccgtgctgctctactcgcaggccgccacggcccgcgctgtgatgcctcttggcgctgctctcgggattccgcctcagacgctgatcggtatgttcccggcagtgaatggctacttcttcattccgacctatgggtctctggtcgccgccatcgcgtttgacggatccggaacgacgcacatcggcaaatacgttctcaaccattccttcatgattccgggtcttgttgcgacgattgtggcggtgacgaccggtctcggcatcgcggggattctttactaagaaacatggtttgtctccggtaatccagggaggccggggaggggaggattggaaaataatcgggaacttctcctctcccttcttttttcctggcatcggacgataaacggaacctcagtgttttgaagggcgggaagatattcccgccctttttctgtctctaagctctgtcctcagatccggtcagtcgcataatgtcggaaagaaaattaaatcctaaaggactgcggaatatggccggagaaaaaactgaggagcagggcctcaccacggcggacgcgctgcttttcgcggcagccgcgggcgttgcggttggaaatctctattggacgcagccgcttctcgctcggatcgcggaaaatttcggcgtgcaggcgtcggtcggcggtcatctgatgacagccactcaggtggggtacgcgctcggcattctgctcctcgtcccgctcggcgacatggcaaaccgcagaaaacttgtcaccacgcttctcgcgctctgcgcggtgtcccttgtaatcgcggccttcgcgcctcacttcggcgtgctggggctgtcacttgcgctggtcggttttacgaccgtgtcagggcaggtgattcttccgatggcgggcggccttgccgctccgcaggaccgcggtaggattgtcggcattgtgacatccggcgttgtggtcggcattctgtttgcccggaccgtgagcggctttattgcgaatctcgcggggtggcgttctatctatattgttgcggccgttctgaatatcatcctcatcttcgcgttaagaaagcggattccgactgccccgggcggcgtgaggatgccgtacccgaaactgatcctttctgtcttcacggaggcccgccgggttaagaatgtcggaccggtgctgctgatcggaggctttggcttctgcgcgctgcagctcttctggaccgcgattactttccttcttgccgctccgccctttggctacaacacactcgagatcgggctcgtgagtctcgtgggcgtcgcgggcgctctgattgccgcgaaggtgggcgggctcatggaccggggtgtcggtattccggcgcaggggtgctttatcgcgctgggggttgcggccatgctcgtctcttctctggggagtcactccattattctcgtcgtactggcggcgcttctgatgtcgctttcattccagggaatcggcattctgaatcagaccacgctcttcctgcttgccccgaagtcgaggagccggctgaacaccgcgtttgtcgtgaataactttattttcgcggcttttggatcaacgctcgccgcggtgctctgggattatggcggctgggtgatggtgtctctcggcggtgccgcgtcgcttctcatcgcgctctcggtctgggcctgcgcgaagaagaacctgaaggcggcgacagatgctgcccggggagaaaaggcggaataaagagaagaggcgccgggggcagacgaggggagcgagagggaacaaccgccactgctctccctctttaggccttagattatcggatgattgccttcgcggcgaaattgaggaaccggtcacgccactcggtcggatacccgaaggacgtcagatgtttctccttcagtgccatccagatttcccggttttcgggcagagccttcagcatgtcatccatctctttttcagggaccgagtcatcccgccccggatacagataagcgacagggattttcacttcccgcagcgcgtcaatcggatcctctgaaacggaatccggcagaagtctggctccgagatgaccgactccgggaccgtaacggcggatcatccagccgcggtgcgttgccgtcacagcctcaagaatgatcgcggcggcgccatctgggtgacgtctcagaagcctgagcagcgcgtcgcccccggggccctgaccgaaaagcacgagtttatccgcggatacgctgcgcacatcccgcgcgtagcggtaaaccgcctccgcatcatccaccatgccgttcagcgtgagtttcccggtggagcggccggtttcctccggatcgtagaggatcacattccacccagacggaacgagccaggaaacctgaggcaggtgaaagcccatgttccgtgtacagcagtgagcgtagagcaccgtgccctggagcggtttcccatcctgcggcagcgccttaagccacagtccggagatgacagagccattgggccccggtgtctcgaaggtttctccctcgagaccgaactgccgatggtcccagtaccgccggcggtcagtttcaaagaaaagtccttctgctatccgattcagaaatccagccataccggttccttcttcaacgcatggtcaagtcacttcttgatcctacacattctgaagctgaggaacagagcgattctgatcacttaagaaaacggggcaggtacagatagttctttattacatgtttattactgttaaaaatatcattttttaacagtcaatttgcgtaattaaacggaatagccgatgattctgtcgataaaacctgaaaaagctggccgtatggaatccgctattacctcatccttttttctcggggcgctcgtgtcactggtcgtcatcacgaatccgctcaccaaaatcccgcttttcctcagtctcacggaaggctggagctcggggcggcgccggagcgaagcggctcacgccgcgctcgacgcgtttttcatcatggtggcaagtctcgtcgctggtaatctcctgctctcgtttttcggcatttcttacggagcgatgcggatcgcgggcggctttgtggtagccgtgatcggaaatcagatgctgtttggcgtgaagacgccgaacgattcagagcacggtgaaaaagggagcgacggatgcgcgttcttcccgctcgcgatgccgggaatcgcgggccccgggacgattgccgtggtaatcggtttctccactcagatcgcggaggcggacggtctccagacgaaagccgcgatgtttgccgcggtgaccgcggctgcggcgctttcctccttcctcacctgggccgtcatgcggggagcggattcctgctcaaaggcgctgggtccatccggtacccgggtcctcaccaagatcatgggttttctgctgatttcaatcggaattcagtttgtgggatccggaatcctcaccttttttccgaagtgagaggctggaggatgcatgtcagattccgcgtcagtaaatttggcttaaatgttgaaaaaagatgtccgtagtc

SEQ ID NO: 1341 - DNA, 520 bp, Unknown
  gut microbiota DNA sequence
agccgccatcagtatgcattttcctaggctttatcaggcactttttgtcaaatccgattaagtcctccctgccggccttcacaagtgcctcgtgcacgagatcgtaattctttggattgcggtactggatgagtgccctctgcatagccttctcatgcgggttagttgtgacatacaccggcttaagtgtcgccgggtcaagccctgtatagtacatgcatgtagagatggtagacggtgtcggatagaaatcctgcacctgctcaggcatatatcccagatcgcgcagatactccgcaagctctatcgcttccttaagcgttgagcccgggtgtgatgacatgagatacggcacaagatactgctccttgcctatttttttattcatatccttgtatgccttcacaaagctgttgtacacctctacactcggttttccaagcctgctcaaaacagcattggagatatgctccggagctaccttgagctgtccgctgacatgatactcacacagctcacg

SEQ ID NO: 1342 - DNA, 252 bp, Unknown
  gut microbiota DNA sequence
gacaacccgtattctgagtcctttttccgtacgcttaagtacagcggcgattgcctgtatccccgagacggctttaacagcgtcgaggaagctgaacaatgggtgcaaagttttgtggaacattacaacgagcaccacagacatcgcggcatccgaatggttacacccggacagcgttaccgctgcgaagatgcggaggtgctgcgccgacgcagggaaacgatgctggaggctcgcagaaaccacccggag

SEQ ID NO: 1343 - DNA, 13594 bp, Unknown
  gut microbiota DNA sequence
cagtaaatttggcttaaatgttgaaaaaagatgtccgtagtcaaaacttagtcaaatttacatgtgatacgaaaaaataaaaaaaattaagttaaacagtaagtaaaaataattgaaacccacttaaatcgtcaacttgttgtaaaatataggtagacaaaaagagagtctccggttaattcgcgcgggttgtggcgcgagcttcattgcccggatttttgttcagcttcggctccagagaatgagccccatataagaaagaatgaaagaactatgcagtcatccgtcatcggccggatgagcagaaccgcgggagagtttctcctgcgtcggtctgctcaccggaccgcggcaaacacacagccgcggaggagaggcggaggctgtcctgatagaagtggggagtgaattatggccacaacagaagggcttcgcgctgaacgccttgcgcgtgtaaatgatgctattcagggcagcggctataaccagacagaaatcgcgcgggcgatggatgtgtcgaaggcggcggtatcgcgctggatgacaggggcaagctgcccgaccagagataagattgttgcgcttgagaagctgcttggacttccggctcggtcactcgtgaacggaaccacaggcgctccctccaagtctgaagaggagctgacggttgagccgctcatcccgtcgcgcggcgaaggggtgctgcagtcagtccggctgtcgaaatccgctattgagtcgttcgggctgaaaccgggctcgatcagcgcttaccggatggataatccggcgcttgggcagctgatcccgatcggctccgttcttatcgttgaccggagcgtgaagaccgctcaggcggaaggcttctacctcgtgcaggataacggcgtgaagcggatcggacgctacacgtttaagccggatgggaaaccgcgcctcatgcgggggcttgaggatgacccggcgagcgccatgccgcctgaaacagaggtgcttgggcgtgtgaaggctgtgctcgtggtgacggagacataattccggcggcgcgcggtcatggcataagaaagggcggctgaaaagccgcccttcgtgtatccggatgagaataccggtaatcagagttccgcgagatccgcccggatcttgaacaccgccttcttatgcatggcagggcccgtgaccgcgaggttcggcgcgtggcgctctcccgggaagtagatcgcgaagtcaccaggcttcatcgtcacggtttctgccggatccagatccgggtaaaaagcgatgtcgtcacgctcaagccggtcatctgtgggtgtcaggtggttcgcgtgggtaatgaagtcctgacgctcgtccccttcaagcagcagctgaatatcgatatagcgtgcgtgagcctcaaactttcggtctgaagcggggcgcgtcatcccttcctcaacattcacgtaaaatgccgaaccttcaatttcgtgacgcccggtttcgaggtcaccgccatgcgccgcgaggtaagcgaaagcgcgcgaaaagacttcaggaagataggacttcaggtttttccactcggacagcgtgccggaaatcatgtcgggttctccagttgataagggatggggaagctgccccgtcccgatgatgtccgactattttaggacggctccagggtgttctcgcggatactgcgtttttccccgaaatagggaggggaaaaagggctcagtgtcagacgtccgcgcgctttgcgttacgatgaaaggaccaaatgaaggaggatggttagaagatggcttacgttgtgagcaaagcgctttcaggccgcacggtgaaggtctaccgggagagcgaatatccggtgcctgtcattttctcgacccagtatcaggaacaggggaaaacggtgctcgagctgctcgcgaatctcggcgcgccggaagtgaatctggtcacgatttccgatcttcactgggaagaggacctgtccccctgggctcacggctctgtgctcgcttcaaccgatcacttcacgggcggcgcgcctcagtatctcgagtttctcgagaaggaagtgattccgttcgcatcgcagcacctagccctcgatccctccacgctgattctcgcgggctactcaatgtccggccttctctccgcctattcgctcttcatgacagacgacttcccgtacctcgtttctgcctcaggttctctctggttcccggggttcctcccgttcgcgaaggagcagggaatcaagggatcgccgaaggcggtgtatctgtcgcttggtgacactgagagccattcccggaacccctacctcaaggaaaacgcttcagtcacgtccgcgattgccgggctcagccgggaagcgggaattcccacggcgctgatctgggagcggggcggtcacttcaatgaaccggccgcgcggcttgcgcgcgggcttcgctgggtccttggcgtgatgcggggagaggatatcaagatcgaaagccggaagacgcctgacggcgtctgatccgcgtttggtatcggcttcacagaacgggaaagcgtttcagacgccttcccgttttttatcgggcgggagacgccccggtctttgcggaagcgaggagctcaagcgccctttcgatcaggcggagacgcggttcgactgtcgcgagatcgagatactctttattcgggttatggagcaggccgccggagggcgccagggcatcgatcaccgcgacgccgaaggacgcgagctcatttccgtcagacgcgccgcccgcctcagcccagacaggggagggaaggcgaagcgttgcggcggcccggttgatgagcgtgatcagagacgcggactctgcggaaagcggaagcgccggaccgagactctcgattttgaggtctgatgtcacaccgtccgcaaaccccgtgaggcagagtttcctcatccggaaaatcagctcatcgcggtccctgtccgagccgtagcgaaggtcaaacgtgaccgaggcgtgctcagccactgtgttcgcggttgtgccgccagagacaagtccggtgctgatcgctgtgccgtcgatttcagacgccagatgcttcagctgcggtatcgcggcagccatcgcgtcgatcgcgttccgcccatcctcggggcggtttccggcgtgcgccggcaccccgtggaagtccacccggacggtgcttgaccccttccgcgccctgacaaaactgccatccggccgtccaggctcaaaaatgaaggcggcgggaacgccgcgggacgcttcacggagaaactcagcgtgttcgcgcggagtgatttcttcagcgggcgtcagtacaaccttaagggaaagacggtcttttacggcagcgggaagaccggatgcgatcgcagcgatggcggcgagccccgagcggtcatccgcgacaccgggaccaaaggcgaggccctcatcgattctgaaggggtaacgcgcggcgctccctcttgagtgcaccgtgtccagatgcgcgcagagcatgaggtcagcggtttctgactccgaatgattacggaaaacacacgcgcggccgtaggaaccgacttcaggccgatcggtttcccagccaagttttctgaaaatcccttccatcacgtcgcccgctttcgtgactccttcggcgtcgcctgacggtgaatcgattccggtcagtgttctcagaggactcagaaattcaggccgaaggttcatgggaagtctctccttgtctgggacgtgaaaaacaaacaataacctctcagtttaagcggaaaagcggcggctgtgaccggcaaaagacggtatgccgcacgggataacaaaaaaaagaacttcggggcaatacagatataatgattcttatagccccgaggtgtttcaggagaggaaactatcacttcagtgagatagctccggggtatccaggcaaaagcggaaccggccgcacagggaggaaggccggaccgcgctgtgcctctaaaaggagccaatatgaaaattctgtttccggttgatggcagtgaatacagtgtccatgccgcgcacgtgatcgcgcgccgcgcggagcttcagaactttaatcctgaggtttgcgttctcaatgtgcagaaggcggccgaactgatgattccggcactcaagcttcggcgttctgccgctaccaaccgccagtctgaagccgccttcaagaaggtgcgtgacattctgaagaatgtgaagactgaggaaaaagtggtgatcggaaaccccgctcaggtgatcgctgaagaagcggaccgtgagaaggcggatctgatcgtgatgggatcccggggtctctcggacttcgcgaagctcttccttggctccgtctccacggcggttctcgcccgcaccacggtgcctgtgatgctgatccgcagcgagtacacctctgaacccggcaaggaactgaaggtctgtgtggcagtcgacggttcgccttactccgaagccgccgcccgctatatcgtggcccaccgcgaaatgttcggtgaaaagccggatgtccgcgtggtcacggtggtggatgtggctgaagcgatcgcgtacgagtacccgacggatgtgccgcttcctgaaattccggcagagcgagaagccgctgaaaagaatatggatgagattcagcagctgatccccgaaatcgaggagaaggggaagaaggaagccatgtcgacgatccgcccgatttttgaacaggcgaacttcccggtgacggaagtggccctgacgggtgatccgggcaccgagatcgcgaactacgcgaagactgagaagctcgacctcgtcatcatgggaacccgcggccgcgataatgtcgcctccgtcattctcggctccgtcacgagccgtgtggcggcggacggttctgttccgctcctcgtgattccggcgtaagaatctgtttgccgtcccgggagacttctcttcgggatgggaaaaggatttttaagtatcaggcaggaagccgttcaggtttcctgccttaatttttttgctgaagactgaaagccggtaatccggatggatgcagcgagcggatcctgacaccgtatactcaggagcggctgaaaaatcaggcagtggcggtctccgggatcgcttctgtctgaaggtatcaaaaggaaaatagaccgatgtctgaaagcaaagtgtttgagtatccggtccgggtccagtgggaagatacggacgcgggcggcgtggtgtaccacgcgaactacatcaagttcatggagcgcgcgagaagcgaggcgctcagagcggatggtctgaatcagaggaagctcgaagcggagcaggggatcgtgattctggtcgcggagctctcaatcaaatacaagcgggcggcgcagctcgaggatcttctcaccgtgaagacccgggtggagaagcttggccgcgcgagcgtcgtcctcaatcagtccgtgtggcggggggatgagctgctcacagacggccgcgttaaggtggcggcggtaaagaaagctgagctgaaacccgtgccgcttcctgctgaaatctatgacatgttcaaggcttacgtgacggagcctgagtcctgaaacgtctctattgatcttccgtcctgaagccattcggaatccgtttccggcgtccgagggcgaagggaagcccggacgggatgaagtacgtgtccgggagaaagtagataagccagcgggcgatcacttccacctggtcatacgcgcggatatgcgcctgaaagtccgggcttcgcaccatctctttcagcgcgccgaaactgaggaaggggcgtcccggaccggtttcggttctgaagagtgactgaatggttttcagaaacgggcttccggcgagccgcgttccgatataaagatccatttcttccggtgaccggagcgccgggggaggcacgagcgccgcgagatcctcggccgcgagcttctggataaaacgggcgtcggtatcccgcggaagcagatcccggatatcgcgcccccggaagatttcgtaaagcagattcgggaaagggcaggcggggagccaccccgccgggagcgggcccgcttcctggactgcccaccggcggaaccagtccggaaggaacccctcgcgccgccgcctttcaacaaattcccagagttcccccgcggcgtcccgcggaatccgtaccgcggccatccgccagtcatgttcgagctcatgactctcacggcttgtgaagtcagaggcgagtacttcgtcattccacttctgatcgagccccacgccgatgccgcggcccgtgaggttcgcgctccccgtgaagaagatccggtcaaagcggtagtacttcgcgtgaagattcggaattcggtagacctcacccccgagcgaccagaccgcgtccagcgcgtccagatccgaaatgccgctcgcgaaatcgtccggcgcaccgcgtgtcacgagtgtcagctcatcaaaccggatgccgtgcggaataatcgcctcaatcgcgcggattttgacgtaaggcgtcacgataagaatcgatcgggcattctctgccgcgcgtctcaggtgataggcgaggttctgatggtaaaggcggatcataaaggagcggtaagtccggggggaacggctggtttccgccattctaagctacggcggggaggaagcccgcgagcgtcaatccgataaaatgacacgccggaaaatcctttccgtccaattcacttaaaggaaccggtaatgaagaaagcggctttcatccttttctcgcttgccgcgggagccgcggctctcccggcgtttgctgcgggagacgcgctgtaccctgaagcgatcagcgcgaaggagctgctcccagggccgcccgcggccggcacctggcgaagcgcggcggacgacgcttcctaccgcgaagggctttcgcttcggaacgcccccaggggcctccaggccgcggaagacgccgacatgtcgcccctcaaagcctttgaagtccggttttcaaagcctcttggggttcagatttcgaaagacgcgactcccgcgacttacgctttcctccttctcacgatgaagcgcgtctatccgtcactgaaggccgggaaggaagtcttcaggcggccccgccctgtggtccagcatccggaagacgttacgtgccgcccggatctcgcgaaaaaatttgaccgcttcgcgagttacccgtccggtcacaccacgatggcctgggcgcttgcgctcgcgctgacctcagtcgctccgggagacccggttccggttctgaagcttggctacagcgcgggagacagccgcgcgatctgcggcgcacactggcagagtgatgtggaagcggggcgagaactcgccgcggcggttttcgcccggatcatgggggatccggattaccttgcggcggccgctgcgagccgcgcggaactcctgaaactctcgaaaccggcgccgtcttcggcccgctgaactcgcggagaaagaagcctcagcgcggggctgagcctttgctattctttcttctgacagccgtttcgcccgcggtcccgcggccggtacggtcaacagataaaggagcaggagcgcgatgaaaattacattctggtcagactttgcgtgcccgtggtgctggatcggggaaacgaatctcgaagccgcgctgaagtcgcttggccgtacggctgagtttgagatgaaagcctacgaactcgcgccgaacgctccgaggatggggggcgaaaccactttcccgcggctcctcgcccggggtctcagctgggaagaggctgagggccggatcaaagaggtggatgaggcaggggctgcggccggcctgccctttgcttacggcgacgcgattcagtcaaacaccttcgacgcccaccgggtgagaaagttcgttgaagcgcatttcggacgcgacgccgcggagaagctgagcgaacgttttttccgggcgtacttctcggatcatgtcgaacttgggaaccctgaggtgctctgccgcctcgcgggagaaaccgggattccctccggacaggtgagagcgtttcttgacgcgccgcttgataccggaaccgaagctcggattatcgcggacgcggtccgtgaggatgaaatgacggcgagatccaccggcgtcacctcggtcccgttcttcattatcaatggcaaatattccgttcccggcgcgctcgatcaggcgggctgggaggatggcctgaagcaggtctttgaggaagaggatagagaaagacagcggggtcctttcggggccggtgtcacctgcgggcctgacggctgcagcattgattttgatagagaataagagcagagagcggcatgattacgcgtatcgaagtttcgacaccggatattgaaaatacctatctcgatatcgatcctgagacgaaacacgggtttctgatcgatccgggcgccgctcccgatcagatcgcggacgcgatccggtccgggggcttcacgatcgaaaagattctcctcacgcacggtcactttgaccatatcggagcgatcgacgcgatccgtgaggcctttgggcatcctcccgtctatatccatgaggcggggcttcggtatctttcaagcacatttttcaatctctcgggccccatgggtcgccccttcacggtggagggcgcgatcccgtttcaggacggggctgtgttttcgctgcagtcgaatcccgcgttttcgctccgcgcgatccatgtgccgggacactcagaggacagcacgctcctttattcggaatcgggaggctacgcgttttcgggtgacaccgtgttccagggcgcggtcggcgcgacgcatttcccgggcggggatgatgagaaactcgcttccagcatccgggaccgggtgctcacgctcccgccagatacgaagttttatcctgggcacggggaaccgacagtgctatcccgtgaaattccgctgctgcgccgtgtcgcgggactgagagagattccttaagccttttcgaataagccatttcacgtttgcctgttcttcgctctctgcggtaaggttttaactcataccttacaaaaacaaaggagcgggcagctatgccagaacgtgcgacttgggcttcgaaagccggattcgtgctcgcctcagccggggcagccgttggactcggagcgatctggaagttcccgtggcttgcgggaagcaacggcggcgcggtcttcgtgatcccgtacgtgatcctgtccctcacgctgggctttgtgttcctcacggccgaaattacgctcggttacatggggcgcggttccattgtgacgaccatgcggaaactcggcggttcgaaatgggtgccggccggttatctcggcgtggtgactggcctcttggtgctttccttttattccgtgatcggcggctggacgatcgcgtacctcgtcgacgcgattctcggccgggggctcgtcacgagccaggcggagctcggtgcccggttcggcgcgctttcaggagacccgcttcttgcggttgggtatcaggcgctcttccttacgctcaccgcgggggttgtcgcgctcaaagtgagcaaggggattgagcggctttcccgcatcctgatgcccgcgctcttcatcctgatgctgatcctcattgtccggggtctgacactccccggggcgtccgaaggcctcagctatctctttgcctggaagcctgaggcgtttacctggcagagtctctaccaggcccttggctttacgttcttctcgctctgcgtcggctgcggctgcatgatgacgtatggttcctatctgccgcaggggagccgcattctgaagtcctgtgctcagatcgtggggctcacgaccgcggcatcgatcctcggcgctctgatggtgatgccggcggtgttcgctttccatctcgatccggcggcgggtcccggactcaccttcgtcacgatgccggtgattttcgctcagctcccgtttggcggactgttcgctgtggcgttctttgcctgcctcacgttcgcggcgctcacgagctcggtctcgatgctggaactggataccgcgttccttgtcgatgaatttcatgtctcccggacgacgggtgccattatcagcacgcttgtcatcatggtgatcggtttcttctgcgcgctttcttttggaccgcttgccgacacgaagttcctcgggaagaacgttttcgactggtgcgacttcctcacctccaacatttcgcttccgatcggcggcctcatcgtggcgcttctcgcgggacttgtcgtgtggccgaagttccgtgaggcgctttcggttcccccggcaccgagcgatcagtggttccggattttcaggctgcttctcgttgtggcctgcccgatcctcgtcgtgatcgtactggttacggggctgctctgatcggttaagacggttccggaaacggaaaaacgggagaactgctgacgcagtctcccgtttttttgttgctacaaaaggactttttgcaggtttcttcaaaagcgtgtcaccttcacactaaagtagaaacccttaagagtttacctcactgtgtaggttttatcaatcaaacagttttctgtgtttcagtgcgagactttgccgagaggctgaaaggggtcaaagtttttgcggcaaagagaaatcggcgggaatttttattctgaaaaatgaataagctgtatcacaggctaaaatgtaacaaataggctttaatcccatacctttttccggaggcgaaatgacatttcaggcggcaggaattcttcttttcacccttctcgcggcgggctgcagcgcgcagtctccttcctgcggggatcctgagactctcgcgaaactgaaggaggcggtcgtctcgaaaaccacggatgggggtgagaagaatgtctgccgggcggagatccgctggaaactctcccctgaatccgccgaaatcgtgaagaccgtccctgcggtcgcctgggatcaggatccggaattcatggtggggaagggatctgaaaagatttacgccgcgttcgcggaagagtccgccgtaaagaataagggcgaggctcccgcctgggtgcttgcgccttcaggcgacccggcggctctgaagggatggcaggagctcggccaggcgtccgccgcggcactccgcagtcttccgaaagtgcagaaggacggcactatccttttctcggctgacccgatggaattccgcctgatcggaggcgcgtctcacgaagtgtcgcttgtgattccgcagtcgctctcaggtgcgatccggaccgccgaaacactcggcgccgaagcgaaggcgggggatgctctgatcgcgaaagcgaaggaagcgcagctggccgcatcaggcgaaaagcctgcgtctgagtctgccgcttccgcggctccccgggatccgaacggcccgagctacgactgtgccaaagcgacttctgtccccgataagatcgtctgcggaagtcctgagctctcacgccttgaccgggagcttaacgcggtctgggtgaaggtccgcgcgaagtcctcggatcagggctggtcccgcagaaagcagatggactggtatcggaatgagcggaacacctgcaagaacgccgcctgtctcaaaaaggcctatcagaagcggatccgggagctttcttcggattgacaaagaatggacgcccgaatttaagggaaacaaaaggccggagcggtgtcagagccgccccggccttcgttttatccattgatgccgcggttactttgccgcgcggacgagtccgagcgcgttaagcgttctcgggaagccaagcagcggatcagcgacccggagggcatcggtgaggttctgcttcgtcgcgccgacagagaggttcgccgcgatgtgcgccttcagctgcggctcgcagccgccgagcgccgcgatcgaggcgaacgtgatcagctcacggtccttgatcgaaatgttttcgcgcgtgtagtagtcgccgaagcaccaggcggtcaggtcatcgacgatgaggcccttttctccttcggccgcggattcgtgcatcttcagaatgtgatcacggccgaagatcccgccctgggtatcgagacctttctcgaaccggttctgatcattcaccgtggcgccctttgcctcaaccttgacgcccgcgtgacggaacgcggcgaaggcctcgcggagcgcagctttagcgcgggcaagacccacatagggagaggtctggaagatggcttcgcggatcagcgtcccgggcaccttatcgcggagcgcgcgatccgcgatatcccgcacgccgccttcggccgccacagcggtcgccaccgcgaggagcacaaagtatttctgattggtgctgagcgaggtgccgcgcttcccgagatccagcatccggttttcaatcgcgtcaaactccgcgtccctctcgggacgcttcgcttcagcgcttcccgccgcaccggcgagggcagtcgtagtcgcagcagccatcagaacactccttcttgaaaaactcgtcataagatccgttcctctctattgtggggcgggtaagagaaactgacttactccgccttctgttcaaccgatattttgatcatagaaagaggaattctgaaaatcgcacggattttctcaagtttttgataaatcctctatcgcagagaagtcagtctgatgctataaagctgagagctacgcggcaggagccgcattgagggaagtgaaggacatggagaattttctcattcaggcggcctatgacgaaaaggctgtggagacagagtcagcccgggagatcacagcatccggcgtcccccttgtgattccggccgagtacctcggcatggagcggatggagggagacccggaagacgctgagatctatggctttaacggagaagagtctgacggtgtcgcgtttttcagcctgatcccgcgcgaagacgcgcttcccttcggagacgtggattccgtgatcgagaatgtccacgagattctggaagaaacccaggggctgatccgtgtcggaagcggcagcacggcatcgggccgcccctttatctacaccatcattaagaacgtgacggaagagggcgtcctgcaatacaccctcacgcttcagatcgcgctcgaagaccgggctctcaacgtgcagggattctttaacgaaaccggggacgggaagaagcgtgagcgcgcggtctacagccttcggagaattctctcagagccctgggcagcggatccttacgatccgacatttacccggggccgcctgatgacgcaggcggaacgctcggcctgggaccgcgactatccgactcacgcgctgagtgaggctcggaaactcgtgaagtgcctcgtcgaaaagaactgagagttcaaagcctttttctgaaaagtcggagaacgaaagctgattcccggaacctgctccggaatcagcttttttattgagtatcacggaacggttcccggcggttttgcgcaaagcattctgataatactttcggatataaatttttataatttaatttatcgat

SEQ ID NO: 1344 - DNA, 17795 bp, Unknown
  gut microbiota DNA sequence
gacctttctcacggcctcatcctgaccgatcacgcgcttcgacagttcctcacgcatgtgaaggagcttctcacgctcgccctgcatcattttcgacaccgggatgccggtcgcacgggacaccacttcagcgatttcctcagcgccgacgcctgtacgaaggaggtgcggcttatcaggcgactcatccttcttcacctggctcgcttccttattcagcttcttctcaagctccgggagcaccgagtactggagttccgcgaggcgctcgtactgagcgttccggcggcactcgtccatctcgcggcggacctgatcgatcttgtcgcgggtttccttttcgccgatcgcgtccgccttctcgcgcttccagatctcttcgaggtctgaatacttgcgggagagcgtctcgatctcttcctcaatcgtcgcgaggcgcttcttcgaggcgtcatccgtctctttcttcatcgcttcgcgttcgatcttcagctgaatcaggcggcggtcgatcttatcgagcgcctcgggcttcgagtcgatttccatcttcacgcgggcagccgcctcatcgataaggtcaatcgccttatccgggagataacggtccgtgatgtagcggttcgagagctcagccgcggccacaatcgccgggtccgtgatctggacgccgtgatgggcttcgtacttctcctgaagaccgcggagaatggcgatcgtgtcctcaacggacggctccccgatcatcaccttctggaaacggcgttccagcgccgcgtccttctcgatgtactgacggtattcgttgagagtcgtcgcgccgatcacatggagttcaccacgcgcgagcgcgggcttcagcatgttgccggcgtccatcgagccttcggtcttgccggctccgaccaccgtatgcagctcatcgatgaagagaatgatgcggccgttctgcgcggtcacttccttcagaagccccttcaggcgttcctcgaattcaccgcggtacttggcgccggcaatcagccccgccatgtcgagcgacagaatcactttgttcttcagcgtgtccggcacttcgccgttcacgatacgctgcgcgagaccttcaacgacagcggtcttgccaacgcccggttcaccgatcaggaccggattattcttcgtgcggcgctgcaggatctgcatcgtgcggcggatttcatcgtcgcggccgatcacagggtcgagcttcccctcgcgggccttcgcggtgaggtcaatcgtgtactttttaagcgctccgcgggactgttcggcgtccgcgttatcggccgcctggccgccgcgcacttccgtgatcgcggcatcgagcgcgcgccgggtaagaccgttctcgcgggcaatacggccggcatcgctcttctcgtccgagagggcaaggagaaacatctcggtcgcgatgaattcatcgccccgcttcatcgcctctttctcggtgaggttgagagcgttcgcgagatcgcggctcacctggatatcgcccgaggtgccggaaaccttcgggaggttttcgatcgcctggtcggctgcccgggtaagaccggagacgttcacgcccgcgcgctcgagcaggctcaccgcggagccatccttatcgtgaaggattgcggcgagcagatgcacgggctcgagaaactggttgtcgtgcgcgagagctaggctctgggcatcgcccagagcttcctggaacttcgtggtgagtttgtcttgacgcataggtttatatctttcctttaggaatcgccggaattaggcttccgtcgttcgtagttcctatatggggacacagaaaccatttttcaagggggattcgttatcaaaagtaaatttttaatccctgcgtaataggctgaaccggaaaaagaaaaaccgcaagggaacaaatcccatgcggtttcgtaacttctttttgtatttcggaaaaatggcttactgccagcgcgccttcgccttttcgtcgctctcacgcgcatccacccagcggctgcccgacggagtctcttccttcttccagaagggagcctcagtcttcagccagtccatgatgtattcgcacgcctcgaacgcttcgccgcggtgcgcggacgtgacgaggcaaagcacaatctgatcgcctacctcaagacgccccacgcggtggatcacgacgatgtcatcaagctcccagcgggcgcgggccttatccgcgatcgcggtgatcgcggattccgtcattcccggatagtgctcgagcgtcagcgcgaagatatcgtccccctggttccggttacggacaacgcccgtaaaggccaccatggcgccggctgagcctgagcccttccgcagctcctccatttcgcgcgacacatcgaaatcctcgtgccgcacgatcaccttcgtgatccccataggactagcctccggtgacaggcgggaagaaagcgacttcgtcgccgtccttgatcgccgcggtttcgtccgccatcacctggttcacggagaagcggatacgcttcacactttcaaagccgctcttccagggatcgccctgccccacgaggtaatcgcggagcgcgccgaccgtttcgactccggcgggcacttcaaccgtttcagaaggacggccgaccgcgtcgcggagataagcgaaataaagcaccttgactttcatttgaggatcctcttttttgttgtattaaaggagggagagttccggatcgatctgaggaactgctgggccgggagctgcgacactccgcctcaggcgaggaactctgccagtggatagtagtccacgaaatccccctgccggatgtccttcccgacagggacgtccacgatgccgtccgccttagcgcaggaagaaagcacctgggaattctggttcgggaggatgcagagccctcccttgtcgttacggtacacgcggataaattcctcacggtcaccggccttccagttgaagtccgcgcggaccgcgatcggacggtgaaggtcagcgcggccgccctgacggacgcgaaggaacgggcgcaccatcatgagggtttcgacaaacacggcaaccggattccccggaagaccgaggaacggaacgccggacacttcgccgaacgcgaatggctttccgggtttcacggcaagacgccacatatcgatgtggccgagccgctccaccgcgggcttgatgtaatcctcttcgccgacactcatgccgccggtcgtgacgatcacatcggtcgagcgcgcggccttctggaacgcttccaccgtatcctcgatcgaatcgcggaccgaacccacgtcgttcacttcgcagccgagcgcatggagaagcgcccgcagctgataacggttcgagttataaatcgcgccttcgcggagcggctcgccgggacgcgcgagttcgctgccggagcagaagatcgagacacggaggcggccgtaaacgcggagatacgcgcggccggtcgacgccgcgataccgagattcgcgggcgtaagcttatcgcccgcgtgcagaatcgtttcgcctgccgggaagtcgcttcccgcaaggcggacgttcgttcccgtcttcaccggagccttgaagaccaccgtgccgtcctcgttcttttcaacgagctcctgctgcacgacggaatccgctccgggcggcacctgagcgcccgtgaaaatgcgggcagcggtgccggtttcaagctgtgtgccgacggaacccgcggggatccgctgcgacacagggagcgtcaccgggtgctcgggggaggcagaagcgagatccgccgcgcggaccgcgtagccatccatctgggagttatccgccggcggcacgttcaccggtgaaatgatgtcttccgcaagcacccggccctcggcgtaaagcgtcggaatggtttcagtccttccgatcggggtgactttggagagcaggttctgcagcgcttcacggtaggaaatcatttcccggttactccttaacgttatctttctctttcatccagctatcccgcaggctcacgatgaaatccgcgacctgccggggttcgttgaggttcagccacggcattccgggcggaattccttccggagtgtcagaggcaaccgcaacaatatcacctctcttcgtccagagcggggcttctttatgaggccccctcgagacttcgatacggggaaagtcgccgtcatccttgaatccttcgagcagcacgaaatccaccggcttcatcgcgcggagaatatccccgagcggctttcggccttccggcgtctcctccatcagcgcccagcggtcaggcgtcctgaggatcacctgctcggcgcctgacacccggtaccggtacgtgtccttcccgggggtatcgagatccacctgatgatgcgcgtctttcacgcaggagacactgtagccgagcgaacggagacactcaaccaccttttcgttgagggtggtcttcccgcttccggagtatcccgtgatgccgaagagaaacaattttgattactcctttgtatgacggtcgatgaactgcttcacgtcctccgtttcaggatccatcacttcgcagcgctgcggaaggctgagaaggtcggcgcaggaggcggggattgcaggcaccgtgcctgtcgcttcgataatcgtcttcgagaacttcgcggcctgagccgtctcgagacacaggcactttacccccggaagacgcttctcgcgagccaccttgaggccgtccgcggtatgcgggtcgatcatgacgccgagccgctcccaggtgtcgcggatcgtggcaagacggtccgcgtgggtgctctttccggcggtgaagcctgaggcgaggacgcgctcccagagttctccggtgagacggaattcaccctccgtcgccatcacgtgccagaggcgcttcagcacctcagggtcgcggccgacgatatcgaagatgaagcgctcaaaattcgacgcgcggctgatatccattgagggcgaggaagtgacgtacgtatgcgccgcgtctctcgggtgatagacaccggtttcaaagaattcggtgagcacatcgttttcgttcgtcgcgacgataaggctcgcgatcgggagtcccatctgcttcgcgatccagccagcgaggacgtcgccgaagttgccggacgggacggcaaacgaaatcgcctcgcccttttcggccgcggcaagccaccccttgaagtaatagaccacctgagcggcaacgcgcgcccagttgatggagttcacggtgccgattgaatgcgcggacttgaacgcgtggtcgttcgagaccgccttcacgatgtcctgcgcctgatcgaacgtcccgcggaccgcgatattgaagatattggggtcttcaagcgaatacatctgggcgcgctggaagtcactcatgcggccgtaaggcgacagcataaagacgcggatccctttccggccccgcatcgcgtattcggctgcggacccggtgtcgccggacgtcgcgccgagaatattgagagtcttcccttcacgcgcgaggagatgctcgaaaagcgccccgaggtactgcatcgccatgtctttgaaagcgagcgtcgggccgttcgagagttccagaagaccgatcccgtcctcaagccagcgcaccggcgtgatgtccttcggatcatccccctcacgcgcgttgcagtaggtcttctcggtataggtcgagcggcagatttccttcagcgcagcctcgtcgatgccgctcgcgaaaagccgcagcacttcaaaggcgagctccgcgtacgggagcttcctccaggattcgagcgtctcggctgtcacctgcgggtagctttccggcatgaagaggccgccgtcagacgcgagcccccgaagcacgatttcatcataggacgccccggtcgattcaccgcgggtggagagatagcggatattgcttgccatgttgtcctcttattaattcagttcttctttgcgaaggagaacgatcttgccagtcacgcagtcaagcgcctcgatccggcggatcgcttcctgaacggccgcttcccaggcggtgtgcgtcatcaggacgatcgaggtcgatccctgacccgcgaccgcttccttctgaatgagggattcgatactgatccccatatccgcgaagacgcggctcacgtcggcgagcgtgccggggctgtccgtcacgccgatacggaggtagtaggagcagaccgtctcgcccatcgggagcacgtcgacgttctcaatctttcgcttgtagccgagcaccggaacctggtggttggaggacacgccgatcatgcggaccacgtccacgatatccgcgatcatagcggaggcggtgggttctgaccccgcgcccgggccgtagtaaagggtggagcccacggcgtcgcccttcacttcaacggcgtttgtcacgccgcccacgtgggcgaggagccgccgctcaggaacgagcgtcgggtggacgcgaagctcaatcccggtcccgcggcgcttcgtgatgccgagaagcttcacgcggtagccaagctgatccgcgaactcgatatccacgttctgcagatcgcggatcccttcgatataggccttatcaaacgaaatcgggccgccgaacgcgatcgaggaaaggatcgaaatcttgtgcgctgcgtcaatgccatcgatatcgaacgaaggatcggcctccgcgtaccccagcttctgagccttggagagcgcctcagcaaacgaaatcttttccttccgcatgctggtgaggatgaagtttgaggtgccgttgatgatgccgaccaccgactgaatgcggttcgcgacaagcgactcacgcatcgccttgatgatcgggatgccgccagcgaccgacgcctcaaaggcgacgatcacgcccttcttcgccgcggcgtcaaagatctcgtccccgtgctgcgcgagaagcgccttgttcgcggtgacgacgtgcttccccgcgtcgatcgcggcaagaataaaggagcgcgcgggttcgattccgcccatcgcctcgaccgcgatcgcgatctcgggatcctccacgatttcatgccagtcaatgccgagcgaccccacgagcgggacgaggtcagaacggttctcggggtgacggcacgtcacatacttcacttcgatcctggcgccggctcgcgcgctgatctgctcctgattgcggttaagcacccggcagacaccgccgccgacggttcctgcgccggccagaccgattttcactgaatccatgagttaaagctccctgcttattttgagagtaacgccatccgcccgttattcaccgcgatccgatagggtgaccgcgcccgagcgctgcttatttttttctgcagcggcaatttgaaaatcgtaccaaatatcaagacctatagaaaatcagagggcgggctccggatcccggatatgcgattttttgcgggagttcacacagctgtcaattcgccgcgttatattggtcagtgatacagacacgcaaatatgaggaaaactatgcctctgccggcttccccgaaagttccgggcgacatgctcgccgactatcagagtgaaaatgacctgccgctgaagactccgccgaaagcggaaaccccggccgcagaaaagcagccgaagaggcgccgccgcgggaaggcccccgccgaggcgctcgaaatggcagcgcccgccgccgcggtcacagagaagaaacccgcccgccgtaagaaggcggccgggaaagcagccgtccgggccgcccgcaaggctgaaaccgccgcggctccgaaggttcagccgccgatcacgctgggcactccttctgaaacgaagctcccgtcgcttcgccgcggccgcgcgctgccggacccgaagatgccccgtatgttcgcgctcgacacgaatgtgctcctccacgatccgacctgcctcttccggtttgaggagcatgacgtcttcattccgctcaccgcgcttgaggaacttgaccgccataagaccggcatgagcgatatcgcgcgtaacgcgcgccaggtttcccgcacaatcgatcagctgatggaagcggccgggaaccccgatctctcagaaggccttccgctttccgccctcggaaaccgcgaggcgaagggaaagctctacttccagaccggacgcctgaatgtcgaactcccgctcccctcggatctgaagaccgggtccggcgacaacgcgattctctcttcggtgcttggcatcacctcggtcctcaaggaccacgtcgtgatcctcgtctcgaaagacatcaatatgaggatcaaggccgcgacgatcggtctccccgctgaagactatttcaacgataagacaatcgacgactcggacctcctctatagcggcaaactctcgctccccgggaacttctgggaaacgcacgcgaaggggatgaaatcctggcagaaggacggcttcacctggtaccgggtgaaggggccgctcgttccccagatgctcgtgaacgaattcgtgtattcggaaagcgcccaagggggctttgaaggcattgtgagctcggtcgaccgcgatgaagcggtgttccggtcactcaagaactacacgaccccgaagaataacgtctggggcatcaccgcgaggaacagcgaacagaacttcgcgctgaacctcctcatgaaccccgagattgacttcgtatcgctcctcggtcaggccggcaccggcaaaacgctcctcacgcttgccgcggctctcacgcagacgcttgatgaacgccggtactcggaaatcatcttcacccgcgcgacggtctcggtaggtgaagagatcggtttcctccccggcacagaagaagagaagatggtgccctggatgggggctctggaagataacctcgaagtgctgaaccacaccgatgcctcctccggcacctgggggcacgacacggcgcaggacatcatccgctcccggatccgcgtgaagtcgatgagcttcatgcgcggccgcacgttcctcaaccgcttcctcattatcgatgaggcgcagaacctgtcgccgaagcagatgaagactcttatcacgcgagccggccccggcacgaagatcgtctgcatggggaacatcgcgcagatcgatacgccgtacctcacggaggggagctcgggcctcacctacgtcgtcgataaattcaagggctgggcgcacgcgggtcacatcacgctgcagcgcggtgaacggagccgcctcgcggacttcgcgtcctcggtcctctgaccccctgctctcacccataaaaaatcccggatccaaaaaaagatccgggattttttgtccctgctgccgtttcgttacggctgcggtgccgcgggctgtgcggcaggagccgcgggagtcggagcgggcttaggtgacgaggctgcgtccgggttcttcatctgcgacgcggttacctgcgggaagtcattagacggcgcgggagcggcaggagcggcgtctgacggcgcggcgtccacagcgggagacgaagcgtcgtcagaactcttcgaccgctggccctgcggcacttccacgatccggcctcgctcagaaggctgtcccgggtggccttcaaggggcgctgccccattcggcgcctgaggaaccacggcggcagcggaggcagccgcgcttgaacccccgaagaaactcgtgatgccggagttcgtcacgatcgagaaaaggacaatacccaccatgatgaacgcgagcgcgatcttcacgccgatcccgactgccatccctatccaggtggcgagacccacggttcccgccttcagcatgtcgcggcccgccatgatttcaccgatcaccgctccgatcagcgggaagaagacaatgccccagatcccggtaaccagccccaccacggtgccgatcacagcgccccagaggccggcgcggctcgcgcccgcccgcttcgcgccgagaatctgcgcgaggatatcgatgccgataccgaccgcggcgagcagcgcgagaatcacgaccgccgtcaccgagatcagctcatagccgctcgcccagccgatcagccagctgccggcaaaaatgatcggcaatcccggaatcgcggggatcacggttccggcgagacccacagcgataagggcgagagccccgagatacagtaggtattccatgtcttcctatccttaggcaggttcctgcatgtcgtccggcacatagccttcgggcacctctgcccggttttcgaacgacgtgtacttcccgttgaacgtaagcttcacggtccccacagggccgttacgctgcttgccgatgatcacttcggcgagcgtcggatcggattccttgttgtaaacccaatcgcgataaataaacatgatgacgtcagcgtcctgttcgatagcgcccgactcgcgaaggtcggacatcacagggtgcttgtcagggcggccgtcaaccgaacggttgagctgggagagcgcgatcacgggaacgcggagttcctttgcgaggctcttcaggccgcgggaaatttcagaaatctcggttgcgcggttttcttcgcggcggctggagctgccgcccatcagctgcaggtagtcgaccacgatgaggccgagctgtccggtctgcgccatgaggcgccgggcgcggcttcggagcgaggtgacgctgagcgccggcgtgtcatcgatataaagcggtgccttttccatatcggcgaccgcggtcgtgaaccgatcccagtcgccatcctcatcgaggcggcccttgcggaccttctgcgcgtcgaggcgcccatgcgagcagatgagtcgcatcgcgagctgctcgccgctcatttccatggagaacacggcaaccggccagctgttatcgcccgccatcgcaacatgctccgcgatattcagcgcgagcgcggtcttacccatcgaggggcggccggcgatgatgatgagatcgccaggctgcatgccggacgtctgctgatcgaggtaccgataaccggtcgagacgccggtgacatcgttcgctgacttcgtgcggtagcgctccgcgacgatatctgagacgttcgccgcgagtttattgagtctcacgaagcctttgttcccgcggtccgcgctttcattgatctggagaaccagtttctccgcgtcatcaatgatgtccttcgtctcgcggccttcaggagcgagagcggacgcggcgatcgtatccgcggcggacacgagctgccgcagcatcgagcagtcgcggacgatttccgcgtacgtgcggatgttcccggcgccaagcgaattgcttgtcagcgcgttgaggtacgggcggccgcccgcggcatccgcccgccccgagcgctcgagctcgttatagaccgtgatcacgtccgcgggctcaccccggaggtgcagcgccgcgatggcgtcaaaaatcacgcggtggtcggcccggtagaaatcctcagccgtaataatgtcggagatctggtcaaacgcctgggtattcagcatcagaccgccgagaatcgtctgttcactctcgacagaatgcggcggaacacggacagaattcgcaggaagatcagaactggaaaaaggatcaggcatcagattgcgctccatagaggccggaaaggagcaagcgggccccatgatgcaaaacgccctctgaaacacttttcagaaaggcgaaagcgggttaaataataacagtaaagcaggaaggggaaaaaaataggcctcctttcggaagcctatttttttctccgacagaatccccttgcggaggctctgtcaggagtcggacgttccggagattactcttcggcgacgacctgaaccgtgatgtcagcggtgatgtcggagagcagagcgatcgtgatcgggtactcgccaacagccttgatcatgccgagcggcgtgcggacctggctcttcttgatcgtgaagccaagcttatccacggcttcagcgatgtcggagttggtcacggaaccgaacagacggccgtcaacaccagccttggaggcgatggtaacggtggcgccattcagcttttcctggagagcctgggcattggccagacgctcagcctgagccttctcaaggtcagcgcgacgggtttcgaactcggcgatagcggccttggtggcgcgcttggcgtgaccctgggggatcaggaagttgcggccgtagccgtccttgaccttgaccacatcgcccagattgccgaggtgatgaatgttttcaagcagaataacttgcatgtcgatatctccccgggattactgattgtcggtgtagggaaggagggcgaggaagcgggcacgcttgatcgcggtatcgagctggcgctggtagatcgccttcgtgccggtcagacgggcgggcatgatcttgccattttcctggatgaaatcgcgcagcgtgtcgatatccttgtaatcgatctgctcaacgtgagcagcggtaaagcggcagaacttcttccgcttgaagagggcattgccctgggagggacggcggttgccggtacgacccttggaaccaaaagccattttgaactcctaactgaattccgttatgtaaacaatgaggcgctgcgtgcggctcgagcgaggggtgatgtaccctttgagggttatcctcgcgggaagcggaagctgatagagctttgccgctacctctccgtatgcgaccaccagggtttcgaaattgaggcggcgcatgccgcctgcttcccggacttcgcctgagtggtgaagaatgccttcaaaaacctgcagtccggacggtgtgaatctcggctcttcggagcggatgatttcgccgtcaaggaccagctcattcatgtctggcagtcctctttaaagcgcctctagccgaattactcggcgtcctgaacgtcggattcctcgtcttcagcttcgtcggaagcgtcatcagacttgtgggaagccttgctgttcgcgcgagcggccacggcagccttcttggcctcttccttctcgacaaccttcatcatcggggagggagcggtttcggcgtgcttcgtcttcaccacgaggtggcgcagaatggcgtcgttgaaacggaaattgttttcgatgtcggcgagcgtggcgtcagagcactccacgttcaggagaacataatgagccttgaccagcttctggatcgggtaggcgagctgacgacggccccaatcctcgatacgttcaatctttccaccctgttcgagaacaaggttcttgtagcgttcgatcatcgccggaacctgttcagactgatcaggatgcacgatgatgcagatttcgtaatgacgcattgatcctccttgcggaaaaaaccgcccagggcgtctcccggtgcggcaaggactaacgagaaaacggttatcttactctaaaaattaaaattttgcacgcgagggattatccacccgggcggccttttcaccgacccgctgacggacagactcaaagaggcagacaccggcggcaactgacacgttgagagactcaaccgaccccatcatcggaatcgcggcgagcgcgtcgcaccgtttgcgcgtgagctgacggaggccttcgccctcagcgccaagcacccaggcaaaagcgcgcttctgatcgaagtcatagatcgagcggtcggtctcacccgccgttccgaccaccatgacacccgcgtcacgcagctccgcgatggcggaggcgagattcacgacatacaccaccggaaccgattcctcggcacctgcggcggccttcgccgcggccggcgtcacgtgggacgagcggttcagcggcgcgatcacggcctgcaccccggcggcatccgccacacggagacaggcgccgaagttccggggatccgtcacgccgtccagaatgaggagcagcgtcttatcggtgatggaatcgagaagctcatcaaaggagagcgtcttctcgagcacactgcccaccgcgacgatcccctgatgctgcacaccgtgccccgcgatgcggtccagacgctccgcgtccgcgcccaccgggcggatgccggcggccttcagcttttcgcacatttcgtgcatgcggcggtcatgccggctgcggtccacatagacttcgtcaatcgactccgggttcagtctgagccgcgccgtcacggcgtgaaaacccgcgaggaccgcttttttattaccagccattcaatcttttcctttagatatcaattctttttcttgcaatccgttcagagtctcggttcgcctttccagcgcctcggccctttccgtctctgcacatcgcggcgctcaaaatcaatccgccgcagatcaacgtcgacgcctgccacctgcacttcaagcggcgttccgagacggatcacttcgcctgatgcactgccttcaaggaggcagtcgtcgctgttatagaagtagtagtcccagccgaggttcgagacccggatgaagccttcaacaaagagatcatcaagcgtcacatagacgccgttcggcgtgacgccggtgacctttccagagaacccgcggccgatgaagtccttcatgtacatgcacttcagccacgcggtgacgtcgtaactcgcttcgtcagcgcggcgctccgcggcggaacacatcttgccaagcgtttcccaggcggcatgctgagccgtaggacgcgcgtacggtgtcgcttcaggcttcggcgcttctttcttcttccccttctgcttcagagagaattcggagttgagaaggtcggaaggcgacaccgcgacttcgggcttatagcggcggcgggagagaataccacggatcgtccggtgcacgagcagatcggggtagcgtctgatgggggaggtgaaatgggtgtacgccggatacgcgaggccgaagtggccgtgaagttccggtgaatacacagcgcgctgcatgcttcggagcagcgcggtctggaccgcctcttcgttcggcgtcccgcgcactttcgccatcacggcttcgtagtccgcgggtttcggggaagacccgccgcccatcttgagaccgaagccggagagtgtcgtgcggagcagctcaagacgttcttcagacggcccttcatgaattcggaagagacactccgtcttcttccggacaataaagtccgcggcgcaggtattcgcgaccagcatcgcctcctcaatcaggcggtgcgcgtcattatgttcacgcggcagaatcgcggtgatgcgtccggtttcgtctgtctgaatataggtttcgcgggtttcaaaattaatggcgccgcgcttctttcttgcctctgcgagcaccttataaagcgaatagagattttcgacgtccgggtagacctcatgaatctcgtctctcgctccttccttatcctggagcgcgttccacacctgtgtataggtcaggcgggcgtgcgaattaatgagaccgggatagaactgataggccgtcacttcgcccttcgcgtcaatcagcgcgtcgcacaccattgtgcagcggtcgaccttcgggttcagcgagcagagtccgtttgaaagttcctcaggaagcatcggaatcacgcggcgcgggaagtaaacagaagtcagccgttcctgcgcgctgcggtcaagcgccgtgccgggcttcacgtaccaggacacatccgcgatggcgacgagcagccggtaaccgccagacgcaagcggcgcgcaccagaccgcgtcatcgaagtccctcgcatcctcaccgtcaatcgtgacaaaggcaatatcgcggaggtcgacacgctttccggcgtccttcttcagcacatgatccgggagagcccgggcttctgtcagcacatcaggcgcaaagacggaaggaagcccaaagcggcgggccgccatttcaatctcaaccgacgcgtcgctcgcggatccgagaatttcctcgacctgagcgcgggccggttcttcaagcgtcggctgcgtcgtgatcgcggcgaccacaccctgccccgcgagggccgatgcgcctgaaagtctgatctgcacatgaacccgcgggtccgatggatcgagccagaaatctgtcccctgcttccggaccacgccgaccaccttccaggtgttgtgttccgtcacttctttgagagagacaaggttccggcccttgctgtcaaacccgagccgcgcgacccgtacccggtcgccagggaacaccgcgtccccctgcccctgggagaagacgtaggaaaccccttcatccccggttcccgtatccgggtcaaaaaacaccatgccggaacgggtgccggataccgtcccctcaagccacgcggagccgtgggaaagcgaaatctttccttcgtcatccgccaccgccgtgccgtcatcaatcaggcgctccagcgcagacagcacctcattcttcgtccggctgcgggaccgatcgcgcaccagcgcgtaaagctcatcaaaggcgagcggcgttcctgcgcgccccagaaccgactcgagctcagaagccgcggttcccgtcaaaaatgcggtcagaccgccgtcatctacccttgtcctgggccttctggacgaggatcctgtatttttccggattttttttcttctatctattgacaaaattattctcttcagcgataattacatcctcgtttgtgaggatgtgcccgggtggcgaaattggtagacgcactagcttcaggtgctagcgccttcaccggcgtgctggttcgagtccagtcccgggcaccaatcatactggaaaacatgtgattgtgcggtgaacctcagaaacgaaagccattaaagccttttcgcgattgcggagaggcttttttgttgcccgcggaaaacactcgctcgatcagccagttcccgctttcatcatacgccggagatatgttctctccgccgcacagtcaaaagccgcatctccgataaggaaatgcggctttttctctaagttctcagcagaatggcgaacttctgctgctctcttttacgagattagaacttgtggacgaggccgaaaccagcctgagcggtgctggccttgcggtcctgggcgttggacttctcctgagcgtagccagcagcagcgtaaacgctggtgcgcttgctgaacgcataggagtaaccaacggcagcgttccaacgcttgaacttgtaggagccgttatcgacgtccttggcatcacgatagccaacggtaccgaggaaggcaccgccgaaagccggaacggcggtcgacagttcagcaccccagcccttcagagccagagcctgggccggcttcagagcgcgggcatccttgatcagctcgaaggagtcgagaacgttcacctggttatcaaagtaagtagccttggcgaagaccttggcgacaccaaagtcatagttgccgccgaggatgaagctgtagccgttatcaacgtcgtgatagaagttagtcttctgttcaccagcggcattgccgtacatcgtcatgtcgccggtcaggacaacagcagccttgccagccttgtagcgcaggccagcggcgaggtaacggtcagcattgccggaattctcacgggcattcttgatgctttcttcgttggactgcgtgtcacccttgaaggagtacatgatcgcgccctgcaggccaccaaacgtcggggtctgataagcgagcgtgttgtcataacggtcataggccgtgccagtggagcccttctgcgtgccaacgataccgaaggcagacgggaaggcagacacatcaccaaggtaac

SEQ ID NO: 1345 - DNA, 654 bp, Unknown
  gut microbiota DNA sequence
agccgcctgcgcaccctttacgcccagtaattccgattaacgcttgcaccctacgtattaccgcggctgctggcacgtagttagccggtgcttattcttcagataccgtcagcggaacgtattattcgtacgtcccttttcgtctctgacaaaagcggtttacaacccgaaggccttcatcccgcacgcggcatggctggatcagggtttcccccattgtccaaaattccccactgctgcctcccgtaggagtctgggccgtgtctcagtcccaatgtggctgatcatcctctcagaccagctactgatcgtcgccttggtaagcttttatctcaccaactagctaatcagacatcggccgctcctgtcgcgcgaggtcttgcgatcccccgctttcaccctcaggtctcatgcggtattagctgatctttcgatcagttatcccccacaacaggacacgttccgatgcattactcacccgttcgccactcgccggcaggagcaagctcccccgctgccgttcgacttgcatgtgtaaggcatgccgccagcgttcaatctgagccaggatcaaactcttgagttcaatcactgctattacttctttgcttcagtttcctgaagcgtcgcgctcaaaattatcgactggtaatt

SEQ ID NO: 1346 - DNA, 5900 bp, Unknown
  gut microbiota DNA sequence
agcggaacctcgcttcgaacccgacattgaaccccgcgtcgtgcgcgtaccccgaggtgaggttcgcgaagacgcgtcgccccgggctctgaagtgaagcggtgccctggatcacaaagccgttccgagcgccgcgctctgtccgcgtttcaaacgcggtccccgggtatccggagaacgacgccgtggccgtgtagccgctccccgtgaattcatgcttccagcctgccgtgaggtccgcggcgagccgcagcccggtgtcggtccgggagaagcctgagaggtggccgccgaccgtcgtcgagaaggtgtcttcgctcccgccttggatgcggaggtttacgctgtcaccgccccgctccgtaaagccttcgcggtgtgtgacgccgtattcggctgtgacgatcgggccgaacgacacgtttccggcgaagaagtcttttccaagcgcggcgaaccccgacgctccgacactcgtgtagtggcctttagccgtacggcgatagtcactgattgcgacgcggcgtttcgagtggttctcatcaaacccgacgcgggcagctccggcgatgtagaacccgttccaggcgtctggcgaatagaaggcgtgcgtcccgatcgagaacccagcggaattcacgcggtcattgtgattctgatggagcgaagtgtgacgcctgatgagaccggcgttgagcccgaaggtcagaccgtccccggcgcttttttctatcccggagagaatgccggcggccgatccccggtagtccgcgtgccccgagagcccgtgccgcagtgttctcgcggcaaacggcatcgcgtagccggtccattgcgaaacggggaaagcgtcctgaacgccgtccgacgccgcgaagtccgcctttgcttcaagttttgacgcgtgggttcgggagaagagcgcggagttcacggcggtgaggcttcggagctcagcgtccgccgcggcgttataggtttcggcggaaagctgcgaaagcgccgcgtccactgccgcgccgttcggaaggtaatcgatcgtgcggatgagtgtctgcgcgtccccttccgcggccgctgctagcccgaacaccccggatcccgcgccgcggaccgcgggcgacgtggcgtattggctataagcgtcactcgtccgctccaccgtgattgtgggggccgctcggctccctgagaccctgagtgtcagcgtgggggaacgggtccaggccgcgatcgtgccttcccactcgagattgccgccgttcagcgtgaccgccgagtgccgcgcggtgatcacggtgccggtgcggtagtaggtttcagggggcgtcaggcgccaggtgccctgaaggcggctccctgattcccctgtggcgatttcgccgagagatccgtccgacgtgatcggggtcacgagtatcgcgttgtcgctattcgtgaaggtggtcaaagcgccgactgatgcctgagtcccgagcgtgagtgtcgcgtcgttccggatcgaatagacgtcagacttgcctgtcagcgtcaggttcccgccgatcacattcagcctgatggtttccggtcccgaaatcgagccgctgtaagtgaggctgaaatcggggtcggcggatgacgtgtcagcgcttccatcagccgcggtccggtatccgaaattgagatccgtgtagagcgggacaccggcttccgccgctgccgctttattcacgacggaaagggtttctccttcacccgtttcgatcgcgaggtcggggtcccagtccgaaatgatgtctccggtgattgaagctccccgcagaatgttgatcgcggaaacgagcgcgttttcgccgatataaatcgcggcgtccgaccccgagagactccctgagaggtcgtatgacctgacgagcggtccatcgaggttcagcgggtatccgttccagagtcccgtgacaggctggttttctccgccgacgtaatggataaaggagccccgatacccataaaaatccgcgatcgcgttgtggccgaaatcaaaccggactccgataccgccctctccaggagcggacaccgtccctgactggatcaggcggttttcttttccgtaggcgaaaagaatgccgatgccgtgaacgcccgtggacgacacagtcgttcccgcgggaacgtaaatcgtgttccccgagccgtcattccggattccgaccgcggcttcgcctgaggcggcaatcggcgctgcctgtgtcacggtgttcccgcttccaaacacgtgaagaccgaccccaagcgtcgtcccgtggctgtagccgtattgattcgtgaccgtgagaccgtcgttatagattgagtggccgtagaagaggctccggtcgatttcgtaaccgatgtcctgcagcaccgcgagctccgcttcgaggagcatcgtgtagttccggtacctctgatggctcatgagactgcgttcgagctcaaggtgcgaaagctccgcgtaaaagagcgttattccgtagtcttcgtagaagtagtcctggtaaccattcaccggaatggagttgctgaaggcgccgttcagcacttcgctcacgtgcggaccccggaagtaaacaccggaattgctgcgcgcggagacgaggaacttcccgctatcctccggggtcggagtgacggtctctttcagctcatccgtactgaatggagaaggggtcagcgtgatgagggtgccggccgccgccctgacaccgggcacggtgggatccagtctgaagagcccgactgtctcgtcccagaccatgcaggagtagaggtgggacgcgaacggcgtcagattgctcttatcgaaccagatcagatcttctgagagcgtctccgctgtcgtgattccttcattcggcgccgagatgccgagcgagtgtccgagttcatgcacgatcaccggcgcgaacacggtgcccgcctcctcgataatcggatagaggtaaggagtcggggtggcaaggtccgacgcattgtcagcttcaaatatgatctgcaccccgcgcgtcagctgatccttcgagacaagatcgtaaatcggctggttataggtgccatcggcgttttcggagcctttgatgtagaaggatgacgcgttgtcatcgtgttccacataaaccgccatccggccttctgaggcgtaagtcttgccctgcgtcacgtatccgagcgcgtagttgagcgccatctcgaccgagtttttctgagcgctcgaaagcgttcctttcgaggtcacaggctctgtcgcctggtctcctttcaccggatccggaggcgtgaaaacatccccctcgtcataaaagtcgatcgtgaggagcgggtcgcctgaagccgagtgagcctgggcggtagtcagcgcaaaggctgaagccggagcgagaagcgtgaggctgagcgcgagactgagcgccgagcgacggaatttttgggtcagcatgccgggaacgggatttctgagcggagccttgactggctctctgatgtcattattatcgctaccgattttaatagcttggctatttaattttttcttatctgtctcgttctgctttaaaaatcagagaaaatgctctgaaccgacgtaaaaaagagggaggcgtgtctggcgcgggccagacttcctccccttaacttgacggcaagtgattccaaataaacctttctgttattcgatacgttctccgtggagcgcgaggtcgagaccgatctgttcgtcgtccgcggagactcggagccccatcaccttatcgatgagataaaggattccggcgctcataatgccgccgtagacgagtgtcgcgatgacggagagcgcctggatgccgacctgcgtgaggaccggcgggagatcggtgccggtcacgcgggccgtcgcgaagacaccggtgagaagggcgcccacaatgccgcccacgccatgcacgccccagccgtcaagggcgtcgtcgtacccgagcttccgcttcagaatcgtgacggaccagaagcagacgagaccggcgataagaccaatgaggagggcggggagcggttccacaaagccagaccccggggtgatgccgacaagacccgcgatcgcgcctgaaatcatgccgagcagcgagggcttcccgcggtacatccattcagccgccatccaggcgacaaggccgcctgccgccgcgatctgggagaccacgatcgccatagcggctcgcccgtccgccgcgagccccgatccgccgttgaatcccatccagccgacccagagcaccgcggcgccgaccaccgcgatcgtgaggttcgcgggctgcatcggcgtgacgccgtagcccttccgtttcccgagcatcagcgcgcccacaagacccgcgataccggcgttgatatgaacgaccgtgccgcccgcgtagtcgagcgccccgagcttgaagaagaagccgtcagaggcccacacccagtggcagatcggcgcgtaaacgagaaggctccagatcaccatgaaggcgagcatcgctgagaatttgacgcggcccgcccaggaacccgtgatgaggcaggcggtgagcaccgcgaacgtcatctggaacaccgcgaagaggagctgcgggatagagccctgcagcgtattgacgccgatcccctgcatcccgaggaaggagagcccgccgataaaggagttcccttccgaaaacgcgagtgagtaaccgatcacgaaccagagaatggtgaccacgccgcagatcgcgaagtcctgcgcgatcgtgccgagaatgttctttttccgcgccatgccggcgtagaagagcgcgattcccgggatcgtcatgaagagaacaaggacggttgcgacaagcatccaggcggtgtcgcctttatcaagcgtgtccgcggcgaaggcggagacgcttgccgtgaggccggcagcggcggccgcgagtttcagaagagtggagcggagcgtcatgacagggcctcctcgttttcctctccggtacggatccggagcgcgtattcaatgggagagacgaaaatctttccgtccccgatcttccccgtgcgggccgcggcgcagatcgtttcaatcgtggtgtcgaggacgtcgtccggaaccacgatctcgatcttcactttcgggaggtaatcgatttcgtattcggtcccgcggtaaacctcggtgtggcccttttgccggccgtgcccccggacttcagtcaccgtgatgccggagattgagatttcttccagcgcgtcctttacggcgtccagccggtaagggtggatgatggcagtgatgagcttcataagcgtctcccatgcggttttttgagtgccggcgccccgaggaagcgccggaagtcttttcttatcctcgatatcgcataatccgtgccatattttcaaaatcccgaaaatgcctgtttttattggcgggtcacctcgggtgccctaaaccggtgcacagattcgggtcgcgcgggttccctatctcggtgaatcggcaccaaaaactctcacaaaatcaggctttaagaatcacagataaatcgttgtgatagcggtgatccacggtctctcgcggcttaccgcggtaaaaagtgcgatagttagcgaacgaaagacaggaaccggttccgaggaaccgcggaaaaaataggagtccgctgtgggaaaagagattgaacggaagtttctcgtgaagggggacgcgtggaaagcgcttgctcccgggatccgttaccgccaggggtacctgaatagcagcatcgaccgcacggtgcgagtccgcacgatcggggatcagggctttatcacggtgaaggggccgaataacgggatcgcgcggctcgagtttgagcatgtgatcccggcggatgacgcgaacgagatgctgacag

SEQ ID NO: 1347 - DNA, 177 bp, Unknown
  gut microbiota DNA sequence
aaaaggaaaactgatcagtgcccaggatcgtcaggaaattatttcactggtcgatttcggtcaatcgcagggactgtcgcagaggctatcctgcgaagcagttggaatcactccgcgtacattgcaaaactggcggcatgcccctgatggcgatggacggctcgaccggagcaattt

SEQ ID NO: 1348 - DNA, 1107 bp, Unknown
  gut microbiota DNA sequence
tgatttcacggcctggccgttctttaaatacagtgtagcaacgatgttcttaaaaccagtcaaattacaaacttcctttcgtggacatcacgtcctttattctgctatcataggtgcaggcatcgtcaagcgccttggcaaatgccttaaacatagcttctatcatatgatgattatttcccggtgtcaaaacctttatatgcaggttcatcgcagcagagtaagaaacggcatagaaaaactctctcaccatctctgtatccatatctccgactctctcacaggtaaactcaccgtcaaactgcaggtacggtctgcctgataagtcaatggcacaaagcaccagcacctcatccatcggtaaaataaagcttccaaatctctttatgccctttttgtctccgacagcctgtgctatagcattaccaagcactatgccgcagtcctctatagtatgatgacagtccacatttaagtcaccgtcgcatgtcatatcaaggtcaaaaaaaccatgctttgaaaagccctccagcatatggttaaagaaacctatgcctgtgtctatatttgattttccggttccgtctatatttaaaccgaccgaaatatcagtctcttttgtttttctgctaagcttagcgcatctatctgccatttcttactcctttgactaatcctcaaatctaaccttgattgaatttgcatgtgctgtaagcttctcacactctgcaaactgctcaatatctgtatgtattctctcaagtgcttctcttgaatatgagatgatgcttgactttttgataaagtcatctacagataaggctgagaagaattttgctgttccgtttgtaggcagaacatggtttggtcctgcaaaatagtctcccaaaggctctgatgagtactctccgataaagattgctcctgcatttttgatttttgtcatgactgagaaaggatctcttgtgacaatctccatatgctctgaagcgatatcgtttactgcatcaattgcctcatccatatcctctgcaacaagtatatatccgtagttttcaagagatttctcgatgatttcttttcttgagaggacctcaacaaaattat

SEQ ID NO: 1349 - DNA, 27846 bp, Unknown
  gut microbiota DNA sequence
gcttgaacaaacactgcaacctatttttttacgaacaatttcggcgaaagatcatttgacactcaccgattgcaggcgccatgctcgctgttgcagcagcgcctgcactcgcaggtcctggcggcccgggccccggtccgggctggggacctggtcccggcccccgctggcatgccgcgcctccgccgcctccccgcggcggttggggttgggggcaccgctattggggtcccggtgactggattctgcccttcggtgtaggagtcggtcttcttgctctcgccgcaactcccagccatacaactagcacggttcccgcagcaccggttcagactcagccggcgcccccggtcaacgtgacgatcaataacacccctgcctcttcctcggtggcaactcaggattatttctattgccccgcacagaagggctactatccgacgattcccagctgcccgaccggctggatcaagatcacgcctcagggctgacccttctgtcgggattgcctcaggagccccggttcaatcacgaaccggggcttttttattggctttcagttctgacgcggcttcatcagcaagaggaatacccgccttaaggaaagcctgtctccaggcagacgccagcttttcgaaattccaggccgcgttcgccggagatgtcgatggcagactgataaaagcaatatccggccgttcagctatcagctgacgaaagatctgcctgaaaacggattccgactttttcccattgaaaaaaacaaaatggatccctgggttctctttcaggatcctgtcaaccgggttcggttcaatctcccggattgctgaatcctgacttccttcccgcacgcaggaaccgacggaatcccagagcgcgatgccatggctgctcagaatttcaattccagttttatatgccggtctcgtcttattgccggcaagcagccaattcatcagactccagaaacgatttctgggatgagcgtagtactcgtcctcttccagagacttttcgcttggcatggatccaagaatcagggcttgaggatcccttccaacgaggggagcaaagccccggatcctgactggcagttcggtatttttggaaccctctcccatctgagcctcgattgtgcttttctgattacgaatcaacctattgtatgcattgcgagtattcggatctgcccctcacactcacgccgccggacctgccacataaattatctatttgatttaatgaataaataagcagatgatccctcacctatatttttttcaagatatccacaatttttgtggattaccctttctgcaaaaaccttatagcagttcaaatttaaggatttaggcttactgcttattttttgggcagacgcgacagttcatccagttttctgacataattgtcagacgctctttcgagctcggtttgagacatcctcatggcgccgtaaaaagcgtcaatccccagaacctcgacgcctgccagacgcgcggaaagcgtgagcggcagaagcagttcttcaagcgtatggcctatccgccccgaggcggagtaatcagcatcccccagttcggtcgttacggcaagcatcagacgcttaccggggagaactttcttcggcgcaccgaaatcagaaaaccaaacggtgtccagataagttttcactgtagccggaaacgtcatcgaccagatcggaaactgcatgacaaggatatcggcgttctgaatgcgcacccgctcacgctcaacatccactctctccagatagtccccgtattgggtttccatctgctggaagcttagcgaagtcacccgcctggcagccgctgcaagccgcttattcgcgcggctctcgaaccagtgcggatgaaacacctgaagaagaatatttctggatcccatgttgaaatacaaagtccgttcttatttttccatcaccttaccgcatttcgacggctccggttccgttaaaatgagcagttctgtctgcaggagtcattcctgccagttctgaatccgcagctttccaaatgccaatcaagaattttctgatactgcttctgaccgccatgatctggggaaccgcctttgtcgggcaggctctcggcatggagtatgttcctcctttcactttcacggcggggcgatccttgcttggcgctctggtcctggtcccggtcatttattttctggatcgattcaagagtccggcgcgccgcgctgaggagtcgacaccggaagccaaaaagcttgtctgggtcggcggcattctctgcggcatcgcgcttttcgctgctgaaagctttcagcagttcggtctcattcagactcctgtcggaaaggccgggttcctgactgcgctctacatcatctttgtaccgctcattgccctgttccggggaaaaagaagctccgggattctctggatcgcggttctgatcgccatggcgggactctacttcctttccgtaaaaggcgatttttctgtcggctcaggcgatattctctgcattacaggcgccgtctgctacgcgatccagattctcatcatcgatcgttatgcccccaaagtggatggcgtcaagctctcctgcatcatgttcctgacgggcggggtgctcggcgcgttctttactctgatctttgagcctgggttgacgctgagcgcaatcaaggcggcactgcccgctattctctatgttgggatcctctctaacggggtcgcctacaccctacaggtcatcggacagaagggagccaatccgacaatcgcgtccctcacaatgagcctggaatccgtctttgccgtgatatccggttggcttattctcggtcagacactgaattcgcgtgaagcgcttggatgcctgctaatggcatgcgcgattgtgattgctcagctgcccactaaaaataaataggaattatttgcatttgtcgaccgagatccatacaattcggttatggcaagcatagagacttttcaggggcggatccgcaaggaatccgccccttttttcatcacctgaaggaagagcctcagtctgacagacggctcctcccgaaccgctcagttacttcctgtccggcagcagctttccgggattcatgatgccgttcggatccagcgcgtgactgattttcaccatgagctctaactcaagcggatccttaagctgcaggaagtgctcccgcttcagctgaccgataccgtgttccgccgaaatagacccattccgtttcacggtttcttcatatgtgatcttccgaatgccctcttcattctcaaaggcgaggttcgaaggaattgaaccaatattgaagtgaagattgccgtcacccaggtgaccgtaaagcgaaggatctagccacggatacgcgtccttcagacgccgcactgtaacatcaaggaattccggaatcagagcgatcttcagactgatgtcgttatggaggttatttcccacacgggcatcggcttccggaatcgattcccggattttccagaacgcttcaaactctttaagcgactgagcgagataagcgttcttcacaattccatcctcaaaagccttgccaaggatttcttcaagagacgggccggaatccggtgagcaggagacttctgcgagaacccaccagggacagtcatcaacaggccctggaagtccgatgtcagggagctgttcatgaacccggaccagacacttggactgcatcagttcaaacccggtaaggtaaggaccagccgctgtacggcattcattgaggagcttcaccgcgtcgtccggagactcaacaccgacaagcgccgtctgattccctatcggctgcggataaagcttcaggacagcgcgggtaatgacccccagagttccttccgacccaatgaaaagctgcttcagatcgtaccccgtattgtctttacggaggccgcggagcgcagtccagatccgcccatcgggaagcaccacttcaagaccaaggcatagatcccgcatattcccgtaccgaagcacggcagtgccgcccgcgttagtagcgagattcccgccgatctcagcggaccccttggctccgaaagaaagcgggaaaaagcgccctttctcctcaacggctttatgaaggtcttcaagaatgacaccggcttcaaccgtcaccgtgtcattcacggtatcgatatcctcaatcttgttcagacggctgagagacagcaggatggcgttcccggaatcatccggaatcgaaccgccgacaagcgttgttccacccgcctggggcaccacaggagttcgggtttcattggcgatacgaaccacacgggagacttcttccgtattggcagggcgcacgaccacggccttccctacaaaccgtttggtccagtctacaaggaacggcttagttgcctcatcctcggtcagaacatacttttcaccgaccgccgctttcagtttttcaataatttctgcgttcatgcttcaactcttcagaatgccaaaaacccggcaaaggattttgccgggatgaggatttctgcctgtcaggctgcttcttctttttagaaggagggaaccacagcgcccttgtacttcgtcagaataaacttcttcgtggccggagactgcagtgccttcacaagcttctgcacccggggatcattctgatcgcccttgcgggtagcgaccacgagagcgtacgggctacgcttgtcttcgaggtagatcgaatccttcagcggattgagaccgataccaagcgcgtagttggagttcaccacggcaatatcgacgtccttcaggctgcgcggcacctgagctgcttcaagttcgacaaacttcagcttcttcgggttcgagacaacatcaatcggagtcgcttcatagccgacgccggaacgcagcttaatgagacctgcggactggagaagaagcagggcacggccgccgttagacggatcattcggaatcgacacgcgggcgccgttcggcacgttcttcaggctcttcagcttctgagagtaaacagccatcgggagaatgtagatcggcgcaacacgaaccgcgttgatatgacgctgacggactgcgttatcaaggaaaggctgatgctgatagaagttgacatccacttccttagcgtccagagccgcgttcggagcaatgtagtccgtgaattcaataatcttgaggtcaatgccttccttcgcaaggatcggcttcacaaacttcagcacttcgccctgcggaacaggcgtagcggcaatcttcagctccttaaggggagcggcagaggcggagaaagagccggcggcgaggatcgcggcagcggcggcggatagcagagtacgacgattcatgatgttcttccctatttcctgatgttcggtatttctctttatcttcgccggaaggccttgagggaggcctgtccggcgtgctgttgagataaccttatctgaaaatacggaaaatcagctgaaaatctcccttttccttgcggtattacttttactgagctgagagaaccgctgtgcggatgatctcccggacaccagccgtcatccgctccatgctttccttaatcgattcaaaatcaatactttcctttgaatccgaaattcccgcggcccagttgaccgacagaccgaggagcgcataccgaagccctgcttcacgcgccacggctgcctcaggacaggctgtcatgccgatcatcgcgccgcccagctgtgacacaacccggacttcagctgcggtttccagtctcggtccctgcgtgcaccagtaaacaccgccatccatgacaggaacctcagccgcgagtgccgccttaatgagttcctgcctcaggccctcagaaaagggatgcgtgaaatcaacatgctgcaccccggtttcaggccccgtatagaacgtggactgccggccccaggtccgatcaaccagatcatccggaatgcagatcgcgccaggcggaagggcctctgacacagcgccgaccgttccgaccgcgaacacgtctgtcgcacccgcctcacgcagcgcccagagattcgccgcatagggaatcgcgtgcggcggatagcggtgattctctccatgacgctggaggaacagcacacggtgatcgccgatccgcccctccagcacgggggacgccggagcgccgaacggcatctcgcgcggcagcgccgcttcgctcatccccggaagccagccattctcgaaacctgaccccgcgatcagcgcaaaaacccgttcgctcattccgccccctcacccagcatccggaggagctccgcttcgtcaatcaccgtgactcccagcttttctgccttcgcgagtttggaaccggccgcttcgcctgccaccacgaagttcgtcttcttcgaaacggagcccgaaacgcggccgcctgccgcgaggatccggtcactcgcttcatcgcgcgacagattgggaagcgtgccggtcagcacaaaggtctttccggcgacttctgaagccgactccccatctgccggttcagaagcagcaggggccttcgcctcaggccaggtgacacccgactcctgaagcgcccggatcacatcgcggttaccgggagccgcgaagaaactcgtgatcgattccgcgatcacttcgcccacatccggcacttcaagacactcttcaggcgtagccttttcaagcgcctcaagagttctgaagtgggaagcaaggtctcgcgctgtagcttccccgacatggcggataccgagcgcgaagataaagcgggcgagcgtcgtctgcttggagcgttcaatcgacgtgatgatgtttccggcagacttttcccccatacgctcaagggtcatcaggctttccgcggtcagccgataaagatcagccggcgtcttgacgagccccttttcagtaagcagattgacgagcttttcacccacaccgtcaatccccatcgcgcggcggctggcaaagtgaagaatcgaaagcttcatctgggccgggcagaaaagaccgcctgtgcagcgcgtgtctttctcctcctcatcgcggattgtcgcggagccgcagaccgggcaggtcttcggcatctcgaattccacggttccctcaggacgccggtccttcatcacgcggacgatttctggaatcacgtcaccggcgcggcggatcacaacggtatcccctacccggagatcaagctcatgaatgaagtcttcgttatgcagcgtggcgttcgacacattcgcgccgcctacaaagacaggctccaggcgggcaaccggtgtgagacgcccggtgcggcccacctgcacatcgatcccaagaaccttcgtaaaagcttcttccggcggatacttgtgcgcgcaggcccagcgcggttcgcgggcgacaaaaccaaggcgccgctgaagatcaaaccggttcaccttgtaaaccacgccatcaatcccgaaggggagcgtatttctgatcttcgcgacgtagagatggaaggcttcaagctcttcaggcgagtggcagatgcgccttgtgtccgcgaccgggaacccgaggctcttcagccgttcaagcgaaccctcctggctttccgcaaagggacctgcttccgttgacacctcaccgaggctataggcatagaaatgcaggcggcgcttcgcggtcaccgaaggatccagctgcctcaggcagccggcagccgcgttccgggcgttcacgaaagttttttctcccgcttcttcctgcttcttattcaaggcaagaaagtcttccgtatgcatgatcgcctcgccccggacctccagaatctcgggatagatccccgtcagtttcagaggaattgtccggatcgtgcgcgcgttggccgtgacatcctcaccgacaataccgtccccccgggtagctgccgaaacgagaacccccttctcataccggagattgatcgcgagaccgtcaaacttcagctccgcgacatattcaaccggaggatcctcgggcttcagcccgagggcattcctgacacgctcatcaaacgcgcgggccccctccgcggaaaaatcggtctccgtatggatcgacagcatcggaacgctgtgcgtcaccttcgccatatctgacttcggtgcgccgcccacgcggagcgtcggtgatgtggggctcacgagctgcgggtattcggcctcgagcgcctgtagccggcggaaagcctggtcatacacagcgtctgacaccgaaggcgaatcctcaacgtaatactcgcggttccagcgttcaagatctgcttcaagacggcgcatttcctctgccgccgcttctgaaagcgggccctttgccccggggatctttccgtcagccatttcgttcatcactcaagcctttcaccaaaaatgcggtcagcaggcgctttccgcagactcaaaaaaacaggccgcgcgggattggcaatcctcacgcggccgcgctgcagcacctgactctcaggcgaagagccgcttcgtgcggcgggttccggggtcaagtccctgcttcgacatcgcttcatagaagaagcggagctgctgcgtaatgctcacgatcgcggcggaagtgagcggaacgccggagacatccgtaatcacagcgttctctcgggcggcgatgtagtttgccacgctgaaaagcgctccaagaggattcttggacggtgcgcagagcgccggcgtgagttcaagtgtcaccatgagcggattctcagggtgaggaagcagccggagccacggggccgcgctgtcggcgtcccgcatcacgagtgcattcttttccgtattgaaaccacaggcccgggcgatctcaaccgctctttgctgcgtcagaggcatcacgctcttcaccgcgatcgaaagcgtgattccgaagcgatcaatgagagcccggacggccttcgcctgggacaccatgctcggcacatcaacgatatcggcatcggcgtcaagcgaagccgccacctgattcacggcggccgcgaagttgccggccgtgagctcgtccacagtctttgtgcgcgtggcgagctgaagcgtcacgaccatatcggtatacgtaccgccgcgcttgatgtgttcccagagacgcgtgatctgattcttggcctgaattctgaggggagtgccgaaatcctgattgaggggtttgatcacgagccaggcccgattggccgtgaagggctcggggctcttgatcttcacgacgatttccgtcatctgatcaatatcaggttcttcatactgaacatcgtctccctcttcaggacggtattcactgaagaaattctcggtgtcagctaccggctgaggtgaaggaacactctccggggtctgagcgggggccggcgtatcggcagcgccctctgcctccggcttattctccgccggagccggggcatcctccttcgcagcctcgcctgatgccgcagcggcgggtcttgccagcacccggggctcgacttttgtcggctccgcaactgaggagggcttgcggccgaggtaaaaatacacgccggctgccgccacgaggataatgacgattatccccaaaaaaagttcagtattcatttccgcttcccgatgtccgaattgcgcccttcctgctgctgaggcgcagctccggagtacgcccatacagtcttcttaattgtagggcagaaaacgcgggaatgccgcattcgacggtactcttcgtgcgaaaaatcacgccggggcgccttctccgccccccgcgtaattgacagcttcgcgcagatcgaccgaaaccacccgggaaaccccgggttcccgcatcgtgacaccgatcagctgcccggctttttccatcgtgatccggttatgggtaatcgcgataaactgcgtcgcgctgctcatctgctgcaccatattggcaagccgcagctgattcgcttcgtcaagcggcgcgtccacctcgtcgagcaggcagaacggcgccggattcaggcggaacatggcaaaaacgagcgctgtcgcggtaagcgcctgttcaccgcctgagagcagcttcaccgaagcgttccgctttccgggcggctgagcccggatttcgatcccagcctccaggatctcgtccccgatcagctcgagactcgcctcaccgcctccgaaaatgcggctgaagagatccttgaagttgctgttcacctgatcaaaggtgtccttcagcacggcacgggtttcagcatcgatcttccggattgcctcttcgagcgtcgcgatagcttcgttcaggtcctccacctgatgctccgtcatctcgagcgctttcttcgcggcctccaggtgttcaagcgccgcatggttcacggggccaagcgcttcgatatcgttctcaatccggccgatttcgtttctcacgccctgggtcttccagccgccggtttccgcctcgcggagtgacgccgcgcggtcaacccggcgctcggcaatctgattggtgagcgcctgaagctcagcctcagtgctgccctgcttcaccttcatttcgccgatccgctcctgcttcgggcgttcggactccgtgatggaatctttcttccggttaatctcagaaagcttttccgtcagttccgcggtcttcttctgtgcggtctgaagctccgcctcagagtccgcctgtttcgcaaggacatcctgcaggccatcccgctcggcgtcttcatcgagttcctcgagcatcgcgcgggtttcctcaatcgacgctgtcagctcagcctcttccgaggaaagcttcagcgctgactgtcgggcatccccggcgcgttccagggcatgagcggcgtttgttctgagaagcgtgatccgggaggctgcgtcacgcgacgctctggacgcttcatccatcgcgttccgggccgcttcctccgccatttcggcatcctgcgaggcctggcttgccgtagcgagccgagaatcgagctcttcaaagagggactcagcctcttcatactccgcgtcgatttctcctagccgcttcttcgcctcttcgagatccgtccggatctgtcccgcccgtttcttccaggctccgacttcagactccagttctccggcgcggagagcggcggagtgatagtcacgccgcgcgcgctcgagtgacgcctcggcgcttcgcagcgtcgcggttgccgcgtcacgcgcctttccggtctcaagaacatctgcgaggatcgcctgataacgctctgaggcgcctgactgttccgccttcagctgtcggatctcttcctcacgctcaagcgacccggcaagcggattctcttccgcccagaaaagcaccgctccgcgctccgcgatatgcccatcccgggtgatcacaggaaccccgccgtcagtggattgcctcacagcgtcatcaagagactccgcggttctgaagcgtgagagccaggtggcaagaaccgacgctgaggcacctgaaccccgcacttttgcggcaagggtcccagtccggtccgccggggcgtccgcagccccttcacgggacgcgatcgcgaaccgtccgggcggcgtgtcctgggcaaggatgccggcggaatcaagattttctgtgaggtacgcgggaatacggcctgagagcgcggcttcgaccgcttttgcccagccggtttcaatctccgcgccatccagaatcttttcgtagcgggaaagaccgtgcgcggcggcccaggcttcaagcttcccctcagccctcgctttctgctgaatctcttccagcgcctgaagcctggcggtcgcttcagaaagcgttgccgaggccgaagccttttcttccgcggcagctgctgccgcctcatccgcttcagaggcagcgtcacgcgcctcttcgagggctgcctcccgctcctctaagtcagacgcccgctcctccgcggtaatcttcgcctcttcaagttcgctctcgcggccggccgttccagtgccgcctgacgcctcagattcgagtttctcgatccgggcctcaagctcacgcttttcccgctccagcgcctgctcgcggaaattcacttcggtaagcgacttctgcgcgagacgctcttcgtccgccgcgcgctttgaggcttccttcgcggattcccagtattttttcgcttccgctgcccgctcatcggtcgccgcggcatcctccgctatcgactcggcttcttcggaaagcgaatccgcttccttagtgagctcctcggcccggcgctcggcggctgacgcttcttctccggcgcgcgagagtttcgcgctgtcgcgtgtcacacggtcagtgagaagcttcttcttctccacaatcgcggcaatcgcgctctgcgttcgcgcgagttccatattgaggcggttgagggcatcgcgtttcgcgtcctcatcctgcttcgctaccgtaaggctgagcgagagttccacagactctttttcaagcgcggatttttcagcacgccccgattcgatatccgccacggcttcggcaattttggccgcgatccggtcacgcgccgcgatagcgtcccgctcctgaagcgacagccagacaccggcgagcatttccttgcggttattgagtgtgctccacttcccggcaagctccgcttcagcggaaagcctttcaatatcggactttctgacttcctgcagatccgccacacggtcaagattcgcgcgggtcgacgcgaggcggctttccgcctcacgccgtctctctttataacgggagacgccggctgcctcttcgaagtagaacctgagctcctcaggtttcgctttcacgaagctgctgatcatgccctggctgataatcgcgtaggagtgcggcatgagacccgtgcccatgaaaatatcctggacatcgcggcgtcgaaccggctggttattgatgaagtaagcgctctgcccgtcacgcgtcagtgtccgtcggatcgcgacctccgcataggcaccccagggcccggtcagcgttccgtcactgttatccagcgtcatttcgactgaagcgcgtccagctggagcccgaccttcactccccgcgaaaatcagttccagcatggaactcgtcgcgcggagctcgcccgcccgggtttcacccatcacccaccggacagcgtcaatgacgttgctcttcccgcagccgtttggaccgacgatgccgacgaatccgctcgggaactcaatcaccgtcgggtccgcaaagctcttgaaacctgaaattttgacctgtcttaggcgcatgtatgtgagggatatcgaagttttgcgggatgaagcctgtgacccgcaggtggatggactctataatatgcggcttactgctgagggactgattttaccctctcacgggcccgcttccgcatggaacccggcacgcggcttccggacgcgcccgaaagaacgttttatataaggaataagtgacatgtcttctgcaccgagcgaaaagcttgaggtctttgataatccggcgcctgagcgcgactacgtgatccacatggagatcccggaattcacctgcctctgcccgctcaccggtcagcccgacttcgccacgctgatcgtcgactacatcgcggacgaaaagtgccttgagctgaagtcgatcaagctctacacctggacctaccgtgaaatgggcgccttccatgaagacgtgacaaaccggattctctccgacttcgtcaacgccattcatccgcgctacatgcgtatccgcgcccggtggtgggtccgcggcggcatctacaccacggtgatcgccgagcaccgcaaggaaggctggaccccggcccctgtcgtgcatctccctgacttcgaaacgaactccccgatgcgcggctgatccgcctctggaactctttaaagcgctcacgcgagaggaacaatctgatgcctcagaatattcatgaatcggtttcccggctccgcacaatccgcgacatggtccgctgggccatgacccgtatggagtcgtccgaaatttcgttcggtcacggtaccgacgatacgtggcaggaagcgacgttcctcgtgctgcgggcgctgcatctgccgtttgagaagctcgaggcgttctgggacgcccggctgaccgcggatgaaatcatcaagatcacggatctgattgagcgccgcgtgacggagcacgtcccggtgccttatctgctccacgaagcctggctcgtgaagcaccgcttctactgcgatgaagacgtgctgattccgcgctccttcattgcggaactcctcgaggatcagctcgcgccgtgggttcaggatccggaagcggtcagctccgtgctcgatatgtgcacgggcagcgggtgcctcgcgattctcgcggctgaggctttcccgaacgctcacgtcacgggtgttgatatcagcccgaaggcgcttgaagtcgcccgtgtgaaccgcgcggactatgaaatggaagaccagatcgacctcgtgctttctgatctcttcgatatgcccgaagtgaagacgaagaagtgggacgtcatcatttcgaatccgccttacgtcaccacggccgccatggaatccctgccggatgaataccgccttgagccgtctcttgcgctcgaagccggcttcgacggaatggatgtggtgcgccgtctgctgcctgaggccgcggatcatctgaccgaaaacggcatcctggtcgttgaagtaggtgacggccgcgaagcggttgaagcgatctggcctgatctcccgctcacctggctcacggtcagcgcaggtgatgacctcgtgttccttgcgaccgccgaagacctgaagcgatacttcaagcactgattcagcgtgggcctgcttctcgcccggctccggcagctctgagggcggcgatcttcgccgcctttttcatgtttttaagaaaggtttgattgtgctacgccttattgatgtcagcctcgtgagaggcgtccgcgttctctacagccacgcctcggtgctcgcctccgatggcgaacgtgtcggcctcgtcggcccgaacggctgcggaaaatcgacgcttttcgccgcgattctcggagaacttcagacagaagcgggtgaaatcgaacaccccgcggaagaccgcatcgcgcacgtcgcccaggacatcgaggcagttgatatgtcggcgctcgacttcgtgctctccgggcacgccccgcttgaggcggccaaagcagcactgaaggccgctgaagggtcgggtgacgatatggcgctcgctcaggccatggcaacactcgcggaactgaatgaaggcgcgatcgcagcgaacgccaaaaccattcttcatggtctcggattctcggaagagcagaccgtgcttccggtccgtgatttctccggcggctggagaaaccgcctcgcgctcgcgcgagcgctgatgcgtcccgcggacctgctccttctcgacgaaccgacgaaccacctcgaccttgactccgtgatctggctcgaagcctggctgaagcgggttcaggccacgatcatcattatttctcacgaccgtgagtttctcgaccgggcggtcggcacgatctggtcaattgaggacggaacgatccgccgctacgccggcaactattccgacttcgaagcgatgcggattgagcggctccgtcagcaggaagccggtgcccgcgcgtatgaacggaccgcgtctcacctgcaggcttttattgaccgcttccgctataaggcaacgaaggcgcgccaggcgcagtcccgcatcaagatgctggaaaaactgcaggcagttgagccggtccgcgctaaggctgagtggcggtttgaatttccggagcctgagcggcttccggatcatctgctggatgccgagaatatgtccctcggctacggtgacaccccggtgcttcaggatgtttccttctgcgtccggtccggcgaacggatcggcgttctgggcgtcaacggggccggcaagtcaaccctcgtgaagggaatctgcggtgagctcccgctcatgtccggcacgcttcgacgcggccagggactcacgatcggctactttgcccagcaccagctggattccctgaggctcgatgaaacaccgcttcagcatctgagacggatggcccctgatacccgtgagcaggagcttcgcgattttctcggcaagttccgtttttcgggcgaccaggtgaatgaactcgtggcgccgatgtctggcggcgaaaaagcccgtctcgcgcttgccctcatcgcctgggaaaaaccgaatcttctcgtgctcgacgaaccgactaaccatctcgacatggaaacccgcgaagcgctcacgatcgcgctttccacgttcggcggttcggtccttatcgtgtcgcatgaccgtcatctgctgcgggcggcaacggaaacgctgtggcttgtccgcggcggccatgtgtcggcatatgacggtgacctagacgactacgctgaactcgtcctttcagaccgccgtgaccgcgcggcggcgcagaaggaagagaaccgcagcgccgcggccccggttgtcactcagaaagaggcacggcgcgaagccgcgaaggaacgcgcccgcatcgcgtcgctccgcaaaccggtccagaagaagattgatgccgcggaaaagcgcatggcggaaatcgacgcccgggccgcggagctcgatgcccagatcgcggatcccgctttctatagcggcgaaaaggctcaggtggaggaaacactgaaagaacgcagcgctctcacggaagagaaagagacgctcgaagccgaatggctggaactctcagaagagcttgaatccatcaaataaagcctttcgtttcagatacacaaaatgggggaacggttcatgaccgttcccccattttttatttttctgattcagagaaccagctgattacttgccctgaacaatatgcggtccgaccgcgtggccgaacgtcatgatgtccgcaatggcgttgccgcccaggcggttggcaccatgaatgccaccagtcacttcacccacggcatacagccccggaatcggctgtcccttggcgttcagcgcttcgctcttcacgtcaattctgattccacccatcgtgtgatgaaccgtcgggactttcttgcaggcgtaccaggggccttctgtcatcggcttatcgtctgtgttattcgcaatgaacccgaagcgatccttctgcttccctgtaacagcatcgttgtactgctgaatggaagccttgaggtctgccgccttcataccggttttttgggcgagttcatcaagagtcggagcttcaaccaccgcaccgagagccaccatatcgcggatagtggcacccatgctgtccttgaaatcacggctgggataacgcagcttattcaccacgatccaatacgtgctgcctttctgatggaaaatggcgttcgccaggacatcgcgtgctgcgccctcactcacaaatctctggccgtcggaattaacaaagatccgattgcgtccggacgtacgaatgttctccatcagcccggtgcccggcgtgccgcaggggtgcagctgaatatcggaaagaccgatcagttcagcgccagccttctgtgccatgaagagcccgtcaccctgagccgccttctggatattggtgcagccgattgtgtcatcaagacgcacatgcttccaaacaccggtattcactttctgacggaatgcgacatttgctccaaaaccgccggttgcaaggatcacgccgtctttcgccttgacagttaccttggaaccgaagttatcggcaacgacaccgatcacacgcccgcttttatcctgaatcagactctttgcaggagtatccagaagaacctgaatttttccattcgaatcagcgatcaccttttcaaacacgcggatataggcattgccggacggatccaccggataatgtgaacgctgaccaagagaacccgttgccgcaccgatgtgatccttgaacttcacacccaggctttccatccaatggacagcatcgatggagtggcgagtcatataacgaaccagttccggattgccgacgttatggccacctttcatcgtcgactgatagaacgtttcaaaactatcctgaataccttgagccttctggcgcttatcgtccacagcgtttaaagcagctccggaaacgttggttgatcctccaagatatccaagcttttcaagaacaatgactttcttcgcgccagcctgcatcgaagaaatcgcggacgcaagaccggctccgccaccgccaacaatcaccacgtcagcttcgtatgttctgtcatgaatcgggtggaattcagcctttttctcaaattgcttcatatcagcgcctgctttgataaggcactgcttcacgccttccttaagggctgcagaggaaaaagatgctcctgttacagaatcaacattgatgctttgatacttcaggatttttcttccgactttatcaagagcgacttttccaacaccgattgtttccagatttttggatgtatcaatcgaagtgatcctgttcgcatcaacggttaccttaaccgtcagcggagcgttgtgtccattaacttctgctgtgtaggttccgggctgcaatgcagaggccgctcccgcagcgagtcccgcaagcagaatgacaggattcagtctgaaaagactcatgattccttctccttagaaaatgtgttgcttttttgtattgatgatgaagtccatccatcactgggtttatgagaaggttttactaccgcagctgggtttatttttatctaactggcggtaaataaacattttttaatatgaatcatgctacttaagtagctacactccgattaaaatactgaatcacggaaattctgccggacaaaaatagggctgtacggcagtcgccgtacagcccgttacttcattaaaacgtttcaggggctgttacttgccctgaacaatatgcggtccgaccgcgtggccgaacgtcatgatgtccgcaatggcgttgccgcccaggcggttggatccgtgaatgccgcccgtcacttcaccgacagcatagagacccgggatcactttgcccttcgtgttgatcacctggctcttcacgttgatcttgataccgcccatcgtgtgatgcacggtcggcaccttgcggcaggcgtaccagggaccttccgtcatctgcttatcgtccttgttgttcgcgacaaacccgagcttatcctttgccttcccggaaacaaccgcgttgtagtccgcgatagccttcttcagattctcggcattcatgccggtcttcttcgcaagctcatcaagcgtcggggcttcaaccactgcgccgagcgcttccatattgcggattgaggcgcccatacggtccttgaaatccggagtcggataacggagcttattcacgacaatccagtaagtcctccctttctgctggaagatggcgttcgcgagaacgtcacgcgccgcgccttcattcacgaagcggttgccgtccgaattcacaaagatacggttgcggccggacgtacggatgttttccatcaggccggtgcccggggtgccgcaggggtgaatctgaatgtcagagaggccgatcagcttggcaccgactttctgagcaaggaagaggccttggccctgagcggccttctgaatattcgtgcagccgatcgagttatcgagcttgatgttcttccagacgccggtgttcactttctggcgatacgcgacattcgcgccgaaaccgccggtcgcgataatcacgccgtccttcgccatcaccgtaaccttggagccgaagttgttgccgacaactcccaccacacggccgctcttattctgaatgagcttcacggccggtgtatcgaggagcacctgaatcttgccattcgaatccgcgatcaccttttcaaacgtacggatataggtattgccgtacggggtcgccggatagtgcgaacgctggccaagagacccggtcgcagcgccgatatggtcgttgaacttcacgccgaggctttccagccagttcacggcgtccattgagtgactcgtgaggaagcggacaagggtcggatcgcccttatcgtggccgccgtgcatcgtggtctcatagaaggtttcgtagctgtccttgataccctgggccttctgacgctgatcgtccacggcattcagagcgccttcactcacattcgttgagccgccgacataaccgagcttctcaagaacaatcaccttcttagccccggcctgcatcgaggaaatcgcggacgcgaggccggctccgccgccgccgatcacgacaacatcagcctgataggtacggttatggatcggatgcttttcagccttcctcgtgaactgcttcatatcggcgccggcctgcttcaggcacttctcgacgccttccttcagcgcgtttgaggagaaagtggcgcccgttaccgcgtcaactccgatggactggtagcgaaggatgttatccgcggtcttcttgagaccgaccttgccgacaccaagcgactcctgatcatccggagtcttgatggaaaggatcttattcgcgtcgaccgttacttcaaccgtgagcggcgcgttgtgaccgttaaccttggcggtataggtaccgggcttcatcggggaagccactgcggcagttccaataaaagcaagggctgctgcaatcgcgatcggtttaaaagcaaatttcatatttcgttctctccttaaaaataacgaaactgcttatcctgtaacagataacctcgcgattattatcggagttatgaattccattgaatcaattttctgaatcacttatgccttatggcaaagttttttggataatgaatgagttattcatggggatacggttttctcttaagacttcctcttgcgactcagaaaaccctttaaaatccccttcttccggcagtcaggctgacagacactgtatttttgaggcattattacggtagttttatgtttaccgcagttattacgccatgatttccgtcattctctgggtaatcgcctttattctcgcggcggtgctcttcatgcctctctggagcaggatcggaccccgcgtttacgcgctcagccgaagccatgctgtgcagatcgccggaatggcagcgaccttcatcattactttcattgcggcccgtgccgttcttcagtttcttaccgccttatttacgaaatgacagcaaaacagacctttgccgatcggctccgtgcctgcatggagcggatgaactataagcagcgctatgtcgcggatcaggttggcgtctcgcagcccgccgtcgcgaagtggcttgccggcgatacacggaaggtccaggcggatgttcttttcagactcgcggacctctttaacgtcaatgcccgctggctttctgacggtcaggggcagccctgggtgagccctgcggatgactggattcatgagatgactgcgcctgcggcccagcccgcgcatttggagtctgccgcggaaacgcgcccggatcccgaacctgaggcacccaagaaatcgcccggccgaccgcggaacccggactacacgatgccgcttgacctcgaggtgccggaagagaaatcctccgctaaggatgagccggccgcggaatccggtaaatctgaaaaaaagaagaaggatccctgcgcgagccgctgtcacctctacgcctcggtgccgactttctcgctgatccgcggcaagtcgccccgcatcccggtgctggtgccgtccgatgaacggattgatgccgtgattccgaaaacggatctgaaggggcatgacccaaaggcctgccggcagtttgtggtccgcaccgatacgatggcgcccgcgatctgtcccgaggacacaatcgtcgtggataccggaaacccgaaccgggttcactacggcgcggtgcatctccttttctggcagggacagagcacgcttggccgcctgctgaaagaacctgacggttcggtcattattcagtttgacaatccggcctatccggtccgcactttctcagagtctgatttctcgtctctgatcacggtaatcggtccggtggtgctccggaccggatcaaaatttatggctcgcgggcttctcgtttagccgccgcctgccgctcttcgccgtgcagcacgacggagagcggtgtattcagcaccttatccgccatgaggccgcggtaccaggacgagtccgtggcattttcctctttgaagagacggatggtcggatccagcgcgagagcagctaccacgggtttcagcgtcgccgtatcgggatctgcgatcagcacccaggcatcgcccttcccccgcctgtcagtcacccgggagacgtaacccacttccgcaagctgctcgagaatcgctcctaccgcctcaggccagctgtctaccttgcggcagagcttctcaaccggcaccaccgggttacccgcttcttttccccgcatcagggcttcaagaagcccaattcccgtagccaggctgttgccatgcttataggtatccccaaaacggccgctcgcgatcatcggaagcgtagcggtcacgccggcgccggcaaaaatcaggatccaggtcgcatatatccagagcatgaacaccggaagcgcgacaaacgccccgtagagactcgtcagcgttccgtggctgatataggccgagaatccccacttgacgacaagaccgaccactgaggtgaaaagaccgcccgccatggcatcccgccacttcacgcggcagttgggaatcgcatagaacatcgcgctgtaacccagcgtctgaatgatgaaggtgagcgtattgagtccccagaaaacgatgcctcctgagaaccccgagagcgcgagacgcgcgagatacgtggtcactgtgatgctgccgacagtcaccacgggaccaagcgtcagaagcgcccagtaaagaaccgccttctgggcgatggaccgctgatgacggacccggaagatctgattgatcgtcttgaaaatcttatcgatcaggaaccaggccgaaagcgcgacacccgcgaaaccaaaggcagagagaccccgcgcatgttcggagaagcctctcagatagtgaaagatctgaatgctgtactgacctggaatgacgttcgcgaggatcagctcgagctccttgcggtacaccgcaaaggccggaatcacggaaaacatcgcgagcgccacggcaagcagcgggacgatggaaagcaccgtggcgagcgtcatggagcttgaaatctccacgatgttggtttcactgaatcggttcagagcgagctttgacaggcgcttcagcgtcagggcaagcccccggcggccgaatgctttatccagtttcttatctaacgcgagcggcatggctctccttcgaaaattctttcctgcgggcgataccccggtccgcggtctcctgagaggcccggaacccggggttccgcctgctcatgccgcagcttcttactctacataatgctctctcaggagcttaatttcatgcgcgtagcccggaagttcattcggggtctcgagataaaagggcagatgcttcagcgccgggtggttgatcacactgaccagagcgtccaatccaatctctccttcgccgattttttcatgccggtccttatggcttgaacgcggattcttgctgtcattcaggtgaatcgccttcagtcggttaagacccaccgtacggtcaaactcttccagcactccgtcaaggtttccgacaatatcgtagccgccgtcccagatgtggcacgtgtcgagacagacgcccagccgatcgccgagcttcgcgcgatccatgatcatccggagctcctcaaagcagcggccaacctcactccccttgcccgccatcgtttcgagaagcaccgtagtcttgatatccggagtcagcaccgcatccagcatttcaacgatcagccggacaccctcttccacgccctgcttcacgtgggaacccgggtggaagttgtactggaaaccaggaagcgcggaaagccgcaccagatcatccgccatagtctcgcgggcaaactgccggatcgagggatccgcagaacaggggttcagcgtgtagggagcgtgcgccaggcccggcgtaagaccgtgttccgaggcgaacgcgagatacgccttcacatcttccggatcctgcggcttcgcggaaccgcctcgcgggtttctcgtaaagaactgaaaggtcgatgcaccgatcttcactgcttcttttcccatcgcgagatagcccttgctcgacgacaggtggcagccgatattcagcatttcaatttcctctttcttcaatagataactgttagaggagaggttagcaagaaaaagggaggtgaaagaccctcgtctctcaccccccttacaggcactttgattcgaaacccctgatcccgctcattcaacccagcggtagtaccggacaggcttttcctcaccgccgcatccgcaggacttcccgtcactgcagcacggcgaatgcatcaccttcggaacccaggtttcaatctgccccttctgcacgaggcgctccatcatcggttcgaggagttctttcggcgtgcggaattcatttgccatctcaatcaggctgatgcttccttttgacttcacgtagtcacgcagttcaataagacttgccatgctcaaaattcctttccctttcgggagtgagccgcttccggccccctttgacggggccggaagcgggattcttatctgcctgatcaggccgccttgatcgggatcacacgggggccgttcttgatcgcattgttacggctcgcgcgcatccagaggatcatcacagcgacaaacgcggcgcttcccacgatgcagctgagcgaataagccggatgctgggcaaacgtggcgatctgatagaagaccgtagcggagcagtagccgataccggtggtccaggcgcaggcgaagagcgtccagcgggtacccacttcacgccagatcgtgccgatagcggcgcagcagggcatgtagagcagcaccatcaggaggtacgcaaaagccgcggtggtcgagccaaagagcttctgcatcatcgtgacggtcgtcattgtgccttcagcttcttcaacggcttcttccgtgttcgagagatcaccgatatgagtgccctggagaagcggattctcaagctgccccgcgagacccagcagattatccccagtcgtgctcagggcttcctgcagcgtagcggtaaagctccaggcttcttccggttcctcaggcttcgcttccgcgccggccgccgcgttttcgcggtcagcagccgcagcgtagagcgaattaagcgtaccgatcacggactccttcgccagaacgcccgtgaagacgccgacagaagcaggccagtttgcaggcgtaatgcccatcggctcaaaggccggaacgatcgtcttaccgatagcggagagaacgctgtcctcgctgtcctggtgaccgaaagttccgtccgtgccccaggagttcaggaacgtcagaaccacgaccacagcagtaatcaccttgccggcgcggccgataaaggcgccgacacgttctgccgtgtggttccagataccgcgaagcgtcgggatgtgatacggcggaatctccatgatgaaggaggcgttattgcccgggaaggcattcttcttcagaaggaaacccgtcagaatggcgacgcagataccgatcagataaaggctgaagatgaggagcgagccgcttccagcgaagaacgccgcgccaaacagcacatagaccggaagacgggcgccgcaggacatgaagggcaccatcatgacggtcatgatgcggtcagactcacggttcatcgtacgggtggacatgatggcggggacgccgcagccaaagcccacgataagcggaatgaacgcacggcccggcagaccgatggagcgcataaagcggtccatcacgaaagcggcgcgggccatgtaacccgagtcctcaaggaaggagaggaagaggaacaggcagaagaccaccggaatgaaggtggaaaccgtctgaataccgccgccgacaccgtccgcgagaatcgtcttcagccagcccggtgcaccaatgctggtaagaagctgaccgaaaccgtcaaccagcacaccgcccacgagaatatcgaagaagtcgataaatgcgctgccgacgttaatcgtgaaaacgaacatcaggtacatcacgagaaggaagatcgggatgccgagccagcggttcagaacaatcttgtcgatcttatcggtgatggtagagcccacgtcacccttgtggtgcagcacctcttcgcagatcgtgccgacgagctgatagcgggtatcggcaatagcgatatccaggtcttcgccatagtgctcaaccggacgcttcagttccggcagatcgtgcgcgacatcagagggcagttcagaagcgagttccgcgttttcgagcacctgcgtggccgtccagcgggcgtgcttcgcgccggtcgcctcaagccgcttcgcgatcgcgtcgatcgcggcagtgatgtcagacggatactgcacggcgttagccggaatcgtctggctgtccaccatgcggttcacggcgtcctcaagctgcttcagacccttttccttgctcgccaccatgccgatcaccgggcagccgaagcgttccgaaagacgatcgagattgatctcgagcttatgctgtcgcgcgatatccatcatgttcacgaccatgatcatcggcacccgcatttcaagcagctgggtagagagatagaggttgcgttcgaggttgccggcgtcaacgatattgatcaccgcctcagcctctccggacaggagatagtcgcgagcgacgcgttcatcctcgcccgtcgcgttggagggcgtaacggaatagatacccggcagatcgacgagcgaaatatcgtggccatcgtggctgtaatggccgaccttcttctcaaccgtaacgccaggccagttgccgacttcctgcttggaaccggtaatggcgttgaaaagagtcgtcttgccgcagttagggttgccgacgatgcagacaatatgtttggacacgagtggttctcccggattagagcttttcaacttcgacgatttccgcttcacccttgcggacagaaaccatcgaaccgcggacgcggatctcaatcggatcccccatcggagcaacgcgcaccacttcgaaggtggcgccaggcgtcgcacccagcatcagaagatgacgccggtaatcgggctgtcccccgaggaacttcgcgatcttgccgcggtccccaaccttcaattcattcagaatcatgaaaagtctctctagtcaatgaacaagaattttctttgccatctgatagttgatgccgatgcgggcatctcccacagcaaccatgattgaatcgccttccttcccatgaagcactttcacctgagaacccagatgcagtcccagatccttcagtgaactcacttcttttacggaaccgcggattgcggtcacaatcccgggattcccgatcccgagctccgtcaacggcttgatcatttcgaaccccttggtggcattcctcccggaaaccgggaggtcagtttttaggcaaactgcggtctatcgccgcagaatttcatgcgaagtttatcacttctgataattattatcatttagtagaaagaactatgagaaataattctcatatgtgtatgttttaatttattttatttaaaaatacg

SEQ ID NO: 1350 - DNA, 15812 bp, Unknown
  gut microbiota DNA sequence
aattttcctcaccctcgaacagttggcagccgagagaaccttaatagcttcatgagttacagtggtgcctggccccagaaacagcgaacagattgtagcaataggtatcctcacgacgtttccatcggaatcaatccacttcacgctgctgtcgtcaatagcgagtcttccatgttccaggtataggaatggatacttatcctttaccctcggaagcgtgtctctcgtaatcttgacatagagtctggggccagttcccatagcactatccttcgggagttgcaggaatcacagtaaccactctgtcacgatacttcttcataactccgaaggagactggtacgtcgttgagtagcatgacagttcctttctccggaatttcctcctcagtaacagtgaattgaagttttctatttttcctttcagctagcgataccgcttctttctttgcttcttccgcagtgtcaaataaaccctgaggaataatctcggaagggacacagtttttccgtcccagggaaagagcccagacgggagacttcaaagcattgaaaagagtattcgcgagttcttcatcgccaaacgacagataaacagaaaacgttgccgactgcaggtaaaaccgataagtcagtttggaacccgtcaccattgcgggcttttttccttcatccgtctttgggatgaaaagattctcccaagggtccttaccgtcatatccatttccgacaccctgaaaatcgacaagcataggcgacggcgttttcttatccagtatgaacgactggcattcccattttgctttggaaagacgggagagcagttccgtttgcgggccgccagcccctagggctgcgcaaagcatcccgcatatgccggaaaaggttggaaacggaagcgtgtctctccgatcaaactgggagtcgtgcccccagctttgcaatgggccttccagccacagcaagagagttttcatatccactctcctagatggacgcctggattccgtggatcagatcgtcaatggaataatcctcgttttttccccactcgaaaccagcaattttgccaaacagcgatccacacattttttccttcttatcaagataggagtccaatgctttgatgctcggattcaaatagccgttatcgcagcgtacaggggtctcaaagggcacctgcaagcgctgtcccttgcgaacatagactctggcatagtcccatgggctggcaccggagcatgagtgctgacgtgcagtgggaacggcaacaaagagagctttagtgaaaatttcaacggctttctttatttcttcgtcagattcctcttcaatgccgaatgtgtccgcgagctgtcccaggtccaggctgatatagcggtaatacgtggctgagttgtattcaatcggtccaagatgagcgctgccctgttcttcaggttttctcatgtcatcaagagccgtgaagtaatcaatttcaggaacagatttatgcgtggaaattgcgtgggagaaagaggctgctgcctccacctccatctcaggtgcctgggctaccatgcgaccaaagagtgcaatgtcaagcacattgaagtttttgtcgagaatctttttcgacagcttgacaagctcttgggtaatagtcttcagttttttagccccttctttccctgccggaacctggaggtcaaaccccttctctttggcatattcggcaaatgagttgcactctgcagggctgataaacacaagtgtgtccttggccagagcctgagaaatagtttcgccgcagatggcagcctgttcatcagtcgcacccagtttcttgcaggcttcagagacaagatccgaaatatgtttcgtacgaataccgagctggaattggggttcggcatcgttgctgtcattgtcaagaagagagtgaagatccattctcacgcggcgcttccagcactgagagctgactcgggaacgggggacacccccaatcagggctgttttcggggaaccaacgtcatcacggttcagacacgtaacaggaaagctctgaagaatatggtattcaacgatcttgccagtgtagggattctttttcatagtttgcctcttaagcctcagtagagagagaaacgggaataatctgtaataggccgcagccgaaagctctcccgcggccaattccatttgcaaaagattcagaaaaaatgtctttgtcggtgacctcaagcgtgccgcgcagatcggcttgtgagagcgtgaccttgctgttatcttttctgaaagtcacgacctttttagaagtaacttccacagcgcccggatcgactgagaaaccccagcgaggtgcacggtccgcgaaccactgaatgatgttttcatctccgcgtacaggctccacatttctggaaacgtggtggaagatgctcggattgactcttacatagaatcggtaataccgactgtcaagaaatccatcaggcagttctttggtttcgagattcccaaacatgggggtcgatgggggcaccttagagagaatcagaacacgtgtctgatctcgatgtccttctgcgagtcgccattgaatgcctgagggagcagatccttttttctcgacaccgcccaatccaaaaagcccacagataatacggtgcaggctgtaagggtctgttactcgattccatgcgagatcgataggactcagcgtaagaaggctgagataaaactttgtcgtcatttcttatacagcctcttcattggaggaatcgaccgatctcccatagaaagaaatcgcccattgcatcttgacccggtctcttccagtatcaaaacggaaatcacgcagatcctcaaggagttgagagtaggaaaggtgtgcgtttccttgactctggatcagatgaagcattggccgaagcacccggcaggcctcactcagagagtcacaggagagaagcctctgaaggcgctgcgctccaggagaatgagatgattccccgccgtttccagaattagcgaaacagacagcaagcgctttgcccagatcttgatttccatcagtttctactttactttgggcaagcgcggcagcgaccaggaaataagcgtctttttcgtcgctctttagatccactttctcctgagtgaggataggaataagaatcggccaggcttcatactgtgtcgcggggttgaacgcgcgtctcaaagcggcggcgtctcccttgctttgcttgatgatctgaagaatacgggaaataaaaacttccattttcggactcctggaccgcgcccagcgggcacggccgacagatggatacgctcttgcccaatccagtaattgacggctggacgttttggggcagacgatattgaaaatatccagaacaatgtcatctattctggagcgcaattttggagattcattgtttctgcagaggttgatgattctttgcttcagaggatcacaacgttcccagaaaagaagcgaggcccgcccggcgagttttgacgcgtcagctaaatttccggctcctgagctgcttccataaggcatgacgtactcgcggacgcttctctgaagtgtcctatccatttcttccagatatgcgaattcagttttataggttctgaaccagcgctcatggggataaatctctacagcggattccacgtaatcgttggtagaagaaactttctgagttcccatactgaaagtgacctgcagccccccggaccagatgccaacgctctcacgggcgtacgccagcttagaaagcgcgagattcagacgccagcagatactgttgttgtcactttgagaatccaggcatgaagtcagagcaaccagatcccgccacggtctcttctctggatgaacctcttcacagcggaagacatttttcttgttttttttcaggagggttgacggatcaacgctgccatcattaaggacaataccttcggtgatatagatgccgttattatcgagcaggcagaatcggttcattgagaggagctgcccctcaagagattcctttaaatcctgagcgatttcatcatcctctccctttggcatgtcatcccagggaggcataccgatgccagaaggaaaaagattcgaatcttcgatttcctcttcggtaaaggtattcatccaaatcgtttcaagaatggattttccgaagcaataggtgtgaagaaaaccgttataaccgacccccgaccctggttttgcagaagtttttttcaggctgtagccggctgacagagaaaaagagttatcagtccgctttcctcctaaggagaagttcatctgcactagcagtgccacagctttttcagcatcggtaaacgaatgatccaactgtctttgggtaaggacagtcgtattacctgtcgctatatgggggtataaaccgccaattttctgcggctccgaaattttcagtttaattgcgggaaactgaagaaaaggtttatccccatataattcgaaaagatcccggcgtgatctgaggtaagagaggcatcgttctccaaattttttcaggtcggctcccagttgtctccactcctcctcattatccggagtgcacgctgcctgggaaatcgccaacaggagattcattacggaaattttctcaacgggatttcctcctaaatggcggagcgattcgtccgaaaaaatcgcctgaagagagactggttcatgaccggcaactggaatccaatgctcgtcaagtaagttgtaactcattggcgctactccttttcctggcaccatccaatcgtcgagtcgtagtactgcgtgcagtcgcgtgacaggttgaaagcggtgccggattgatcaataaacgctataaaaagattctcggaattcggtgatcctaaataaataaagtttccgaaaccgaatgatttggctttttcaaaactgatagaaaaacctttcgctcgggttactgagaggtgaataaaactgcttctcagagaagaggcgatttttttccactgggatttggaaaagtccttctgctcatgggggaatgttactttttctccattcaggagagttagtaccgttctgccattctcggtagctatgttttggataagaagcatatccacagtgggaatttctgagtgccgggtctgcgctgctgagtcatcctctgttgaggtgaaaggattattgagatttttccttgcgtcctcaatcagacgattaatccccgggcatttgggagtcccgtagagaaggtcattcttcagattcccaaacaggcctgtttcgggtctgtcacccaaagcggcttccatcagccggggaatgtcggaggggactgctaattcagaaacaggttccagagtttccagtgtccggcaaagcgtataaggactatagacagccgcggaagatcctaggttctgccggggattctccagggctttctgaagtgtgggagaaagtatccacatttcacgcacagcggcatcagaacgcggagccttttgatgacgccagagtctgcctgatctctgaaaaatcagatcgataggcgcaatccgggataccatgaaatcggcatcaatatccaggctttgttcaagaatctgggtgccaaccaggatacggccgcaatcaagacggtgagcccatcctgatttccctaagcggggaacccatgcggattcaatgttttgccgatcgccccgtgtaaatcgggagtgaagcaacccgcagtccacaccaatttccttcgctcgtgctgccagcaaccggtaaattctttgactagtcgcgacatcgttttctatccaaagcacctgctgatggttttcagcccttttgagtgcttcctcaatagcgtcctgttcaccttgttcgtcgtgatgcaatgaaacaaaaacagttgaatcgggctgaggaggaaacgagatgtgtcccacagtgccattttttcgataagaaatgaccggatacccgaagtcttgccgttcatcctctgacagttctcttctcccccttgatgattttgccttttcagggaaaagaagctcatggcggcttgatcgtgtcagagttgcggagagaaggataaccgtacacttcaagacagctagttcatttatgagttccttcagaaggaatccagtgtaggcgtcataactatgaacctcatcgattacgacgactttgcctgcaagaccgaacagccgtacaaaactgtgacgcacagccatcacagaaaggagtgcctgatcaacagtaccgaccgcaaaaggtgcgagcagtcctcgtttttttgcggagaaccagctgtttcccggagtaaactccccaccccccatatcaaggtgctcaaaaaaatcctcagcattagcgtgaagaagtccggggagatccgagtccggggcagcggcgcttagaaaattggcgaagcgttcgtagatcttgttcgcggtgagttgcgttggcagcgcaaagtaaatgccgcgcgcatgaccagaagagagagctaggtaagccgcgaagagtgcggcttcagtctttcctaatcccattggcgcttcaaggatataaacaccaggttcactggcgactttgcctaatgcctcctgaaatgcgttaggagaataaggagtgccgtcgttatccttgaaaatttctccaaaggctagtgatccctttatgcttaccggactcattcctgcgtctgcggtagctcgtgatatcagaggccgccaaggagattctggattatcgaaaattgagcccgaaccaatccaatctgccacggtagtgaggccggacacaagttgcctttgcacagtagtcatgaaggcgggaaaggattctttaagttcggtctcgcattcattgataaatttttcgcgggatttttcccaaagagggcccccaaaatcttcatcatcggcacgctgccattgcagatctttcttgggtagagacccgtgatgctgtccgaccacagtcgcaatgttacgatcgtgagtcagttccatcatcgtcacaaaactgacccccgggtgtcctccccagcgctcggattcatactgtcttatagcttcaggattatcggtgaaagaggttttctgcagcaattcgtttaccgtgccgtctgatattcccgcgatcagttcaaggcgaaggaaaaaggtcggggaaatttttcccacgtcgtggcatgcagcaattagggcagaaccggacggaaagattggagaaatcgtttcagggaaaagtttttgcagctctttggcgatcgtaccaactatcagacaatgatctgcaaccgatctcccaagtcggttgatccctgactcatctatccaggttttagccgggcattgttcggcaggtggcgcaactcgaataaaaggagtcatgaagatctaccttctagtgttcaatttaaatttctcaacgctcttaaaattatcatatccgtaattaaaatgcaaacgacaggttgccaggagtgatgttttaggtctttggtttctgttatcgaattcgccgtgtggaaatcgattgagctagcgtttttaaattagagatcaacatacactgtcagcaaatagatacagagatacagcggcgcgggaatgaaactgtggcaaaggaatacggaggtttttagaggtcatggaaactaagatcgcgtcattcaagcgcggatacatgcaaaaaactcttaatacaatatttgtacggtatatatttttgtattttaaaaacagaacaaaaccataacaaattgattaaagataattaaaaaattctactaatcgttataaattgactgatatcaattcaaatatctgatttcagggcttgaaaccagacaaagcggaacaatgtcctcatccaaataaccgggtaagggatcagctgaaagaatcagcttttctcccccaaactttgtaagacagaggacaaaaaaatgccgtctaccgcaattgatagccagatccacggttcgatgttcagcacggacgaaatgcgcaagatttggagcgacgagtcctgggcccagaagtggctcgacacggaagccgctcttgctaaggctcagggtgagctcggcgttattccgaaggataaggctgacgtgatcaatgagtacgcgaaggctgagctccttgacatcccgtcgatcggcgaattctacaagtcctcgatcacgatcgtgccgctgctccgcgctttcaaggcggttcttcctgatcatgccggtgaattcgttcactggggcgccacgagccaggacattgtcgacaccggcatggtcctccttgaacgcgacgcctaccaggtcattctccgcgacatgaaggcctgcctgaaggcctgtctcgctctcgcgaagaagtatcgcaccaccccgatggccggccgtacgcacgttgtccacgctgtgccgatcaccttcggctacaaggccgctgtctgggctgacgaactcggccgcgacatcacccgccttgaagagatggctccgcgtgtcttcgtcggtgaaatggctggtgccgtcggcacgctcgcctctcagcctgagaagggccttgaaacccagaagcgcatgtttgagatcctcggtctccgctgccccacgatcgcctggcacgtccagcgtgacaatcaggccgaatttgtcagcacgctggcgatctgcgcaggcaccatcggccgcattattcacgaagtgctgactgagcagcgtaccgaagtcctggaactcgaagaaccgttcttcatgggtaaggtcggttcctccacgatgccgcataagcgcaaccccgctgtctgcgaaaacgttctcgccctctgccgcaacgtccgctcgatcgccccgtcgatcgtcgagtcgatggtgagtgaagctgagcgcgactggggctgcttcctctccgagtgggaaggcatcccgcgcgcctgccacctccttggctgcgctctcgcgaagtcgaagtacatccttgagaatctgatcgtctatccggagcacatggagaagaacctcttcctgcagaagggtctgatgatgagcgaatgcgtgatgatgcacctcgcgacgaagcttggccgcatgacctctcactccattgtctacaaggcctgcatggaagcctatcagaaggaaatcccgctgaaggacgtcctgatgcgtacgcctgaagtggaagccgcgttcaccgaggatgaactcgaccacatgctgaacccgctcacctatatcggtctcgcccccgaattcgtggaccgcgtcgaagccgagttcggtgagaaggcgaattcctaacgccttctccgccccggattcttccggggccgcgcctcaggcgggatcctcttccgcctggggcaaagcagtacctcagcagcctatcactgcgtcactacaaagatcaccgttcaaagcggggacaaaatcatgccaaaagcttctgcaacctctggagtccagctctggcgctggatcgtaccgatcgcggtcggtatcatcatctggttcctcccggtgcctgcgggtcttaacccgaaggcgatccacatgctcggaatcttcctcggcaccatcgccgcgattctgactaacccgatgccgtccggcgccgtgatgatgacggcgctcgcggtttcttacttctcaggcacgctgactctcagccagtcactctccggtctcgcgtccggcacggtgtggatgattttctcggcgtacgttttgtcgcttggcttcgtccagtccggtctcggccgccgtatcgcgtacctgatgctctcgaagttcggcggttcttccaccggtatcgcgtattcgcttggctgcgctgacctcgtgatggctccggctatgccttccgtgacggctcgttccggcggcatcattctcccgatcgcgaagtcgattaacgaagtcatgggatccaccccgggtgagtccgggaaaaagatcggtgactacctcatcatgacgtgttttcaggtcacaccgatcacgggcgctctgttccttaccggtatggccgcgaatccgctctgcgcgcacctcgcgaaggaaggtctcggtgtggatatcagctggggcacctggctctgggccgctctgctccccgccgctatctgctttgttcttcttccgcacgtgacgaagttcctcgtgaagcccacgatgaataagactccggaagcgaaggcgctcggcaagaagatgctcggtgagcttggcgctctgacgcaccaggagaagctggtcggtatcggtttcatcctcgccctcgtcggctgggcgaccacgatgctcacgggttacgacgctaacgcaatcggcctcggcgtggtggcttacctcctgatctcgggcgctgtgaagtggaaggacgtgctttctgaaaaggcggcctgggacaccgtgatctggttcggcgtcatcatctccctcgccggcggtctcacgaagcttggcttcatcaagtggatgtccgcgacggtcgcggcgcagcttgttggtacgaactggctcgtggccttcatcgtccttggcttcgcctatatctacctccactacatcttcgctaccgcttccggccacgtggcagctatgtatgtcccgttctgcgcggtggctatcggctgcggcgctccggctctgatggtcgcggtctgcttcggtatcttctccaatgtgatgtggggtattacggaatacgccggcggcccgggcccgatctacttcggtcagggttacttcgagcgcccgcgcttctacaagatcaacttctgcgtggtgacgcttaacgtcctcctcgtcttcattaccggccttgcctggtggaagctgatcggcctctactaagaagaccttacagaaatccaaactaactctctactgtttctctctgttcccggaaggggtccgcagcggctccttccggttttttttcacaaacctgtaattctccgctactacaatagaagccggcttcttatgtacaccagaaaagaggatgggacgatgacccgcgtactgctgaaggacagactggctcataaactgacccgcgcgatcgcgagcggtctctatccggtgggcactctccttccaggcgaaatggaactgatgaagcgggaaggggtctcgaggttcacggtgcgggcggcgctcgcgcagcttgagcaccacggtctcatccgccggacgccgcatgtcgggacacgcgtgatcagccgcggttccacgcagggtttcgggcagcagctctcaacactctctgacctcggccgcctcgcgtcgaataacaagcgccggatcctcaagatcgaggaagtggtgatcagtaaggaacgagccgatcagattcacgcggtgccgggtgaaacgatgatccgcttcacgatggtgcgcgtaggggagagggcaggggagccgccagtcgcgtggaccagcgaatacgtgagccgcgatcggcaggaactcgtcaccgaggccccggctcaccccgatatcctgatgattgaacttatccagtcggtttacggtgacacgtgcgccgaggtgcgtcagacgattgaggcgacaaagctccccgcggaacccgcggaagcccttcacgcgaaagaaggagagcccgcgcttcggattctccggcgctactttgatccgaaggggaaagtgatcctcatcaccgtgagctatcacccgggggaacgctacgccttcaatctcacgattgagtcgaagtagcgggtggacgattcacggccgaacaaacgtgaagcgtccgctgcgctttggggtcggtacggctagatagacgcgcgatggaatttctccgccaatgaatcgagccaggcgggcaccccgcttgccgtgatcccgctatcccggagaatccgcgcgatatcagtggctgtgagaatcaggattttatgtttcccgtcgatcgcttcccgataggcgggttccgaaatatagcctgtcgtcaccatgaccccgaggttacgccgctcggttcgagaaatcaggcgtgtcatctcggacacctctacccctttttccgcctcatagcaccgggcttcaagcgcggcgctcagtctgacatccgggtgaaccgtgccgcccgtcgtgatccgatagcggcccgcggtgtcccggccgccgtcctgccactcgcggctgaaggtgaaaccttcaaagtgaggatcgagtttcgagacgaggtccgccgcgcactgttcaaaacccaatgagtcatctttgaatctctcccgaatgaggctgagacactgcagcccctccatgtcactctgcagctgatcaaagggggaggggaattcggaaagcctcggagccttcagcgggtgaagccccgggcggccttcccggacgaaatcccgccaggcgcgcggggcgagcctgaggctatccggatccccgtgccagagagcccgaagccacgccttggatacaggctgactcccggtatcgagaatcgtgaagtacgcctcgtaattctggaaccgctcaccgtccacggttctccagtgagcggtgaggtcccggtccggcggcagcccggcagcgcccggagcggcgagcccgaggaaacgcatatcgcgccccgtgccatggcgcttgaaaatcaggaaaggcggaatctcagaccggtcacccgcgtggagctccccgaacacttcctgaaggaggagattccccttccccctggtgtcgagaagcgatctcccggcctttcggttgtcgccgtagtagcggaggacaccggtttcggtatcgaggaagtctggccaggcgagctcacacatcgaggtgtagaggacgatataagcgatccgcttcgtccgctggttatagaccttccggaagcctccgagattcgggcaccccggaacgagcttcgtgatcacttcacccgcgagattcgggtaaggaccggatttatagacacagtcaacaaaaagatcgctctcttcaagcgcttgatagggaacttccatgccggacctctcaggacgtcaggcccttactccctcgtaaagcaggcggcgcgggccgcgccgcgggggaaagggcggttgagagaaagaatagcagcgtttttagctgcgaatcgatagaagcccggaagaacaccagggggctcgccggaggcaaaaaaatcccggagccgtctggccccgggtttgcagatcgtcactctatatataagaggcgtctcagagcgaatccggatcgttgcagccgcagtcgcagccgcagttgcatttaggcttcggagtgctgagcgtgatgtaggacttgttgagaagggtctcaagcgtcctgatttcctctggcgacagcccgcagcgcgtccggcagttcagtttccggcggatcttctcaaaggtcggctggagcgcgagccctttttccgtgagatagaacatgcagcagcgggaatcctcttctgacttccgcttctcgatatagccgcggcccacgagcgccttcatcgtgagagaggcggtcggcttcgcacgcgacgtctgctccgcgatttcggtgagcgtgcagctcccgtgctcatagaggtagaaaaaaatgtccccggtgcacggcgcgatatcggtcacgcctttccgtgtgagctcgccctcgatcagatcattcacgaagcggatgagctgctccgcctgcgcgagaatcttcataaaggaaatgtcgtcgtccatcgggatctgtccagagtagcccggaggccggagggcaatgccgccagccgccaggggggtcaataaatgtatacagctatggtaccccgggacgccgttttccgagaggctttgcggggggcgtcccgcctcccctcctttacttaggggattacgcccgccactcaaggattttccgcgtgttactattgattacaaggatgctaattgcactcgatcccgacttcagtttggaacccgggggttacccgccttcagttcccagctctatcaaataaccgcggctcacccgccgcgcgttcggcagccgcccgatcggcgctgccggttcatgccgacaaacaggacgcatgagagcgaaaaccaggaaggtgagagacatcaatcctctctgatgaatggcttcgcctaccccgtgaagccagtggcttttctggtgcctcatcggcctgtgcctcaatccatcccgtccgggcggcgagaaaaaccttctcaccgcatggcaactttttatttctttcgataaagaaaggaactgtttctgcgttctccagaccaaaggggaacggatgaacagtttcggactgtgaaccatggaaaacagcaataaaagatatatcgcgatcggcctcatgcttttcgcgctcctcttcggtgccggtaacctcatcttcccggcggctatgggtcagaacgccggcgtcaacgtctggtacgccgtgctcggtttctgcgtgacgggtgtgggtctgcccctcatctcgatcgccgcgctcggttactccgggtgtctggaccttgaagaggccgcgggccgcgttcacccctggtacggcgtcttttactccgtcgtctcatacctcgcgatcggaccttgcttcgccgctccccgtaccggcacggtgtcgttcgagatcgccgtgaagcctttcctcgggtctttttcgcctgatatcgcgcttccgatcttcctcctcatcttcttcctcctcacgtactggctcgcggcgaccccgtcgaagctcgttgaccgtgtgggcaagatcctgacccccgcgcttctcgctgttattctgcttctcatcgtgcagtccttcatcaccccgcttggcacgccccaggccccgacgaagaactacgcgacgcctgtcaccgctgtgatgcagggtattctcgatggctacaacacccttgacgccatcgcgtccttcatcttcgcgacgctcgtgatcagctttgtgaaggagggcggcgtgacgcagccgaaagcgatcatgaagcaggtgctgctctccggctcgatcgctgtcgcgctcctcgccttcatctacatcttcatcgcgaagatcggcgcggattccgtgacgcagctcggtattcttgaaaccggcgctccggtgctcgcgggttcggcgaagatcctcttcggtaacctcggtgccgcgattctcgcggtgatcgtgctcctcgcgtgcctttcgacctcggtcggcctcgtgacctgctgcgccgcgtacttcatgcggctcctcggccacttctcctacaagacctacgccgtgatcttctgcgtgatctcgtacctcgtcggcctcttcggtctgaagaccatcatcgtgtccacgattccggtcttgatgttcatctacccgctgctcgtcgcgctgatctgccttatcttcctcgataagttcttcggcggccgtcagtgcgtgtacgcctggaccatcgctttcaccttcgtgatggcgacgatcaacctgctcgagaccgcgggcgtgaacctcggctcctttgagacgatgcttcagacctacgttccgctccacaccttcggtatgggctggattccgttcgccgctgtcggcttcgtgatcggcctcatctggaaggccgcggtgccggagaagaaggctgccgcgtaagaaagaggctttcaggcggtaaatgtcggtgccgcctgactcctgaataaaaagtcgccccggagcttttcaaggctccggggcgaactgtttatggggaaaggatacgggagagccccacgttct

SEQ ID NO: 1351 - DNA, 194 bp, Unknown
  gut microbiota DNA sequence
cacaggtgggtgagctgaatatgctcaggcgcttgagagaactcgggagaaggaactcggcaaattgacaccgtaacttcggaagaaggtgtgcctttgtagcttgatgggagagaaacccaaagggtgaagaggtctcagagaatcggtggctgtaactgtttactaaaaacacagcgctctgcaaagatgaa

SEQ ID NO: 1352 - DNA, 221 bp, Unknown
  gut microbiota DNA sequence
gctgctctgcaagaacaagcatcacttcatcatggctgccaaaactgatcactccttcatcagggacgccatcgaagataatcttcccgctttctgggatatgacgaacaacgttcgcggtcacaacctgaccgctgttcaaacccaggtcacaataccaggcacgaaagaggacccaaaatcatgtagtgtttgggtgtacatctattacagtcttgcag

SEQ ID NO: 1353 - DNA, 10847 bp, Unknown
  gut microbiota DNA sequence
ttacccatccgtgaaggcaagggacgggggctagacacccatccggcaaaaaagaaggctcgcgatttgataccgcgggccttttgctttatccgggattccgggattccggaatctgaagacaaaaaaatggatggaaccggggcaggagagagctcctcggatccatccaacaagccgttatgggagattgacgagaccgcctctcagagggagagaaggaggggcggcctcaagcggctttcggcaggtggcttaggccttgccgagagcgttcatcgcggaaccggcgcggaaccaggtgagctgcttcgcgttgtacgaatgctgagcctggaagcggtcttcagtgccgtcctcatgcttgcagacgatcgtcacggtcttccccggagcgatctgggagaggccgagcaccgagatgcggtccttctcgcggatcttgtcgtaatccttcgggtccacgaacgtgagagcgagaacgccctgcttcttcaggttggactcgtggattcgggcgaggctcttcgcgagcaccaccacgacgccgaggtaacgcggttccatagcggcgtgttcacgggaagaaccttcaccgtagttgtcgtcgccgacgatgatcgactggatgcccttgttcttatagaggcgggcagtcttcgcgggggactcgtagtccttgttcaccacgttccagacgctctggctcttgccgttgaaggcgttcgtcgcgcgttcgagcaggttatcggaaatccggtcgatgttgccgcggtacggaagccacttgcccccgggggagatgtggtccgtcgtgcacttgcccttcgccttgatgagcagcgggagatcgacgtaatccttgccgttccaggccgggaacggggtgaggaggcggatacgctcggcgttcggagccaccacaaccgggacctgcttgaagtccgggatgatgctgccgccgacgttcgtggcgaagcccttagccgggagttcctcaccgaccggggtcgcgagcttgaaggaaacgccgttcgcgccagtcaccgtgctcgtaagcgggttgaagcgcatatcgccgttgatcgccatcgcgaccacgatttcaggagacgcgaggaaagcctgggtcttcttgctgccgtcgttacggccggcgaagttgcggttgaaggactcgatgattgtgttcaccttcgtcttatcgccgatgtggcgatcccactggccgatgcaggggccgcaggcggtcgtcatcacggtggcattcagcttctcaaactgctgcagaatgccgtcacgcttcagggtttcacgaatacggacagagcccggaaccacgatcagcggcgtcttgatcttcacgcccttatcgaggcactgcttcacgatcgaagcggcacgggtgaagtcttcgtaggaagagttcgtgcaggagccgacgagagcgacctcaatattttccggaatgttcttcttcgcgagcgtgtcaccgaccttatcgagttccatcgcggcgtcaggagacagcgggccgttgatgagaggcttaagttcggagaggttgagctcaatcacgcggtcgaagtacttctccgggtgagcatagacttccgggtccgcctggaggtccttcgcgacaccatccgcgaggtccgccaccgcttcgcggttcgtggccttcaggtaagccttcatgtgggagtcatacgggaagacggaggtcgtggagccgacttcagctcccatgttgccgatcgtcgccttgccggtcgcggagagggtgtccgcgccgtcgccgaagtattcaataatgcagttcgtgccgcccttcgtcgtgaggatctgcgcgacgcggagaatcacgtccttcggcgacgcccagccctgcagctttccggtgagcttgataccgatcagcttcggcatcttcagttcccactcggaacccatcagagcgtccacgaggtcagcgccgccgacaccgatcgcgagcatgccgagaccgcaggcggtcggggtgtgggagtcagtgacgagcatcatgccgcccgggaaatcgtagttctcaaggaacacctgatggcagatgccggaacccgcgggccagaagtcgaagccgtagcggcgggacacggtgcggaggaagtcgtacgtttccttgttgtagtggtcagcgaaggcgatgtccttacgggcgccggcgttcgcggtcacgaggtgatcgcagaccatagcggccgggagggcgatctttttcttcccggagaccatgaattgcagaatggccatcgggccgccgatgtcatgggtgcctgcgcggtccggacggaattcggcgtaagacgcgccgcgcttatattccttcaccgcttccggatcgtagaggtgggtgtagaggatcttttcagagagggtgagcgggcggttcagcttcgaacggaccgcggcgagcttcttcggatagttcgcgtagaacgcttcgatcatgtcgaagttgcggatctgggcggtcggagccttgtgagccttcttggcaggcttcttcgaggcagcggaagcgatatccgcaatgcccatcgttgacacaccggcggcgccgatcgcggtatccttgagcagggtacggcgggacacctggaatttattctgagattccatgttgttctctcctcggccggaattcgaatggcagttcggactccggacgttggtttcaggtttgattctggttttctaggcccgaagaagtttctgagacctcttcagtacggtgaacattgttccgccgacctaccactacgtagtgtgttttcagtcaaaagactattcggcggttgtcctttctgggtaagcaatctgacactgatgccatgaaacgttcccacacactcaggacagccttcgctgcgatccttatttcagcggcttttcaggtcctcgcggccggaacggcgggcgccgctgtggccggagaaaaaatcccggacgtgacgctcgggatcgtctactacacgagtccgtcgcccaacgaggaaatcattccggacacgatccgggcgcttgagaagcggatcggaaagcgtcacctgcgggtgaaggagtacacccttgagcagctgcgggacgcgattaagagcggggacgtggatgtgttcctcgcgtcaagcggcttctaccgccgcatggtgcagtacggcgcgagttcgctcgcgacggtcgcttccaaaaactacccggacccgaatcacagtgacggcgccgcgctgattgtgcggaatgactccggaatccggacgctttatgacgcgaagggctcggtccttggggcctcgtcccccaccgcgttcacgggttatcaattggcgctcggcgaagtgctgcggcaggggtttgacccggaatcgtttttcaagaaaacgaatttttatggcgggggccccggggccgtctcgatccttgacgccctgaggcggaaggatgtcgacatcatcacgcttcgcatctgctggcttgaggggtggctgaagaagcatccggaggataaggggctcttccgcgtgatcgatcagcgggacgagaacgagccctgccagcggtcaaccgatctctatcccacgtggacgatcggcacgagcgcgaatacgcctcctgagatctcgaagattgtgacatccgcggtgctcgagatgccgccgacgaaggacggcttctactggagcatcgcgaccgacttccggtccgtggacgcccttttcaagggactcaaaatcggtccctatcgctacttaagagagtggtcgctcagtcgcttcatcatgacctactggagcgcgatcctgatcgggatcctcctcgtcctcggtctcatccttcacagtgtccgaaccgaggtgctcgtgaagcgccgtacggcgcagctccaggagtcactccggatccagaaggagtacgaggagaagtcgcgcgaagacgcggcgaagatcagctttatggagaagatggggatcatcgggcagctctgctcggtgttcgcgcacgagatgcggcagccgcttggcgcgatctcgctctatgcccaggggatgaagtcccttatcaaacgcggcaaagcctctgaatctcaaatggagatggcgctcgggaagctcgaaacccaggccgagcgcgcgagcgacatcgtggaacgcgtgagagcctacgcccgggcgaaggatatcgatcggaaaccgatttcgcttaacgacgtcgtcacccggtcgcttgccggctaccgctccgcgtccggaagccgggtgcggtttaagcgcaccgacgcgaaccaggtgacgcttttcgcggatcagctcgaaatggagctcgtctcctataacctcatcaaaaacgcggcggaagccgtcaaagatcagccggacggggtggttgagattatcatcgcgtcgaaccccggtaaagcattgcttgcggtctcggataacgggccggcgctgaccccggagcagctcgccgaaatcgagaatccgtcgggaaccctgaagagctcaaagcatgaggggattggccttgggctcctcattgtgaaggcgatcgtggagcggaatggcgggcgcctctcgattgagaacgggagtgtccggggtgtcacgatttacgtgcatctcccgaccgcggacgggggcgataagacccccgcggatgaatccgctcaaggaaatgaaaaagatccggcgggtccggcagaggactttgtgaaagccgaaaccgccgcggactcaaagaaagaaacgggctcccaggggacgggcgacctgaactgaaaaaatacgccgggcggcggcccttggggagggggcggcgcctgaggtcagaaagaaataaggagagagaaaaaatgacgaatacggagatcccggaaatctcggatgacatcaaggcgaagtgcctcattcggacggtggacgatgatcccgcgatgcgggaagcgctcgaattcatgctgaccgcggaagggtggcgcgtgaagacgtacgaaaacgggcgctcgtttctcacggatgacacgccctctaccccgggctgcgcgattctcgacgtccggatgccggggatgagcgggcttgagctgcagcaggaaatgaatgtccgtgggtacgcgcttccgatcattttcctcaccgggaacggcgacatcgatatggcggttggcgccatgcgggacggcgcggtggatttcgttcagaaacccgtgcggcaggagaggcttctcaccgcgatagcgagggccgtgacccgcagcgtgagtgagaccggggcggttgaaaccgaaggcgcgatccgggcgaaagttcaggaactgacggagcgcgagcgcgagatcgcggaactgatcgggaagaagctcacaaaccgccagatcagtgagcgcaccgggatcacggtgcggaccgttgaagtgcaccgcgcggcgattatccggaagcttggggtgcggacgccggatgacattgagcgctatctgaacgcataaatgaggcggggtgagtttcccgccgccaaacgcgccgggatcccgtctgaatggttattcacccggaatttcacagataaaaaaatggaaggcaattatgtaactgccttccactaaattcgatcttgtcttcacttcaccgacgcagaatcaggatgagagtgacctagaccgacacacagagtaaaaaccatgttcaacgcccgcgatttctctcggtaattgaacgatttacaatgtatcacttgtgatttgataaatcaactttgaccactatcaccaagtaggtatttgctgattcatgtcaataatctttggcatagatcaaatacgggattccccttcccgagaggcctgaaaattcagtgtttttatcaggttatgcgactttgatctcatctcatgaataggtactccgtgtgacagatttctgacaggctgtaggcggtacaggttttttattgggcgaaagaaaacattactaatcccattcttaaagcggtttttgtcttacgggtttccggatttaagaacccgttaaggacagatggcgactttgcgtgcagaaataggcaaaaatcccgttataaggtgaatttctcattttgatgaaaaaagacgggaactttttttcatcctgccgctattcctataacgaataacgtggaaatttatttctgggacgcaataccctgccccggctacctgaacaccttccggcgggttaaaaaaagacaaaaacggaaagagcgggatgccttaaaaccggcatcccgctcttacgtaaggtttaagttaggttcaaggctcagagtgaggagaagagcccgaggatcttccagtacggcacaccgatgagcgcgaagatcacgtagctcacgagtgtcatgaagagccctgtggcccaccacttcttaagcggcacgtatcctgcgccgaaaagcaccgggcccgcggcgttcgcgtagtgagtgacgtaagcgcccatcacgccgcacatcacaaagacaaggaacatgtccatcttcgggagccccgccgcgagcccgatcgtgtactgcaccgggatcacggatgccatatacgcgccgcaggagacgaagaggtagcggcaggcggtgccggcgaagacaagcgtgatcagaagcccgatgtggctgaaggacgagaaatcgatataggtctcgagccacccggcgagccagttaaagaactggaatttattgagggcgcccgccatcccgagaatgccgccgtaccagatgagggtcgaccagatctgaccgttcaccgcgatgtccttccacttgaggacaccggtgagaagcgtgagcgcgatgaaggcgagcaccaccgcggtggagttgatctttgtgtaggacgaagtcgaccagagaatgatcgcgagaaggaagaggacgagaaggatcttctcgtttctcgaaatcggaccgaggtctttcagcccctccgccgcgatccgcttgttatcgatttttccaatcgtcggcttataaatcttataaatgatgagcggcgcgaggagaagcaccacgcccgccggcacgataaaggagatcgtccactggatccacgagatctggagcccgaggatctgatccgtcatcgcccaggcgacaccgttagcggcgtaactcgtgaggaacgtgatgccggtcgccatcgtgatgatgtagaggagctgcgagagataggcaccgatcttttccgggttgtgattcggcgtggaaccgagcgtctccgcgaccgagcggaagatcgggaaaatgatgccgccggtccgagcggcgttcgaaggggtcatcggcgcgatgatgaagtccgaaaacgccgcggcgtacccgagcccaatcgccgatcgcccgaagatccggatcaggtgatacgcgatccgtttcccaagctgcgtgtcacggaatgcctgcgcgatcacgaacgcgccgaccacgagccacgtcatcgcgagcgcgtagcctgagagcgccacggcctggcctttcatcgtgacggagtaaaacccgaggaagatgaggagaatcgcggcctcagaaaacggatgcagcatgattccgagaatcgcgcccgcgtagaaggggaagagctcccaggctttcgggttcattccggcgggggccggaagaaagaggaggagaagcggcaggaagcacacaatgattttgatgatctgcgactttttcatggaaacactccatcagcagaaagcaccggaacaatctaccgtgagtttctgtataccggtataccaataaatctaacactttgataatcaaagtggtctacctatcttgaggtaactttggctttgaattgatgtaagacggttttccggtacccggcgtgtcccagaggtcggtttttcagaacgtcaaaaaaagcggcaggtccaacgcgaggacactgccgctctggcgcttttcgagcgcttttcttacgcttcgcgcgtccggatcacgtaaagcttgtcacccgggcggacgcgctcggggaccttgaacgtgatgtcgtccttcttctcaaacgtgtcggcgggcttctcatccgcgaagatctcagtgggctccgcgtacaccgcgcccgtcgtggggccggtgatgaggagcttttcgccctttttgaagccgcccgcttccagcacaaattcggcgatcgaaggtttcacgaagaaattcacgcactttccgacgtagaacttcttctcggtcgccttggtcccgtagccgttcgtgatatccgcgaccggggctccgaggtagtacccctcccagaacccgcggttaaagacagcggcgagtttcgcgtcccacttcgtgcggcaggactcgtcccactcacccgcgatataggtccggatcgcttcgtcgtagcattcgaccaccgtgcggacgtattccggtccccgggcgcggccttcgattttgaacacgcgcaccccggcgtcaatcatccgatccaggaacccgatcgtcttcaggtccttcgggctcatgatgtattcgttatcgacctcaagctcgatatcccgcgtcttatccttcacgaggtaagagcggcggcaggtctgcaggcactggccgcggttcgcgctttcgccccgggtcccgagactcatgaagcacttacccgacaccgcgaggcagagcgccccgtggcagaacatctcgatccgcatcggctgcccggagggcccaaggatcggttccgagacgatcgcgctgtggatccgcttcacctgctcgaggttgagctcccgcgcgagcaccgcgacatcggcgtacgcggcgtaaaacctgagcgcctcggtgttcgagatattcatttgcgtcgagagatgcacctccaccccggcctttttcgcgtagccgagaaccgcggcgtcagacgcgataatcgcggaaatgccggccgctttcgcggcgtccacgatccgccgcatttcgtcgagctcctcgtcgtacacaatcgtgtttacggtgaggtagctcttcacgcctttttcgcggcagagctccgcgatctcccggagatcctcaatcgtgaaggcgttcgcggagtgagcccgcatgttgagctttccgaccccgaagtacacagcgtcagccccggcctggaaagccgcgtagagcgactcgcgggaaccgacaggagccatgatttcaaagtcagagcggagcatgaaagataaacctcaagcgaaaaagcgaaaaaaataagaagctcccgcattctaggcgaaagagcttcttatgttgaggaggagagacggtatcaggcgagcgacgccatcacgtcacgcagcagcctgaaaccggaatcgagcaccgtaagcaccggggtcttgaaacccgtgagctgcggggcaagcgctgccatcgagggctgcgcgagaagaatcgcgtccaccgtgccatcgaccttagcggcttcggctgcgagcgtttcccgcgtcacgtgatgcgtttccaccgtgacctcgagcccgcggcggtaggcgaggttaagaagcagcgtttcgctcgggtgcagggcggccttcgcggtgccgaaaatcgcgaagcgctttccgatcttcagcgcgtcgaggatcatcccttcatcgatacggacaatacgggggttaaagaagctcgcgagcgcggtcgcggtgttgccgtacaccacgcattcattcaggatcgcgtcgcagccgacattttcagccgcttcgtagagatggaagagcgcccggttgtccgcgggggcaggaccggattcggaaatggcggggttgagcagcccttcaccgataaactgacgcacttcgatccccggaaggtactgttcgcagagcgaccggaggagctcggaagagccgcttgaagtctgaacaatgccaagaatctgagccatggctttttatcctttttggtattttttgagttacgggagttttgcgacttattgagtaacttcaaggatagccggaatcggggcgcctggcgcgataaaaggctacgcggcgctcccttcacccttcttccagtgattcggcgtgacgccgaaccggagccggaacgcgcgggaaaagtgctgctgcgtcgcgaacccgttccggtcagaaatcgtccggagggggaggcgtgagagttcgggatcccggaggtcggccgctgcggcttccacccggatcctcacgagttcattcatcgcggtggtccccgcgtcccggaacgcctccgtgatgtagcgcgtggtgaccccggcatctgccgcgatttcttcgagcgacagccctttttcggctcggcggcgtgtcatgatcccgagaacggtggtcctgagggtgccgagcgcggcgctcgggtgtttcgcccggcgcatcgggagcgcctcaatcacgggtgggagaaaggcggggagagcggaagcggctctcgcgaaatcctcgtccccatagagaaacgccgcccggaagaaactttcgagaatccggataaaggcgtcagacgcccagccgcttccctggatcccggttttcgggatctggcgccgggggatttcgtctgaatccggcaccgcagcgagcggcagcgaaagcagaaaaatctggcttcccgcagggatcgtgatccggaggtcttcgtccgtgaggatcggaacgaaactgcccggggttgccaggagcttcgtctttccttcagcgatttcagatgtccccgccacggcgaagagaaggagaagccgggtgtcgtctgacatggcgccgggtttcgattttcttttgaagacaagccccgagcct

SEQ ID NO: 1354 - DNA, 2044 bp, Unknown
  gut microbiota DNA sequence
gaggttctcatcagaagtgaattcaggaagcggtgtcaggtcagacgtgatcggcataaagagaatggggaagacattaaaaagtcttccccattctcctacgggcttgatccccgggcaaacggcgccgggggatcggttttcggtcagaagccgctcttcttaagccacgtcttcagttccgcgtcactcttccgggcttcgtctcccggcacccagaattcaggcttgatcgtggctttcgggcagagcttatggatatccgcgacgacacccgccggggacgagcttcccgaggtcgtcaccgggaagatggtcttgccggcaagcggatgatccatgaggaacgtccgcatcggggtatcgaggtgcccccaccagagcggggcgcagatgaagatcgtgtcgtaccccgagagatccgggatcttcgtcttgatttcacggcggctccacttccggatttcttcccgggcgccgtctgtcatatcgctgtagcggggagcgtagggaaccttcggttcaatccggagaatcggggcgccggtttcggcgtggatccgctccgcgaggtacgcggtgttcccggagcgggagaagaggatgatgagcgccttcgcctttggctttggggcagcgaagatcgcgggagaggcggctgcgatcgccgcggctgagacaccggtgaggaatgtccggcgcgagataaattttgtttggttcattgcgtatggctctttcattattgttttatcaggctgccagcgcctgaggacgtgcggtcctctgttcactcgatcgggcttccatcgggccttacagctttgcctcgggcgtttacaacttttttctcatgtgttgaagtaaaaattacttcaaccccttaaaatataaaggatttcctcaaaaatatcagttaagtatttgagaatatccgtcaagaaaatggggtgtcgcggtctcataatccgcgcctttttcgggttaatctaaaagacgaaaccacaaaaaaatcccggcagcaatagaaaaagatggagagctttttcctatgaagaatgcagcattggagtccccggatctcgtccgacggcgccgccagatgtttgagcggctggacgggatctgtcccacccccgaaattctctactccgacatcacaggcgtttccgtttatcggcgggagagcgatgacgtgatcgactgcaatggcggaaaagcgatggcgtgcttcgtcgtctccggcacgaaagaaaaccatatcggcggccggaagtatgtctacacggagggggagtgtttcgtgtcctcactctgcgtcccggcgttcttccactcggtcggcgcgtcgcacgaaaagccctttatttcggtcggcctgcagtttgagcccgagatcatcgcggaactcacgaagcgtgacccgatcccccaccccgactggatcccggatgagcttgggtttgtgttcgaggccacggaaccgctcgcggacgcctttgacaggctcacgcggctccttgagcaccccgaggacgctcaggtgctgcagcccctcgtgtcccgcgaaatccactactggatcctgaagtcgcccgcggggaaaaccatccggcagctcatgatgcccgggacccgctgccacgcggtcacggaggccgtgcagtggatccggtctcactatcgggaaccgatccgggtggatgagcttgcggaccgcgcccatatgtcgacatccgccttccaccgcgttttcaagacggtgacaggacttccgccgctgaagttcgtgaagatgctgaggctttacgaggctcagcggctcatggtccggctgggctggaatgtctcggacactgcgactgcggtcgggtacgaaagctcgccgcagtttatccgcgagtacaagcggcttttcggggagcccccgatgaaagacgtgaagcggctggaaacgcaggatggtcctggcattgtccgtgtgatctgacgccgattggattcaaaaagagaggagggcagtccgtaaaagactgccctcctg

SEQ ID NO: 1355 - DNA, 844 bp, Unknown
  gut microbiota DNA sequence
agttattttgacagataatgcaatcaaagcagatatgaattttttcatagattccctccacataaaagcgcgggcacacgattgttatcgatcgccttactctttattttgccctttcctattgcaaaagagcgatggagaagtatttcctattgtgacgatcgaaacgtttattttctgacccagtgagtaaagcgtccggtgcagccgccgtcctcaaaggttccgacttcttcgatattccaggcatcaggatcagtcatggtgaagaaagtgtcgccatcaaagtcctggtcgatttcggttatataagcttcggaaatccggggaagagcctcgcggtaggtataggcaccgccgatcacgaaagccttttcttccttatcgaggagaagaagagcgtctgagagtgtccggacaatttcaataccggggattaactccgtatgcgtacgggagaggacgatattgcggcggcgaggaagcgggcggccaattgaaacccaggtgttccaccccataatgaccgggtatccagtggtggtttctttgaagaagcgcagatcagccgggatatgccagggcatttgtccattcaggccgatcacaccgttgtgagaccgggcgacgatcaaagcaagagcagtcatgagaatctcttttttaaaaggtctaactcattcaataatagcggttttacctatcgattttgagtcagatgaaaaaataaataaaaaaatatttgcatttttaaaattgagagggtaagatactcgtcctgtcgctgcgatgcagtgacgatctttaaaaactgaataacgaaccgataagcgtgagcatctgg

SEQ ID NO: 1356 - DNA, 6718 bp, Unknown
  gut microbiota DNA sequence
cggataccggggtgatcgaggggactggcaccggttcaagcctcgtctttcaatcaacaggcgcggggtcaacgcttgacctcgatattggaaccggcacagctgcgaccggggacctcaaggtgagtgacggggccgaagccgcgctccggatttcgggaacctggaacggcgcggcgctgcttgactccggcacgtcgaaagtgagtctctcgggcggcctttggacactcacgggagattccgcggtcagcacacttgtggctaataacagccggattgcgttccccgcggctggctccggggccttccaaggcacgacgctcacggtggcgggtgactatctcgcgtctaacacctcgctctcgatgactaccgttctcggaggggatgactcaccgacggaccgtctcgtggtgaatggcaacaccgcgggtgacacctcgatcacggtcacgaacgccggcggcgctggcggtctgacagttgaagggatcgagcttgtcacggtgaaggggaagtctgacggcgtctttacgctcgcgaaccgggtcgctgccggggcgtatgactattcgctggtgacgaaaaacgggaactggtacctcgtgagcgccgcggacggaaccgtccctcagaccgatccgaccccggcggagcctgagaagaccccgggaacgccgtcagtggagaaggtcattatcccgactccggctccagcgaacgcgtccggtgacgagtccggggatgagaagacactggatccagacacgacaccctcgccggatcccgctccagggaatgatccggcaccgactgaggtaacgccatcccccgcccctgagatcacgcgtcatgccgtccgccctgaaatggccagttacgccgcgaacctctacgccgcgaacacgcttttccttcaccggctgactgaccgaattggggtgaggggagcgggagaccgcggtgtctcagcttcagggcccggattctggctccggaccgcggggagccacacacggtttggaatggcggacggcgagctcacgacacgatcgaattcgggcgtcgtccaattcgggggtgatatcgctgcaaaaccggtgagtgagaattcaattttccgggtgggtctgatagcgggagcggcaagagaacgttcccgcaccgggtcaaatgccacccggtaccgcgcgaaaggcaccgtgaccggagcggcggccgggctttacgcttcactcctcccccggaatgccggcggactcggtccctgcgcggacgcgtggcttcagtatcagcgcttttcggcatcggtctccggttctgatttgcctaaagagacctatcacgcgcggggactcacgggatctgtcgaaatcggatacggctggagtctgggagcgtggacttctgacaccggggtcacccatcagaccattggaaaactcgaactccaggcgatccggatgggagtgagggcaggaactcaccgggattccgtgggaaccgggattgaaagcacgggatccgggaacctccggatccgggtgaccgcggtcctctcgcatcggatgaatcaggaagactccgggctcagcctcacgccatacgcgtcgctctcctggatccatgacacgaagacgttcggtgccgggatggatggggtccgggatgtgatctctgggaatcggaacctcgcggaactccgcggaggaatagagggtgaggtttcgaaatccgtgaccctctgggggcacgcggcgtaccgggcggggcggtcggatttccgatcgatcggcgcgcagctggggcttcgggtgaagttctgaccgggagtcacctctcaaagcgacccgggggacaggatccggcattctgtctcccgctgcatagcggatgtcacccgaaaagtgtcaattccaccggttttgtcacccgcttcccctctcaggcgacaaaacggcgggctgagtcagatattcaacaagcctgaaaaaccgacactggatttttgaaaaccccgggtttcagtcacgggaaaagcaccgccggggacagaaacccgcgaaacgtctctttcagagcgacaaagtcacccgaaaacagtcagaaaatgtgaaaactgtccccggggtcgcctgaaaggtggcttacggtcgtcccgcttggggtcgggcagccgccgcgccgcccgccgcgcggcgaatgatttccgagtaataggcttcagatgtctggtaccaatccacgacacagccgatagaccggcattcctcgcgccgcttccagttctcgttctggaacttcttaaagaccgcggagtttcccgtcgctcgcttcgccttttcgtaagtcaccgcgagatggtcatccatctttgaaagatccggactcgcacagatcagtttttcagagtaggagcgggccttcgtgcagtcccagctcacggcgttagcggaggcggcagcgaaaagcccaagagcgagcgccgcgatgatggttttggtcatgatttagcagaaggggatttttatgtttctgaaaaggcttttaaatcaaatagaaaagcgaactttcttcaatcaaaagttaagaaagggaacgaccgcgttctgaccccgatgaagccggatctgggcgcggctgcgctctcctatccaacgggcgtccggggtctctctgcctcgggcatcccgattccagtcaggaatgaatattacaacttagctccgggggcaggggcttgcgcccgcggagaaaagccaggagctttgtgagtaagcgcggtatgcatcgcgaatagcgggatattgaccagccaatcttggtcaatgtagtcgtccatggaaattcttatgcatttattgggatgatatttatcgtagtaagcgcgcaaacttttggatttaagattcacttcggccttaacctcgatcggtgtcacctcgttttcgatctgaatcatgaaatccatttcgtagcgatcgttttcggaagtgaaataatagggcttatatgagctgtcggagatcagctgctggcacacatactgctcagtcagtccccctttaaactcagtaaacagcctgttgccttccagaatggagcgcgcgtcaagcgagctgattgctgtgagaaggccaatatccaaaaagaatagcttataaacgttctcctctatatacgcagacatcggaacagcgggcttggtaatgcgaggtacccgagtaatgagcccgcaatcaagcagccactggcaagcctgttcaaagtcctttgcacggctgttctttttaacttgtccaaagaagaattttttgttttcttttgctagctgaccgggaatggcatgccatattagacgggcgagggcgaagtcttttgttggaatgtgcttaccaaagtcagcctcgtaaagcgacaacaagtcattctgagacgaacgaaccatcccgtagtcttttgtctcagtgaaaatctcaacgcattccggcataccgcccacaaaataataattctttagcgcaaattcaaaacgatcgtggaaagcgctaatcgttggccaatcaccttgttcgagcagatttgctagtccctcatctccagtggcgttcagaaactcgtagaaagaaagaggatgaagctgcagcgtattgaccttccccaccgggtatgagatgcccttatgcagcgcaatgcctaaaagagatcctgcagtaataactgagtattgcggggcattctcgcagaagtatttcagcgaggaaattgccataggagattcttgaacctcgtctaggatgatcagagtttcaggagtgatttcaacatgggtctctgcgttgatcgagagcagaatgcgatcaatgtcaaagtcctgttcaaagaccttctgcattctgggattgttgtccagattcacgtaggcagtgtgcttgtagaagcggcggccgaattccttcataagccaggttttaccaacctgtcgggctccctggagaattaaaggcttacggcgaggtgaattcttccacttgactaaatcctgcattaattctctatccatggctactccaaaaaaccgttgtttattcctatattatatcctatattacattttttgtagcgaatattgaggagttttatacattttttgaagcgaatcccggtgcggtttccacattttttgaagcgaatgttagtgtccaattcacattttttgaagggaatatggctttccgattccctttgtccgttcaccgttctctgtttaaatgtgactcatgaatggatgagcggcggagcctttccttcattgatccctggtccgggaactgacagcaaaggtctcatcagatcaggcttctttttcccggctgttacagttttctcccaaaatgggggtgattttgggagaaagcggcgatcggttgggagaaaggatgcggaaaaagaagctccgatcgcggttaccgcgtctcagtctcggtctccgtcacctgtttccagctgagcccaaaccccgcgaggtatttcctcaggcggtctgagtcattcgtgctctttcgtttcttgaaggattccgcgaaaagcgtccggcccgcttctgacatcgttttcgagcgccggcagacccggatcacgagcgcgagctgcgggatatcgaagagatcaaggcgcgagacggcttcgtcccccagcacttcctccacgagatcccggtccgcgtttccgtcccccgcgtcctctttccaggagtcgcggagacgccggaattcgctttcaaccagatccgtcgtgatgcggccgctgtcagagagcaccgccatccgggtcgcgacgccggagagatcgcggaagttgctggtccaggcggactcgggttcggaggcgtaccggaggaactcttccttcgcttctttattcatgcggacaagtttcccgagtttccgggaggcgttctcaagctccaccatgaggttcggctcaatatcttccgggcggtccttaagccccatgaggcggaaggtccagaggttgatacgggcgagcagatcctgcctgaatttcccctcgcggatcatttttttgagatcccggttcgtgccgcagatcaattgaaagtcgctcgtcgactccgtatccgaccccatggggtagaagcgtttttcttcaatcgcccgaagcagcatcgcctgttcgtccgccccaagctctcccacttcgtctaagaagaggagaccgccatcagccgccgcgagaagcccggcccggttttccgaggccccggtgtacgcgcctttcttatggccaaagagcgccgacatcgcggcgtcgccccgaagtgtcgcgcagttcaattccacaaacgcccccgacacctggccgttcttctttttccactcgtaaatcagccgcgcgagccgcgttttgccgacgccagacggcccggtgagaaggatcggatccttggaccgctcacagacccgggtgatctcctcaatcatccggttataggcggcattccgggtgtcgatcccggccttcagaaagtggtgcgcctctttccgctctaaggtgaaccgctccgccaattgatcgtacttcgagagatcgagatcaatgatgtcgtacttccccgcgatatcccgccgctcggggcagctcgtctgcagaagccgcgccgggatgatccgggactccacgaggagaaagaggcagatctggatcacatgggtgccggtcgtgatgtggacgaggtaatcctcgttctccggatcaaaggggtagtgcttcgcgaagtcgaggagctccgcgtacaccgcgccgaagtcccagggcttcgggaatttcgcgaggtggatatttacttcggtgtccggcgacacctgtttgaagtcggatgccagctgctccccaagccactgatacttttcctgacagaggagctcaaagcggtcgacgaggagatcatcatgctgcccgatcgacaccgtgggccgccacctctgccaccggtccttcccgccccgggcgtcgagcgtcggccccgcgagcccaatcacaaccgttttcttagccatcgtaccgatccaatttgatcaagtctgatattaagggatcaaaaattccctatcggaattctactgaaaaatggggtatcgccgccagagccctgatttcacagggttcgtaaaaactggcacgctttgtgcgatagagagggcaggaaagataaaaacagccaatcaaaaatcgataaccatcatgacgacagtgaagacgattgagatcaacggggcggaaggcggaggccagatcctccgcgcggcgctatcgatgtccgcggccctcgggatcccgttccacatccggaatatacgggggaagcgggagaaggcggggctcgggcgtcagcatctctcatccgtccgtgccgctgccgcgatctgcggagcggaggtgacgggggccaaaatgaattcgactgaactcacgtttgttccgggtgaagtgcaggtggggagctaccgctttgatattgggaccggcggcagcaccgcgctcgtcctccaggcgatcgtcccggcgctgatttgctctcttaaggcgggcgaaaaagcctctgtcacggtcacgggcggcacttactgccccttcgcaccggcgtttgaattcctgaaggaaacgctcgaaccctgtctcaatcggatggggt

SEQ ID NO: 1357 - DNA, 9667 bp, Unknown
  gut microbiota DNA sequence
cggcagggccgttcagcccgactccctttgattttcgggagcggggaaggggaaagagcgtgagcgccgtgatcctcaactgccacctgccgcccgaagtggcggagcgggaaaggaaggtgctgctccacgatttcggcgctcggctgggactcacggaagacgcggtcacggtggacgcgaaccacgcggtcccggaagcggggaacgcggtgctgatccggacggagtttgagagtggcacctcggtgttttccgagatcggacgcccgaggctctcggcggagtcagtgtcgaagatcgcggcagatgaagcttcggtgtttctcgagtctgacgtcccggtgtgccggcatctgcaggatcagctgttggttccgatggcactcgcgggcggcggtcactttgtgacgaccgcgccgtccgcccacacgcggacctgcgctcaggtgatccaggcgttcaccggaaagccggtccacatggatcagcagaaacacgggtggctcattacggtgccgtctgtatgaaaaaagatttttagaaattaggaagaaaagaaaatgattgaccttaagacgctctacgaactcgggatcccccgtctccctgaattgacgggacccgcgatgaaggccgcgaataaagcggtctcaaacggcgcgaaacccgcagccgtgaaggcgctggtctcgacgcttgcccattccgattcccccaccgaggaacccatgggggagctgaaacagctctttatgcccctcgcgaagctgctcgcgaaagcccgagcggagcacacgttttatacggagcgtgaaacccccgcgccctggaaatcctgggcgaagggcgacgtggaggatgcggcgttccagcagatggcaaacgcgtgccgcctccccatcgcggtcggaagcgctctgatgcctgacgcccacacggggtacgggcttcccatcggaggcgtcctcgccgtgcgtaacgccgtgatcccttacgctgtcggggtcgatatcgcgtgccgcatgcgaatcacgattctcgatctgccctacgaaaagcttgagaccgagtctgaccggttcgctgaggcccttgaagccgaaacccgcttcggggtcggggcggagttttcgaaatgcgagcgccgtgaccaccccgtgatgcaccgcgactggtcgatcacgcctcccacgaagcagcagtacgggcgggcgctggcgcagctcggaacctcaggcgctggaaaccactttgtggaattcgggaaactgaccgtcgatcacgacatcgatgaacccacgctgaaactcaaagcgggtgtgtacattgcgctcctctcgcactcggggtcccgcggcgcgggaagcgcggtcgcggattactactcggaggtcgcccgttcccttcaccctgagctcccggacgaacttcgccacctcgcgtggctcgatctcgatacgaaggaagggaaggagtactggaatgcgatgcagctgatgggggactacgcgtccgcgaaccacgagctgattcatgagcatgtgcttaagcacctcggggtcgggtcgctcggctttgtcgagaaccatcacaacttcgcctggaaagaaacctataacggggaagagctgattgttcaccgcaagggggcgacacccgcaggcgacggcgttctcgggatcatcccgggctccatggggaccccaggctacatcgtccgcgggaaagggaatgaggcatcgttccgctcctgctctcacggcgcggggcgcgcgatgtcacgaaaagcggcttttaaaaccctgaagcacgaggacatggaagcgatccttaagtcccgcgggatccgcctgctctcggggtcgatagacgagtcccccgaagtctataaggacattgggaacgtgatcgcgtctcaaacggatctgatcgacacgctcgcggagttcgaccccaagatcgtgaagatggcgcctgaagagggttcccgcccccgctgggtgaagaagaaggaagcgaaggaagccgcgaaagcggcgaaggaagcctctgaggcagccggaaaggcggagcagaaaacggatgtaacggctgagaaggcgcctgaagagcagtccgacgtcgtgtatgaagtggtgggtatccactttcatgtcgtgaaggactgcaatgatgaatgcataggataagaaaaaatgactgaagattttaagaagcatgaccagtttttcgtgaaccctgagagaccggaacccggtctcacggcgacgagcgcctcgtttctcgcggcgctcgcgtcccaggaagtgaaccggcttgaggaaatcgtgaaaagcagcaccttttacgatgtctatatggagctcctctcaggcgtcgcggaaccccgtctcgtccaaaagggaaaggaccaggagttcctcgagtcgctcctccccaccgcggcccggatcggggaactgcggggctttatcgcgtacgttcacgaagccgtgaaggagcgggatgagaggacggagtatctcgaacacttgtcgtttgaagactggctgaagctcccggagaacaagccccggaaggacgagatcgacgcgaagccaaaggtggagcggccttcagcgcctgaaaaaccggatcccgtggatacggagtgggcgaagactcggctctcgatccgcgacctcgcgcactatctgctcctcgaagcgaaggcgagcacactcggtatctatatccatccggacggcgttctcgcgaacgcgaaggatgacctcgcgaagaaatccgtgaggcccgtggggacggagggccgcggccaggacaccgcgatccggacctatagcccgagtgtggaacctgacgcggtgtacgactcgtataaccgctggcagcagagccaccggacgtgggaagcggaactgaaccaactgaaggcgaagatcgagatcatggcgaagaacgagaatctcgaccggaaccggaagtatcgggaggagcagcttgagtaccagaagcagctttccgcctatcaggtcgagtgggatcggaagaacagccgcacgaaggagatcgagactgagtattccgactggattctgaatcagacagaagccgtgcggaatctgaagatcgtgatcccgcacgagctccagcccacctacgattacttagcggctctcggtaaggcgtaaaggttttcagtgtttggaggcgcgcctgcggtttcacgcattgaggaaacccccgcgccctatacggcaggtacaggactcactcttgatggctgcgcaccagccaggacggaacgcagagggcctacaccagtaggatcgtcccctattccgaggagcgctaagtgaacacagtctcagaattcacggtaaggcgctcattcctaagactccgccacagcacaagtctcaggcttcatcccgaggccggccgtgactccatcttttttggttggacagttttggctcccgattggagggggctgatcccgaattcccctctggggagaaactatcggaatggaaccggacgtgttccggtttccggtaaagcatcaccttttttcaggtttggaggcgcgcctgcggtttcacgcattgaggaaacccccgcgccttacgcggcaggtacaggactcattcttgatggctgcgcaccagccgaatcggaaagcagtgggccaacacctgttggatcgccccgcgttccggacgggcgccaagtgaaccacagtctcagtattcgctaacgcgctcattcctaaggctccgccacagcacaagtctcaggcttcatcccgaggccggccgtgactccatctttttttgttgtaagggtctggctcccaatctcaaaggaggctggcaccgaattccccattagggaagaaaatattgaaacggggccggacgtattccggcttccggtacagtttcaccgtttttgcagtttggaggcgcgtctgcggtttcccgtattgaggaaactcccgcgccttacgcggcaggtacaggacttacttgtgtactggctgcaaaccagtgctccaagaatccagggagctccccgccagggagttcccggattctcttaggcgctccatagactcacagcctcagtcttcaggtgcgcttctgcacaggctcagctccagtttcagtcgcagtctttatcccaaggcctgccgcgactcctctttgttttcaggcgcgaggtgaacgcctgactcctcaagaatcgcttccgcgaccgcgtcaggggttccgccctgtttcttccattccgcgtacaagctgaacacgatatccgcgagatcctcctccgaactgaggtcgtaataatgaggcgggattttggcgagccggcagagttcatgcatcgtatccgggttcacttccacccagccgtcctcgcgtcgcttcaattccagcgcgctgaagctgatgccggatttcattgcggcatcgataaactgtgctttcagatgttcagtgaggacatccattacccagtcgcctaatttcttcccctgccgctcggccaccttgataaagatgaccttctttctttttgtcgtatcaacgaagatttttgtcatgtattgcgggtctgtcatagttcatccataagaagcggcgggaagggcagggctaacaattccccctgtttgccgttaaagaagaccaaacggctgtccctgatgtcgaagtaacatcatacatagctatagcaacaaatcaaaacccgcatttcacgaggaagtcaggcggtttccggatcactgctgaaggtcattgaactgaggactatcttctcgctgcttgggattgctacactaacgaacgttacgaaactcctctctgcgatcagccgctatgaataagaaacacctcgttcagtttctgctgctagacgaaaattttgatggcgcggttcgcgcgacgctcgataactggaatgggctcgcgtatcggattcctcggctacggctgaatgattacgcgggcagaaatgaactctccttcagcggcgtctatcttctgttcgggaaagaagaagcgaccgatgaggacgcggtctatatcgggcaggcgcaggagcgccaggtcggcggctccatcctgaatcgcctcagcgaacataaccggagcccgagcaaggcgttctataacgaggtcgtgttctttacgagcgcaaccaacagctttgggccgacggagctttgttaccttgagaatcagttctacgaaatggcgaagagctccggtcgctacgtgatcaagaatcaggaaatgccgtcgcccggaaacgtcaccgagtcccgtcaggtggagcttgaccgctatatcgaaaacgccttgattctgatccgcggtttcggctaccgggtgtttgagccaaaggtctccaaagagagccgaaaagaaaaggcggaagaccggcgtttcttcctcacccgcatgattcataagaagtaccgggtgcagggggaagcgatctggaccgcggacggctttgtgattctgaagggagcggtggtctgtatggaaaaccgccctgggattcttccttcgatggttaaccgacgggagcagctcgttgagcggggtgtgctcgtgaaggaaccgagcggactttaccgtctgaaagaggatcagattttctcatccccctccagcgcgggatcttttgttctgggctcttctgtccgcggcacaacggagtggaagacagcggacggcagaacctttgctgaagtgagcggcgaagtctgagtgattctgattcggaatcgattcgcgccggaatcggaatcaatagcttcaacagataactctttgaaattggatccgacaagtggagttgaaaagagaacctctgctttcggatcctttcctcactggttaaatgccggatctacttcgcggatcaaagcttccgcaccgtgagcaggctctccgccgcgccgcttccattcagcgtaaaacccaaacacgacggatgccagggcgtcttccggcatgatttcgaagaattcagacggcagcccagcgtgttcacagattctccgagtcgggagcgtgttgacctccagagaatcctctggtccccggctcacctggaggtccgagaagttcatgcccgcgtcaatcgccgcgctgacaaagagggactttgtgtaggcgtcaacgactccctcaacccaatcttccaccgagataccgagctgctcagccgctttttcataggcggctttcttcagagcggctgtccaaaaagattttaaaggaggggaccggtttcccctcccgcagccaggatcccgccgtggataatcaaaagcgggattccgggattcaatgagatctcttatcggatcgtgagcttatccgtcgtctttggggcaacctgcaagtggtgcttatagacaacgacccggccgtttgcgcaggctcgctttcccttcgcggcatagagattgccaaactgcttttcaaactgcggcagctccggtgcccaaatcacgatcgcgatatgctcagacgggtaggcgccacccaagttaagaatggtgcgcttaggctgcttcacgacctgcgcgacggatccgcagatagtggctacgttatcgacgaaattatgcgcgtcgaaggattcaaccggagatgcgttcgcggtaaagcagagtgccgtggacaataagggaagagcaaatttcagaagtcgcatgattgaaaagctttctaagaaaggacagccaatcccagagttattccgttctgtcgaaatgggccgccccgtaggctgatttgtaggagaaaccaatatatctgaaggcccgacggcttgtctattgttttgcggggaaactgacagtgtggaattgattgagcggcagctctctgaccggatcgcggagcatccttcagccgccccgtgttacgtcctgaagtgaggggtgatttcaggcatttccggtctacggaaagacaaacaaaaacatattggacgtccggctttttcccaaagtgattgggaagctttgattttccctatttgagatacataaatccctgtcacacttttcgtatctatgaccgcttttttgtcactttggtatacatgagtgaggaaaattattacgatcctccaatagtcggatattcgttttatctagcactaatgcggaaatgacacaaatttaagcgtgctatagtctccccattcgcttcagactgagttctgaatccgttcttttaattgaatattttgcaattaccgaatcagcctgcttcatcgtttggtgaatgtgtaggtggggagagaccaaatgagagtaccgggtaagagagggccgcgaagcggtccggatggcgcaacaagagaggcgctgcttgaagcggcgtttaaggaattcacgtatcacggtttcgaccgcgcgactacgcgccagatcgccaaggccgcgaatgtcgaccccgccatggtgaattaccggttcgggtcaaaggaggacctgtggctcgcagtgctcgaagatatcaaaacccaaagcattccgtatatccgtgaagcccgggaattgattcaggatccggatcctgagcggagcatcaaggctctgatgcaggtcattcttcgggtcggcgtggaaaagccgatgatttcgatgatgatttttaacgagtccacgaccccgagagcggatatcatccgccgcacgattgtgctcccgttcgtggaatccgcggtgccggtggtgcagcgcgcgatgcgctccgggtgcttcccggaaggagatccgtcgctcgcgctcttcatgctgattgccggggtctctcaggcggttacaaattacggcggtgatgatcacgagctgagagcgaaagccgcgcacctgctcgacaacctgacaaaccggcgtccgaaatagcgtttccgattcttcagcgatccaacctctgatctccagtcctcggttccgggggctggagatttcttttatttcccgtgtttcccggcatctttctcctatcggactatattgaaaaaccgtgaaaggaagtcctggccgtgttcccgaacttcggaggagggcggacgggatgaccgcagaaagaggtttatcgaatgaattctgatcgcaatacgctcttcacttttttcacgccgcagtatgtgacgcagcaccgtaaaaacgaggcggcgctcaaccacacgccttacgcgaagtatttcacggacgacctggaggtcccgtgcgatatggtccaggcactgaaactcgcgcctctcccggagtcgtcgcttttcccaccgacaaaggcgggtttgaacgcccttttccaatccccgtacgatctcccggtcgccggtttcggtctcattggaaacaaagacaccgggcggatcatctgcagctggagccggcacttcttcccgggggcaacgtctgagatgcttcgctggtggttcacgtggcacatggggcacacggatcggtattcactctggtctccctacgctcatatcgggaacaccgtcccgcatcttgaccggatcgatgatccgaatcggtcgtatgaagaaaaaatgtatgaccccgagaacccgaaccgggtgacggaactggtgggcgacatggtgcttgacgctctgattcacttcacggatccgaagaaactcggtctcacggaagaaacgattaagaagggcggctacacattcagcgcgagcgggtggtccgaaaatctcgcggcgccggggcttccggccggcatgatgttccacctggggcgcgaggtgtcgggcggccttgaactcatttcccactattggcttgggacgcaccgcggaatggcggaactcaccgggatgaaggatgaggtggagagggcgctcagtctcgcgaaaccggtgccggacgagatgctgctccgcggggggtacgacatgtcggtgcacgacatgattgagttcacgcggctctcgcagattctcccgaacctctacgcggagttccggaacgcgtaaaacgcatatctgctttgcttagcaacaaaacagccgccaaggagtcactctttggcggcattgcttttctagacggtgaaagatccttaaagggcttttggtcaacgaagagaagaaggttgatttccacacttgagaaaatccatttttgaatcagccgccctagtcggtcctctgtaaactgcccattgaaacacccccacggaatgtggggaaaggcagagccagtatgcctgcatcgtcactatgggagaaacacccccacggcgtgtggggaaagggatggacgcttatccgccgtagtccgtccgttgtaaagatcccattgaaacacctctgcggtggcagagaaaaaggaacgcgcaggttattctcgaagggaaatcaacctggagaaattctatctgaagaatcggaaaattgctaactaaaaaagttactataactttttaaaaatagttttgttatgccggaaaatcaatgcatagccgctcttcagaatgattgtttaaggaccagagttcaagcgcgtgatggggcagtgattccggtcttcagggcacagcctttccttttttgtggatacacggatcgccttttcttaccgtcataattcgcg

SEQ ID NO: 1358 - DNA, 1219 bp, Unknown
  gut microbiota DNA sequence
agaaagaaaaaagcaagagcgtaacggcggccggatttcaggtttctgaaaaaatctcttagaattcaccccttaaatgattgatttaagcgcgcagtgacgcgcgtctcctcaccatccccgtgaggaacagaagagagattcaaatggatatcaagaaagacaacgcgatgtatatgcagattgcgcagatcgcggccggccgcagctacgcgaagcgcctccaggtgggctgcgtcatcgtgaagaacaactccattatttcgtttggctggaacggcatgcccaccggctacgacaactgctgcgaagaggagatcgacggaaagctcgtgacccggaaagaggtccagcacgccgaactcaacgccatcgcgaagcttgcctataacggctactcgtctcacggggcgagcatctatatcacgcattccccctgcatccactgctcgcttctcattcagaagtgcgggattatcgcggtctattaccacgagctctatcgggatgacgccggcattcagttcctgaagaaggccggaatccacgtggagcagctctgagcgtgatgagcgctatggacttgaaaccccgccgggtgctcgtcacctatgagtcggtcacgggaaacacgaagcgggtcgccgaagcgatcgcggcggtgatcccgggggccgtcatgaccccgattgcggacgctccggatcctgcggggtacgaccgggtgtttgtgggtttttggtgcgataaggggcacgcgagtgagtctgcggacgcgtatctgaaatctcaccccggttaccccttcattcttttcgggacgctgggcggtgtgcctggagtggggtactcggtgacgtatgagaatcgggtgagggaagagctcgcggccgcgaatgttcccttccgggctttccgtctctggcaggggaagatcgacccggcgctcgtcgaaaagtcaaaagcgcgtttcccgatgacgccagagaggctctcccggatcgccgccgctgccactcacccggacgcggcagacctcaaagacgcgcaagtgtgggctctcgaacagttaaccggaagttaaccgaaatgaaactgaccccggttcgggtactttttaaaaacacataaatcaccgatagttagccttagatcagttaactctcagtacattccagtaaaccgatagctcaattcctattgatcggctatatggtat

SEQ ID NO: 1359 - DNA, 1489 bp, Unknown
  gut microbiota DNA sequence
ttaacatctttttaataagttgaacgccggactaaaagatgtttttttaatacacaaaaaaacctctccgaagagaggttttctgtacttgcggatgatgacgctgttaagcgaggacagaggtcctttcggtcagcccctgaacctgagccgcctgcttattcggcatgatcgaatcgcgggcgttctgaatgtggaggagcattgcggcgctcgcctgcgtggcattacctgaaaggattgcattgagaacccagccatgttcttcggtcagaatctcaacatgacgcttcttatgcgcttcaaagatctttgtaatcaggaacatgctctgtttcatttcagagagaagcctttccagactctcatagtagaaatgattgtgagcagccgcggcgattgctagatgaaacgcgcagtcgcggtccatatcgctttcctcttccttggaggcctcaccggtggtgttcttatagtagtcgtccaccacgtggtaataggctttctggatccgctcgcggtcttccgctgtcgcgcgttcagccgcgagtcttgcgatctcgctttccaaatgcgcacggtattcgtaaaactggttgatatcgctccagttatcgacctgatcaatcttcacggcgccctgactcgtgcggatcacataggatccggagccctggcgggactgaatgatgccttcggtacgcagctgggcaagggcaatacgcacaaccggacgcgacacgccgaattccttagctaacctctcttcggggggaagcttcgcaccgatcgcatacaggttatctacgcagatctgctggagcagctgctgatatacgtagttgccaagtgagggggcaggtttagtcatggcatttcctttcttgtcttacagacaagcgggaattattttttaaacttgtaatattaatttgtaaagtattaaaactgctctgatgaccgggaacgacacttatcgtctcatcgcagggcaaagaattttaccccgaaaagtcggtggctgtcatcaggtaaggagctatgaaacttagaaaaaaactgacaaatatttattttttccgatttttcaaaaccaattttgattttcttcaggcggaagctccctgatcttcactgaagtgttggcagtatgaaaaactttcagtatttcaaaattttatgtgtatgacgtgaaaacttagctgaaaatctcactacttccttacaacttcattatttcatgtctgcaaaaatgttgtacggcttaagttgtaaatttcggtaatgcattaatcctgtttttactggaatccggaactaatttctgtgtgcgtttaatttacaatatattgaaaacaaataacatatttaattcgtgtaattttcgttcttagttatattagggaaagtacctaataaataaccctccaccgattattacatcatctgcgaaatgagagggaacaacaaaaaagggaaccctcgaatg

SEQ ID NO: 1360 - DNA, 264 bp, Unknown
  gut microbiota DNA sequence
aatgctgcttacctttatgaatcctggtcagtcaataagctgctgccttattccaggggtatttccagtaaggaaatgagtgagttcttcgccagtctgacagaggtttcgggctggagaaaggacttcttcaacgcccgtatttcaagactgccagacaaagaaatgctgtcgtttgacgcaacggaaatcgctgccgaagccgctgagatttcctatgctcaatacggcatgggaaaagaaggagggtaccagcgccagctc

SEQ ID NO: 1361 - DNA, 45048 bp, Unknown
  gut microbiota DNA sequence
aaatcaatccctttctatcgccccttaggatttttatttaacaagtcctaaatttggggagcagttcaatctgctcttttttttcaaacacacatatagttttcgctctataaggagcataattattgtagtaaccgggctttccgggtagaggagaaacatatatggatttcgatctggttctgcgttcacgtcactccgtccgcgtcttttccgagaagcctgtgacccgcgacattctgcggaagattgttgaggacgctggccgcgcgccgtcctgggtgaatgctcaggagtggcatgtgtacatggcgaccgagaagacgctgaagaacatccgcgctgaatacatggcgctcgccgaaaagggcgaccaggggatggcagactacggcaggccgcaccgcgaagagtggtcgaagctcgctcaggagcatatggccgggttccacaatctgatcgccgctgaaggcgtcggccagacgatggcgggtgtcgaagacatgctcttcaacgcgccggctgtggctttcatcacgatgccgaagggcgcttcccgctgggcggtgctcgacctcggcggtttcacccagacgatgcagctttccgccttcaataagggcctcggctccatcgccgcgtataacctcgtgaagcaccctgaagtgcttcgccgttatctcgacgttccggagacggacgacattgtggtcggtgtcgctcttggctacgagtctgacgataaattgaatcagctccacacggtgcgtgaactcgttgaccgcgtcgtgacgttcaaggactgattgaggcggccgccggagagtgacttctccggcatcgggttcagggcgaacacatggatctccttcagaattgagggagatcttttttatgcctgctgtttttttaagaaacagaagaaagcgggacgatggctggttccgcgaaacgcggacaaaaaaaggggctgacgaaaccacctgttagacgtcagccctcagactcaattcatttcagagagtaaatgccacgaagttccaacatttttttccttgcggaatcaaacatctgaaccctgacagggaaaatattacccgcggcgggttattttccatatggagaatttctctttctctgttgcggtttcgttcaacagcctcttcgctataatctcaacattgaatttccttatgaatcacaggcatggctaaaaattccgctgaaaaagcgttggaaagcatcccctcgatgcggcttctggtagcggtttgccgtaagaagtcactcacggaagcggcgaagggactcgggatgtcgctctccgccgcgagccatcagctttcggtgctgaaggacgccgcgggagaccccctcttcctcaggaccgataaagggctcgcgccgacctccgcgatgaaagagctcctcccgaagcttgaatcgatcatcgacgccgtggattcgctccggaaacccgcggtgtttgaccccgcgaccgcgaaacgcgatatccggatcctcacgtacgacatggggtacctcgcgttcgtgcttcccgtggttccgaggcttcagactgagtccccgggacttcggatcaatgtggattttctcgagagccgtgagttcgcgctgaatgagctgaggctcgggaaagcggatctctgcatcaacccggggctcctcaatcagagtgacgtggtgtcgcagccgctcgggaaggtggaataccggctcatggtgcggcaggggcatccgcttgaagcgatctatcaggcggagggccgcgtgacgcttgaagaaatcgcgcgcttcccgcagttcattccgtcgacgcggcagggcggctacaaccgcccgtggctcgacgtcatggcgatgggagcccccgtgatcgcctgcaactacttcaatgttcccccctttgtcgtgaagcggacagacgccgtagagtggattccgtcgccgcttgccgcggagtgggaaggcaccgggctcttcaccgtgattccgctcgccggggaaaaccgctcggtctttacttcccgcctcttctgggccgcgcgtgatgagcgcgatccactgaatcaatggcttcggtcgcttctcctcagctacgcgcacgaccactatccgacggaataaaaatgaaacggttttgctacaccgaaacaagccgctttttgaggagcggcgggcattttggcactacaatcgattgattcggttttttccgattgaataggcaatacagatgacttcagcactacccaggaccattctcgtaacgggcgccgctggctttatcggcagcgcgctttcgaagcgccttctctctgaaggctgccgcgtgatcggtatcgatgacttcaactcctactacccggtggagctgaaggaagcgcgcgtcgcggatatcggtccgaacccggcttttacgctcgtgcgcggggatatcagcgataaggcgctcctggagaaagtcttctcggactatgagcctgaggcggtcgtgaatctcgcggcgcaggccggtgtccgctattcaatcgagaacccggacgcgtatacgcgctcaaacctcgtcgggttcgcgaatctcctcgaatgctgccggcaccacaaggtcgggcacttcgttttcgcgagctcctcctccgtctacggaaagaataaaaaggtgccgttttctgaagacgaccgcgtcgactttccggtgagctactacgcggcgacgaagaaagcgaatgaactgatggccgcgagctacgcgaacctctataagcttccgctcaccggtctccgcttcttcaccgtgtacggcccctggggacgccccgatatggctccctggctcttcacggacgcgatcctcgccggacgcccgatcaaggtcttcaataacggcgacatgatgcgtgacttcacctttattgacgacatcgtggaaggcgtggtgcgcgtcattggccgggtgcctcagggtgacttcccgtacgagatcttcaatatcgggaaccattcgccggtccgcctcatggacttcatctacgagatcgagaaggcgtgcgggcgagaggccgaaaagatcatgcttccgatgcaggcgggtgacgtcccggtgacgtacgccgacaccgcgaagcttgaggccgcggtcgggttcaagcccgcgacgccgctctccgtcggcattccgaagtttgtcgagtggttcaagtggtggaaggccgaatccgcgaagagcgcggactccaaaaagcattaagaagggataagaagtcaagatgaaaatcgcagcagtcggaatcggctacgtgggtctctcgaacgcggtgcttctcgcgcagcatcacgatgtggtggcgctcgatatcgtgccgcataaggttgacctgatcaacgctcataagagccccatcgtggaccgcaagatcgaggaattcctcgcgtccaaaccccttcacctccgcgcgacgaccgataaaaaggaagcgtacgagggagcggacttcgtggtggtcgcgacgccgacggattacgacccgaagacgaatttctttaatacgtcgtccgtggagtccgtgatcgatgacatcctcgcgatcaacccggacaccacgatcatcatcaagtcgacgattccggtgggctacaccgcggcactcaaagaacgcctcgggattgagaacgtgatcttcattccggagttcctccgcgaggggcacgcgctctacgataacctccacccctcccgcatcgtgatcggtgaccacggcgacaaggcccatgtcttcgcgaccctcctcgttgaaggggctgaggataaggacgtgccggtgcttttcacgaattccaccgaagccgaggcgatcaagcttttctcgaacacctacctcgcgatgcgtgtcgcgttctttaatgagctcgacacctacgcgatgagcaaggggctcgactcccgcgagattatcgagggcgtcggtctcgacccccgcatcggcacgcactaccggaatccgtctttcggctacggcggctactgcctcccgaaagacacgaagcagctcctcgcgaactataaggacgtcccggaaaccctgatccacgcgatcgtggactcgaaccggatccggaaggacttcctcgcggaagagatcgcgaagaagaatccgaagcgtgtcggcgtataccgcctcatcatgaagtcggggtcgaacaacttccgcgcgtcctcgatccagggcatcatgcgccgcctgaaggaaaagggcatcgcgcttgaggtctatgagccgacgcttgacgcggatacgttcctcgacaccccggtggagcacgatctcgcggcgttcaagtcgcactgcgacctcatcatcacgaaccgaaacagcccggatctcgcggacgtgaaggataaagtctttacgcgcgacctctttggaaacaactgatggcgtctcccgtttctcatccgctgatttcagtcattgtcccggcctataacgtcggggagaagctcgaggaaacgctgcggtcactcgcgggccagggcccgaaggatgactcgcgcttcgagttcctgattgtggacgacggaagccgcgataacacgctcgaagtcgcgaaggcgttcgcggcgaccgatccccggttcaaggttctgcatcagagaaaccgcggctgcggtccggcgcgcaacaccggtctcgatgccgcggcaggcgactgggtcgggttcctggacggtgacgatatcctgatgccgggaacgctcgacaaagtcctgaagcttggagctgaaccggacgtcaactggatcttcgggagctacgccgaattcacggatcatcgggacggggctccggctccgacgacgcccgaggggctagaaacccggatccccgagatgccgcccaccggcacccggatgcgggcgtttgactggatgaaggacgcgattgaccgtcaccactgggttcactactgctggattcagttcgcgagacgatcctgggttgaggcgcatcacttccgctttcccccgagaaacgtcttccatcaggatattttctggaccgcggacctcgcggccgagaatcccatcatggtgttttcgcgcgatatcttcgtcgcgtaccgcgtctggagcgcgtcgacgagcaattcgaagaagccccgcgtcggtaagcgccagggctattcctacatgcatatcatccggtcgatcgtgcggctcgcgaatcgcctgcgtcctgaacacccggatgtcgcggacgccctgatccgccacgcggcgtttgagacccgccacttctacgggattctgcatcaccgcgcggttcccgcggaccggaagctgatggcgaaagtctggtgcccggaatacacgccggcgcttttctggcaggggctgccaaagaccggttccgggatttggttcgccgtgaagttcgggctcacgctcttcaagtaccggcactgctgatagaaccccaaataacgattaaaccccgctttggttcttccaaaacggggttttcgtttgccccgaagtctgaaagggcaatagaaattattaaggttctatcagctgctatcaggctcactcagtgccagatcgtcagcgcctctgagattaagactgctgtcgcgatgagcgcgagcggcaggagcttgatcgcgtagtaacggcggccgtgcgcctcctcgcccttctgcctcagccaattcggattcaccatgcagcggataaatccgtaccacgagatcacggtaagaatcgcgagaacaacaacgaagaacatctgcatttgaagcgcctgcgcctataagaaaagagaaacgaaggtgaatagtatcaaacaatacgactgaggcagggcagtgtgcatgctgcttccgttccgtgccacagcaaagactttggagcagatcgcaaaaattatcagattctgatagaagctatgcgtatctatcaggaactatcaggatctatataaaaactgatagccatttccggttctgagatgcctttaatctttctcccggtataacgtttaccgtaccctgaaaccgaaaccagttcggtatacttttccggttcagagcggatttctgaaggaatcattcatgcagacgaaggacaacctcgaagcgtggcgcgttttcgtttccgttgcccgcacgggaagcattaaggaaacggcgatcgagcagaacctcgatatgtcggcggcgtcccgtctcctctcgtcactcgaaaccgatctcgggttcccgttctttgaccggcattcgcgccccatggcgctcactgagcgcggccagtcactcgtccaccacgcggagcagctcctcgcgtacttcagccaggtgaacgaaatcgctcggtcactctccggaaacgcggtccgctacaagctctgttatccgctgaacgtcggacgctcaaaccttattgagcagctgaatgactataagaagattgatccgctcctcgaattcgatctgatgagcgagtgtgatcatgaggatgtgctttcggggcgagtcgatatcgcgctcctcccctaccggccgccgtccaaaggtctcgtgatgtggtccgtgggaaagggactcaactttccgctcgcgaccccggcatacctgaaacgccacgggacgccggagaagccggaagacctcacaaaccacaatctcattctccgcaccgggcgcaactacccgccctcctacttcctctcccgcgggaatgagaaagcgcctctcatcacgaagcacgtggtgtttacgggtgacgccctctcctgcaaggccgctctgatgtcggacgccgggatcgcaatggacctgtcgtttgatctctgccggcaggaaatcctccggggcgacctcgttcccgtgctgaacggctggcacaggctcccctgggagatgacgttcgtcatgacggcgcgccttcaggataatgagcgactgatgcagttctgccgctggattgtggaacgtgaaacgatcgacaatgtcgcgcggtggaagccgatgttccttaaattcggcggagaaaccgatatccattgagtctttaaggtttcagactctctcactgaaccgcttgcctctccgtttttctaatccttttttacgaggttttggcttcagagattgttaaaatcacaatctcttcacgcagaatcgctgtacctccgccagtcctcgcttcgtacacttttttctaacggcgcgcgatctcgtgagaagtccgcgcgccccagacactgaagtattgagaggagatggatatggcggatctttcgagaagagcgttcctggggaccggtacggcaatggggcttggcgcgatgctggcaccggccgcggaggcgaaaccctacgacccgatgcccgcgaagtgggatgaagaggtggacgtgctgatcgtcggctcggggtttgccgggcttgccgcggcgcttgaagcgaagaagaagggcgcgaacgtcgtcgttctcgaaaagatgcggacgcttggcggcaactccatcattaacggcggcatcatggcggttcccggttctccgatgcagaagaagaatgggatcaaagatacgccggagctcctcgctgaagacatgctgcgggaaggccaggggctcaacgaccccaacaaggtccgcacgctcgtgaaccaggcgcttcccacctggcagtggacgcgggatgagctcggggttgaatggaatatggatcacctcgtgcaggaaggcggccactccgtcccccgctgcgcgattaccggaaacggctccggctccgcgatcgtgacaaagcagatcgcgaagtgcaaagagctcgggataccgctccgcacccgtgtcttcatggaaacgatcatccgggacaccgatggccgcgtgaagggactcaaagtccgtgagggctacaagttccgcgataacacctcgggctgcgtgaaatacatccgcgcgaagaaaggcgtcattctctgctacggcggtttcggcgcggatgtcgcctaccgcatgcatcaggatccgaaactcaccgataagttccagaccacgaatcagccgggcgcgacaagcgaaggctggcgtgaggcgaaccgcatcggctgccagatcattcaggcggattggattcagtgcggtccctggaacagcccggatgaaaaaggcatgggaatcgcgctctacttcgcgcagagcgccgccgcgatgtttggtatctgggtgaactgcgcgaccggcaagcgcttcgtcgatgagctcgcgaaccgcaaggtccgggcggacgccgtgatcaacgcggcgaacaagggccagctctgcatcgcagtcgcgaataaggaagggattgagatgatgcagcagatccaccacaacatcctcgcgaagcagctggagcgcggcgtggtgtacgagttcccgactctcaaagcgatggccgagaaattcaatattccggaagccgcgctgcagaagacggtcgatgaatataacgccggtctcaaagccgggaaggatccgctgaaccgctatatcaacaaagactgcaagccgatggtgaacggtccctggtactgctcgaagctgtctcccaaggtccaccactgcatgggcggcatcctcaccgacatgaagggccgggcgcttgactgcacgaacgataagccgattccggggctctacgccgccggtgagtcaacgggcggcgtgcatggcgcagtgcgcctcggctcctgcgcggtgcttgactgcctcgtgaacggccgcatctgcggtcaggcggtgatggacgaggcctgaaccgactcttttgcccgcggcgcggatctgcaaaaaggaaatgagctcccgaatatggctcttccgcgccgccttttactgaatgatctcccctgccggggatttcttgatccgggtccggttctcacacgaaccggacctctttttttcctcaaaggtccccggaatacgcctttctttcggtctctcagctataccttggggaacctcgggtttcgctttatcgtgatcccgatgatccatccgaaaccgtcaacctgaagcgctcaagcacccccggaaacgcaacactttctggcagtttcacttcgcttttttctttgtaaatggtaatagttcctgttttttacagaactactatcgtcgctagttatcttcatgctaccgacgctatcaacctccaaaaccccttaaaaccggtattccgtgttaaaaataaggctttggtgccgtacagaactgtggggacggttctgtttcaaagaacaggaaacgaaccctgcatcacccgaatcggggagtaggaaactacccataacgagagaatttaccctaccgtaacaaaaaacataaaaaaattgttctatcatagtgttaagaacattacctccataggaggcgagatgctgaagaaaaataaagtagcccggatccacgaactctacgaaaaagagcacgcgtcaatcaaaacgatctgcaagatcctcaatatctccaggaatactgtcagacggtatctccgtgagacagaattcaagggatatgaaacaccgcagctcgcttatctgcgcaataaccgcgcggaagtgagagcgatcttcaattcctgcaataaacgctgcaccgcgatgctcccgattcttgaggaaagaaccgggctgaagttcccgctgcggactctacagcgcttcacgcacccctggcgtcatcgccgcacgagaaccgcggtctcctcggtccgcgacactcagtcagcgtctctctgattcataaaacgggtctcctctgtccctgggacccgtttcgcttatcctcttcagttcacctcgctgaagaagcttttttgctttccaaaatcacgccggtctttccttccggcgaaaaaagatcccgcggattggacagaatccgcgggatcttttttggcttttaaagaaacgcctgatcagtatttcttcggaaggaacgcggtcaccgagcagatcacgccgacgatcgtgacgaggatcgtgaggatcccgagcggcatcaggagatccgacgtctcaatgaggcggatcgaatggatcgtgagcgcgatgaagacaatgccaagcagccggtgaacctgcatccagaggtatttgcctttgaggagcgggatcacagcgagaatcacaagaacacaggccgcgatcgtgagcacgagaccgctcgtctcagcgaacggccgcagcgcaccccagaacgcggagaagccgccttccgccgcgtgacgcgcgatatgcggcacgggttccgtcgcgaacggctcaacgagcggcgagaagatcatgcgggtgccccagtggatgagggagaggaggatcgcggagacgccgagcgccttatgccagaaaccgatctccgggaagctcgctccggtgagcccggcaacgagccgcggctgtgtcatgagaaggatcgcgcccgcgaatgcctcccaggcgaggagtccatccaggtaatagacctcgtgcatcaggctccgcatattcggggccgggggatcgagccagagggttgcgccccacgcgaggacggtgatcaggatcatcaggaaaacgcttttcttcatgtctgcgccttttttgtcagttaagccgttgggccggtttaatcgattctgtgggaatcgggggtttctgcttaccacttatgtgccatatggtattggagaaatttccggaaagcgagactttttgcaattctgttatttctttcaaatggaaaccggtttttttcaatatttaacgctgtcctcagttgacagaaattttcttttcataaccagaaattagccatgcaacgttatttttaacgccggcgtcatcggtctgaccctataggcgacaccaaaaaaagagggccccgggcggcgcgcccctgggcccttcaagtcaagcaaaggataggtcaatcaatcagtgaatcgttaaaaaaccccggcggccctgtcccccaacgccgccggggaaacaccattagacgagcggatcaaagtatccggcaaagagcaccgacgcccggatgcaaagggcgcccgcgagcgcgagaaccgcgcagagcggagccgcgaaccgcgccttttccccaaacacccggatcgcgagcgggaggaggatgccggctgccacagcgccgatccagaacatcgcggcccagtcaccggaaatcaggctcatagcaccggccttagcgcctggggtcgagaaactcgccgcgacctgcaggagcgcgaagagcgcgagaagctccgagacctcgatcacgatgccggccgtccgggccgtgcccggaagcgccttcttatcccggaacccgaggaactcccagaccgcgagcgcgcagccgagacccgaaagcacccagaggatcgggatcagcgccgtgtgccagaaggtgacgccggacgcctgtgtcagcaggaacccggagtacaccgtgaccgcgacaccgaccacggcaagcagcaccgggaccgccttccgttccgtaaagatcggagcccaatcgggcttcactttcccgtagagcaccgcggtggcaacgagcgtcagcaccgcctgcacgcctaagaggcagataccgatcagcatccaggagccgaagttgaggcttccgctgatcaacgcgttaaacgccgcgaacgggagattcgtgaggcgcgcgaggtgcgagagcacaaagacgcagccaaggatcgacgcgatgaaagagacgagcgcgatccgtttatcccgcacgaagtagaaaagcgccatcagcatcccggagagaccgatgaaccagaggaagaacgcgatcgtccatccccagtgtgccgccgcgagctgcggcgtaagcgagagaaaacctgcgtctgtcatttcgccacctcgacaaagaagttaggaagcgtgcctttttcctcaaggagcttcacggtacggctggaagcgatctcgcgcgaaatcgcgctttccggatccaggatgtcgccgaacacgcgggcgttcgtggggcacgcggcgacgcacgccgggtccttcccttccgccacgagtttctggcacccctcccccatgcacttctcagggaggcctgtcagcggattgctccaccgagcgtcatacgggcacgccgtaatgcagtagttgcagcccatgcagcgcttcgggtcgatcttcacctggcccgtttccggatcccggtaattcgcgccgaacggacacgccttgatgcagggcgcgtccgtgcactgctggcactggctcatgatctggaacggacggcggtttccgtccatcacgatcttctggatgttccccggcatcacgcggccgtggatcggctttccggacgccatcacatcgccgtaattcgtctgcgcacaggcattcatgcaggccgtgcacccaatgcagcgcgtcgcgttgaagagatgcgcgagctgcttcttcggtttcatttcagtcatttttcgcgctcctctagtcagaaaggaccttcaccgagacggacccgttattcgcgagcggcccgaagacgggactcgcataaccggtcgcgaaccagttgggattcacaccctcttccatccagtccgcggtctcggggctcatggcgcgtaagagtttcgatcgtgtgccgcctgagaaccccggcatgtggaggcacccctgcttgatgcggtaggagagatgcacgcgggacttctcggtaaaccccgtatcgatcgcgcggatctcgagcagcgcgttttctttcactccgagacgcgaggcgtcatccggattcatcacggcgcggcgttccgaattcgcgtgcgaccctgggccgaacatcccgagacccgagttcccctggaggttcttgccggacaccatgtagaactcgttcggcttcgaggggagcgtgtacgccttcacgggttcccaggcggggagcccggggacacccttccggttcgctttgaggtacggccagaacgcgtaaatctccatcttcccggtcggcgtgtcgaagggcttcttgtagggataggtcccgtaggccttcggtttcacgagcgcccacccgttcgcgtcaagcgactccttcacggccttcgccttctccggatccttcgcttcgagatccgccatcagtttcgggagcccgtagccttctgacaatgtcttattccacttccggaaatcggcattcgtcttgcattctttcgtgtatccaagccgcgcggcgcgttcaggccacgcgcggcggatgacttcgagcagcgggaagaggtcgtcacgggactcattcccgtccggaatcggaagccccggggcgttacgctgaatagcgccccccatctcgcgcgcgaattcaatcccagtcacgccgcccttttcgaggaacatcgtggcggggaggacatagtccgcgtagtcacacgtttcctgcggcatcacgtcctgcaccacgacgagatcgaacttcatcagcatctttctcatgcggtcggtgttcgcctcacgctgaagcagattcgacgcggtcacaaagagcgccttcacggggtaaggcttctcttcttcgagttccttctgcagcgcgaagaacgaccccggagcctcggggaagtaagcgtggtccgcgcgaagggtgttcgtgatttcccacgtagtgccgttaggcgcggtgcaggtcttcgtcttcccgtcaaacttgatcgcggaggaggtgagtccggacccctcttccacacagagaccgccctgctgatcgacgtttccgataaaagcgttcgcggcgcagaggaggtggcagagttcgacatcgttgccgttccggctcgagtaccagttgtcctcaaagacccccttcttcgtcgccatgaggcgggcgagacggacaatgcggtccgcggcaatgccggtgatcttcgctgcggccgcgggttcgtatttcgatgcctcttccgcgtacgccgtgaaaacggtcttcacggggatcacggctccagccttcgtcttcagctcacccttccactcaagttccgggacgtctgaggcgttctcaataaaggactgaacctccttttccttccccgtcgcgggatccgtcaccttctcggttttcacgccgcggaagacgaccgtccctgccttcgtcctcatcgcgtagagcgccttatcggcgtccgagtccgtgccagtcaattcggccttcgtgatcgggtgaccgtcgtccgagctcacgaggtacgcggcgttcgtctgccgcgcgaggaactcggcgtcgtaaagcttctcccggatcatcacctggagcatcgagaaaatgagagcgccatccgtccccggcaccaccgggatccagtccgcggttccgagtgcgggatcaggctgccaggggttcacgaagatcaccttcgcgcctcggtccttcgcttccacgagccggtgcgcgacccccatcgggcagttgatcgagcggccgacgagcatgatcacggacgcgtgatcgtaatccgggtcgatcttattctttccctgatacttctttccgaacgcgagaatccggccggcgttccccgctgtgttgcaggttgcctcgtgcccgatctgattgatcgtcccaagcgtaaaggacgcccacttctgaatgccggagagcgtgtggctcgtgtagacgacggaggattcgccatacttctcgacgatcggcttcaattgcttcgcgatcccgtcgagcgcctcgtcccacgagacttccttaaactttccttcgccccgggcgccgacccgcttcagcggcttcttcagccggtaggggcttgcccagagcatcgcggcctgagacgcgcgcccgcacatgccgcgctgcggatgcgtcggattcgggaacacgcgcaccgtcgcgagactcggcttcacgcccgtcttcttcatgatgatgagaccgcatccgccgccgcaaaccttgcaggcgacggggtttgcttcccacccttctttcttcagggtttcaatctgctccgcgatcactttccatgaaatcgcggacgcgccggcagcggctgccgtacccgcgagcagcgttcgccgggacagaccgaccccggttctcctttcagttctggtttccatctccaatatctcccgaaataggtctttcgaaggagccttcaagtgccggcaagcttttttatatcggggccgtgcctctccggtctcacctcagacctcacgtttagatgatatttttcttttaaaaacagataaatccgatattcgtcccgacaccgtattggaggaatgccgggggtagtatcagggggtttcttataatacgaaaagataaccccctgaaaggtatcgcctttaggggatggattttttgaaaggaacaaagcggaaacgcggttcagcgttccccgattgaaatgaggaaagacgcgagttcagcgctcccccggagcccgagcttccggaggagcgagctccggtgcgcctggacggtcttctccgtaattccgaggcggtccgcgacctgcttattgaggtcgcccgcggcaacgcccttcgccacttctttttcgcggggcgtcagtgtgtcccagagcgtccgggccgcagcgatcccgtcctccgccttccggcgctcgagatccgccttcaccgctttctcaatcgccgcgatcagacggtcggctttcacgggcttcggaaggaagtccgacgccccgtctttcagcgcctgcaccgccatatcgatgtcgccatgcgcggtcgcgaagatcacggggaggcggttactgcgggacgcgagttcccgcatcaattcaatcccgctcattcccggcatctgcacgtcgagcacgacgcaccccggaatatgcgggtcgtcaagcttcagaaacgcctccgcgctcgcgtaggaccgcacggtccacccggcgctttccagaataaattcccaggagtggcgtaccgacgcctcgtcatccacgacgcggatcgccgcctcctctcgcatatcagccatgccttgcttctcctttgattccaacgcgggcgcgtccggcggtttccttttgtgttttttggcttctcgtgcctcttcgggggaggccggagccgggtgggaaactgtcgggggcgagcgtgcccggtgtcttaattcttacgcgttcttcgttttctgttcactccaataggctttcaccttgtcctcggggcaaagcggtacggtaaccgttaccgtaaggcctcgctcagagcggcgctcgaatttgatcgagcctccgagcccctccgcgagttccttcgtgatcccaagcccgagaccgagaccttccttccgggttgatttcccgagttccgagagccgcgaaaacgcttcatccgtgagcctcggcccgttatccgccacctccgcgaccgccctctccccttcccgccgcatcgtgatcgtgatccggggcgggtgccccgggtcgtttttcgacgtcgcggtctccgcgttccggaggagattcatgaagatgatcccgagttccacggggtccccgcagacgatgagggtcgggctccagggtacggtaaccgttataggagaatccgtgtgccgtctgaaggtctcgactgtccggttcacttcggacgtgagatctagcggcacgtgcgcgctctccttccccttcacgaagttccgcacccggtccacgatcgcgtccgcttcttcgcccgccttctcgatttcggaaagcgaatgccggagcgcctcttctttcatcgtcccgcgggaaagccgcatctcaagcccctgcgcgtaattcatgatgaccgcgagcggctgcttcaattcatgcgcgagcatgctggagatcaatccaaccgcccgcactttttcaagtgacccgatcttttcggattgcttcttgagttcgagctccgcccgcagccggtcttcctctgacttcatgagggcgaccgtgcgtttccgcgtcatcccggtaatgacggacgaatagaggatcaggatcacaagaagaatcgcggccccaaacacgtactgccagtattcgcggagcgcccaccggatcccccggggctcgggctcaagattcatgagcgtaaagagatcccgcatcgttttccggtcactcgcgacggtccagtagagaccggagcggccggatggcgggagatcgagaagcgcctttaagacgcgtctcgcgtccgcggacccaagactcggtttcacggagaggaaccagcccgggtaaagcatcgtggagtggcggcagcggaaaccgctgtcccctttccgctccccgatcacccggaagtcgcctggcttcaccttcccttcggattcgagctcctcaaggagacacgtgatcacgaaacccccgtccgccttccctgacttgacggcatccaatacattcgtcatcggcatgccgacttccgtcaccgacccgaagtaatgctcggggtcgagcccctgacggatcatgtcccccgccggcacctgccacccggcgaacgcctgacgtccgacgatcgcgagatccttccccgcaagatcgccctttgtctgaaggtccgtccggtctccccgcacgacgaccgcggcgccgttcgcgtgattcgggtctttggcccggaacgacgtaagggtaagaagcgctgagccgttcgtcctttcgagcatgagggaactcaggccgctcgacgcgatcgagatatcgaaggcgttcgttttcgcggctttgaggaacgatggcggatcgtactcatggatcaggagctgccgcggctccaccgcccgcgcgatcgcgtcgacggtcgccgagaagtagcggaccgagagcgcctctccatagctattcaccacagcaagacgcacaggcggtgccttcgggagcacggggtcagcccccgaggtcccgatcacggcgacacagagaaccgcggcacagagtttccggatcatggtgaatggaaaggaaagagaaacgtcactctcttcgactctacacgagaaaccgtgaaagagaaatcaacggaacgatcctcgctcttccgggtacggtttccgttatcccttttctcatagttcctgatagttgctgatagcaactgataaatcctattagaaactatgagttttcagggcatcaccgggggcgtttctgatctgctctccccccgacccttttcccgcttccagaacacggaaaaacacctcccgctctctcagtgagcaccctctcccgccatcttcgggtacggtatccgttacagcggttttctcatagcttctgatagaagcgcatagggagtatcaggaactattagctgctatgagtttttcccttatttctatcagcaactattaaataaaaatccatccgaactgggtacggcagacgctgcaccatttgaagacgcccggctggctgggttccgtttacgggtcctttctttcggccaataaaaaacccggggcggtgtgcctcgggtttcgattaagacgcggaaccgggttaatggttaaacgtcaccggttcctcgatcacctggagcgacgcggggtcgtccgccttcgcgcgccactcaaggtgcaggatcggggatccgcccgccttcgggaacttcaccgccatataggcgacggtctgagtgccgtcgggctcgcttcccgtgcgccagatgctgtgatcgggtccggcgttccggtcgtgaccgagagtcttgaattcgtcaaacgtgagggtctttccattagcggtggagtccgcgagcagcgcctggatcctcgcgagccgtacttccgagctcttcccgatcttctggttaaaggcttcggactcgggctcgatatagtgattcgtgtgggcaatcgtgccggtctgaatccgcttcacggtgcgcttgccgcctggcatcacctcgatcaccgcggcttcagttttatccgcgaggataaagttcacgggttcgacgtacgcttcagtcgctcgtatcgcctcttccacggtcgcgcagtgccggagcaggtacgcgggagacgtgaagccgtccttcgacctgaaatgcggcatcgcgaggcgctctttcttcgggatcgagcccgcggtggagagcccgagcgcgagccccttctcattcacgcccatgttgaagttctggtacttcccggtcgcgagtccgacgtaggcgtacccttcgcccgatttcggggtcacccggacaaacgtctcctcgctcggacgccagtcccggacttttgaaatcatgacgccgccgtcatcgaccgccgtccccgccgcggcgtagagcgtgcaggcgtgagcgcgcgacggcgcgagaagcacggaggcaacaataagcgccgcggtgatcgccacggcagacggatggatcttcattgaagacctccagaaaaataaatacagaccttcacttcggtccgcgactgacgatttataccggaaaggcaaaaaagaaacaccgggtcaaggtaacccagtgtttcaggagttcagagcggcaaaaaccggaaccggtttttaccggaagaggaagaagtagatcgggcacatgacgagcgcgaaaaccgtggtgcttgtcatgaaggacgaaaccgcgatgttggttttgagcccatagagcgcgcacgtgagcaccgaattaatggccgtcgggcaggaggagacgatgatgagcgttgccgccatcacggggttcgtcacgaccgcggcgcagagcgcccagacgacaagcggcatcaggatgaatttaaggggcatgagccacagcgtcttcggcatctcgcggcgggccgcctcaaagtcgagcagcagccccaccgggaggaacgcgatccaggccgaaatatgaacgagcggcttaaacaccatctgaagccattcgggctgcggcacgtgcgcgagcgacagccccgcccccacgatcatcccgatcagcgcgacctgattccaggtgaagaagagttcagcgaacgagcgcttcttcatcggcgctttgccttcccccgccaccgccatatcgtggaacttctgcgcgaccgggaagttaaacgtgatgagaagcacgttctggatcacggcgacgatctgcacgtatgcgaacgcggcggggccgagaagcagatagcagacaagacccccgagcgtccctgtgttcccgagcatgccggctgtcaccagcgccccccgctcccggggatcggggttcttcttcgtcgccgccatcatgatgaagtacgggaggaacgtgatcacgagcgcgatcaccggcacccagaagatcgcgggaccgatatgaaggctccagaacgagatcaccgcgagaaccgtaaagaccacgcggacattaaacgtgatgacctttttcgtcccttcctgggtgacgatgccttttttatgaagaatgtagccgagcgaaatcggaatgatcgtatcgatgaggaggagcgcgatacggagaagcgtgtcattcatgagcgggtgctgcctgataacaattagattaattttcggacgtaatattaacctttttgttgaatcccgtctttcgcgtcccctcctccattcgttcccggattacttatcgggaccgtagaacgactcccgcgctacgccgaaaaggcggtcgagttccgccggtgtttccttgacggtaaaggtccggagttcaccgatgtcacccgggagaaagaaggcatagggataggtataagggtcattcgcccgagtgaatggctccgtattcgctttgatataccgatgaacgaaatcgagtttgtttatatccgcgttccggaagagatcattctttacgccgatcccgccccgcttctcatcatcgaagagactcaggtgctcatccatcgcccgccactgcggatggctcagcatgatcgtttcagcctgacgctgggattcctctccaagggccgcgatggggaaaaaaatgacatccacgattccgacatacggtctcacgtggcggcagagccggatactcaccggatcctgcgggtcaaaaaagacgtaggcgttcctgcgccccgagccgcctggatactcgaaccccccggcagtgccgctcataccggagtacgaagacgcgcgggagctgagacccgcataatcctcccactgatctctttcgccaaaagtgaaagcccgggaagcggctggcagcgtgaggagcgcggctccggtgaggagcgcgtcccggcgtgaatagcgtttcgtcatagcgtcccccaatccttatttccgcggcgagtagtaggggctatcacccttccggagaaccgtccggagatcttcctccgtaagcgacccgtcaaacggcacatagcggttcgggccgctcttaaagacgccgaacggaacgtcgcggcctccgacctcccggtacaccttgccgttcgcccagaccgcggattccatcgcgggcctgtcccccgtccggctcacgcggagccctcgggtctccggatcactgaagcgaacgatgtggtgatcgagcgcccgccacggttccgccgccccgagtatctgcgccccctgagggccggagcgccagttgaggtacgcgaccgggtagaagtggatatcgatgtcgtgaagcagcggcttcagccgctcgatcatccgaatagagttctcgccctgcgtgtcaaagacgaagtacgccacgggccgcccttcgggtcccgggtacgagaacccccgcgacccctgctgcagcatcgggacctggcccgaaaacgcgtcgatcatctttttcccgttccagccaaacgggatcatcactttcttcaggatcgcgtagtggggatccacccgggtatgcgcctctgcccaggaggcggattccagcgccccgtcaatcagttcggcgtaaggcaccacagacgacccggtcgcgagctggctcgcggccgcgtctttcgcgatcacgaggcccgccgccgcggcgaggaccgtcccggccgccatccggcgggaaacacctcgctcttcctgtttcttttcttccatcatcttccgtcccctcctacttcgccttcacgagatcgaagagcgcgagatagtgatcccagtccggctggttattgaaggggcggtatcccccatccatcccgagatagaccccaaagggcacatcaacgccgcgggtcgcccggaagaggttcgtgttcgcccagattttccgttcggaatcttccgagatccggctcacgtcgtactcaatgccgttcgagcctttctggctgaagagcgtgatctgatcgtccatcgcgagcgcccggttcggcgctccgaggattgtcgccccctgaaactcggacacggggccgaggaaagcgagcggaaagatatgaaagtcgatgaggtgcgaaagctttttgaaggtccgcagcatggtgatcgagttcgggtcctgcgtatcgatcgcgacaaacgccatccgtctccccgggtctcccgggtacgtcacgcaggccgcgccgtgagtcgggattccatccggcccgataaacgcctcgaacatctccttcgcgttccaatccggcgcgacccacaccatccgataggtttcgcggatcatatccgcacgccaccgggccctcgcgttcgcggtggcccgttccgcctgatagcggatccagggccgggtcggaagcgcttccgctgcgcccgccgccgcggcacccgcggccccggccgccaatagttttctgcgcgatatctcgatcatcactcagtccttcagagaccgcggctcctcggaagagaccccgcggttcttatttcagatacgtcgatattaacgcccggattcgcgtccggtctacagaaataaccgtgttatctatcggatatagcgaaagtaactaaatgatttatgaaacgttcttttccgctttgatttttcttggaaacccctgacgcacggggctttacggcggattccgaatggggtaagcgaacccctttcgatccccccgctctctgcctcaagggaacccgtcacgcggttttcccccatttgccaataaaaaacacctgttcgggttttccttgataacccgtcccgtgaccccatgttttcaggcagtttccggctcggttttgtccgttatgtcccgtacacgaaaaattaccgtgacttttatcacagaaataccctattttttccggaataatccgttctacatagacggacgaactaatccatacgaacttttttaaccgtctatgaactcaaatctctgggagagaaaatgaaaaagaccattctggcaagcatgcttgccgtcatgatggcgacccccgcgttcgccgctgaatccaccgacatcgtcattatcggttcgggcggcgctggcctgtcctccgccatcaccgcgaccgaaaagggcgccaaggttatcgtgcttgagaagatggcctacttcggcggcaactccaaccgctccgaaggtgaaatgaacgccgccggcacgaagcagcagaaggctcacggcatcacggacgacacgccggaacgcttcgccgctgatacgatccgcggcggccacggtctgaatgacccggcgctcgtcaaggctctgacggaaaacgctgcctccgctgaagaatggctcctcgacctcggcgctcacttctgccatcgtatgggtcgcggcggcggccagacccgtgcccgcggtcatggtccttgcgatgggtcgcctgtcggtatcgaaatcatgcgtgtgctcggcgaacgcgcggataaggatcatatcgacatgcgtctcaataaccgcgtgacgaagatcctgatgaagaacggcaaggtgtccggcgtccaggtgaagactccgaagggaatggagacgatcaacgccaaggctgtgattctcgcgaccggcggtttcggcgcgaaccacaagatggttgagaagtatcgtcctgaactgaagggcttctccacgacgaaccacccgggcgctaccggtgacggcatcatcctcgcccagcaggttggcgctggccttaccgacatcgagcagatccagattcacccgaccgttatcaagaagaacggcgctctgatctctgaatcgatgcgtgcccgcggcggcttcctcctgaataagaacggcaagcgcttcacgaacgagctcctgacgcgcgacgtcgtttccgcgaacgaactgaagcagccgggcggaatcgcttacctcgtgatcgacaactccatctactcgaagaacaagatggctcagaactacacggctgagaagctgatgacgaagtgcgacacgatcgctgacgtcgcgaagctgatcggtgtggatgagaaggttgtccaggcgagcttcgatcagtaccacaaggcgttcgataacaagaaggatgatctcttcgggcgtcccgagatgctgatccgtatggaccaggctccgtacttcgtcgctgaagtcacccccggcatccatcacacgatgggcggcgtgaagatcgacccgcaggctgaagtcctgacccccgaaaagaagccgatccctggcctcttcgccgcgggtgaagtgacgggcggtgtgcacggcggcaaccgtatcggcggcaacgctgtggctgacatcatcaccttcggccgcatctccgctaactccgctctgaagtacatcggcaagtaagagcgaagtcaaagcttcaaacaatccgggaggaccgactctctctccaaaggtccatcccggaggtctccgaagtgagcaccgcgtgaaccgcttcatgcggtgctcaattttctccagtagtgctttgtagtgttttgctaggaccgcacgcgatctttctctctcctcagatcgctgcggcttttttttgcccgattttcccccgcccctcaggcgctattatttaaataactttcactttgtcctgaggaatcggctcatgaaagagactgttctcgcggccgccctggcgctttcgcttgtctcccccgcggtccttgccgcggaaaccgcggatgtggtcgtggtcggagcgggcgcggccggcctctccgcctcgatcggggcggcagcgcgcggcgcgaaagtgattctgcttgaaaaaacgggggacgcgggcgggaacaccgcttttgcctctcttgggctcaacgccgccgcgactcccgatcaggcagccgcccggatcatgggggactcggcgacgcttttcgccgcggacacgatccgatacggacatcaattcaatgacgcggcgctcgtccgcgcgatgaccgtgacttccgctccggcgctcgcgtggctcgaaacccttggcgcgaaactctgcctccggatcaccccggtggggagcgaggcgcggccgcgcctcatggcgccatgcgacggaaccgcggttggtcctctcctcatccaggttctgaaagcgaaggcgcttcagagccaggtcgacctcaggacccaagcccgcgcgacaaaactcctcctctctggtcaaaaggtagacggaatcgaggtacagaccccgaaaggccgctatcagatcaaagcgaaagccgtggtcctcgcgaccggagggtttgccgcgtactcgtcgctcgtgaaccaggtccatccgtctcttaaagggatcgcgcccgtcggattccggggcgcgacaggggacgggctcgtgatcgcgcggggagcgggcgcggcgctcatcgatatggatcagctcgagatccgcccgaccgtgagcgtgaaaggaaatgtgccaatcgaggaagccctgcgggcccggggcggaatcctccttaataaatcggggaagcgttttacggacgaaaccgggatccgggatatcgtctctcaggacatcctgaagcagtccgggcactcggcgtacctcgtgatcgacagcgcgatttttgacgccgataaaaatcttcaaacctatgtggaccaggggctcatgaagcgctgcgggacggtcgccgcggtcgcgaaggcgatcggcgcgaactcagccgccgtgaaatcaagcctcaaccgctactcccgggcctacgaccggaagttcgatcaggatttcgcgcgctacgaaatgcgggttcggcttgatcagggcccctggtacgtcgcggccgtcaagcccggcgttctcgcgacactcgggggaatcaaaatcaatgaccgcgctgaggttctcaggtccggcaacaccccgatcccggggctctacgccgcgggggaagtgacgggcggcgtgcacggcggcaacatgatgccggggaacggattgacagacgctgtcacgttcggtctcattgccggcgcgaagtccgcggcgtatgtgggaaagaccggcctctgagacaatggtgtccaaaacaaaacgggagagctcaatcaagagttctcccgttttttaacgcagcttcagttttttaatcagagcttcacttcaaagagcgcggcgagttcctcggtcgagaggttctcatcaaacggcttatattcgcccttcgaattcttgaagacgccgtacggcaccgcgcggcagcccgcacggcggtgcagcttcgtgttcagccagaccttgttccgaaggtcatcggggagcttcgaaaggtcatagcggataccgcggaactcgggatcgcggaaatgctcatgctgctcctcatacttcttccacggttccttcgacgcgaggatcgtgctgccctggggttcggaattgatgttcaggaacgcgatcgggaaaaagatcacgttcaccttcgaaagcagcggcttcacgttttccgtgaacttcatgcagtccgggcactgggggtcaatcgccacataggcgaccggacggtccgcgggaccggggtaggagaaaccggtgccctgagccttgaacgtctcatacattttctttccgtcccagatcacggggacaacagccggacgggcagccgcggggcgggccgcgatagcggcggcagcggcggcggaaagggtgatcgcgctccggcgcgagagagtcttctgcattctttttcctttttttcgtcggggtatctgaggggaaagccggaactccatacgtctttccccgtttcacagatcttcaatcttatgtccgcccgatacggaaaaaccctctcttttacaggctgaaacaaagggagcccgggaacccggtccgagcgccccgaggaacggctcggattcccctcttatgtacgggtttaaggaacaggtgacacggctcttcatgacgtaatttttaccggtacattcatgaatatttaacagggaataaccgtgtacacgggaaattctcgacaaagcggagcataggaacggctttgtctcgatgaaatcagccttcttcttcgatgaaatctcttctctcccaatcgaatttctgttcctgaaaacgcaaaccccgtttgattgttgcttttacgtcaatgactgttaaaaaatatttcaaaaatcgatatagctaacgtaagatagttattgctgtattcctataaatcaagaggagagaagatgaaaaaaactctgattgcggctgctctttccatgctggtcgcgagcccggcttttgcggctgaatccgctgacatcgtggtcgtgggttcgggcggcgcgggactgtcgtccgccatcaccgcgactgagcgcggcgcgaaggtcatcgtccttgagaagatggcttacttcggcggtaactccaaccgctccgaaggcggcatgaacgcggccggcacgaagcagcagatcgcggacggcgtgacggacgattcgcctgccattttctacgccgacacaatgaaaggcggccacaacctcaataacccggcgcttctgaagacgctgaccgaaaacgccgcgggcgctgaagagtggctcctgtcgcttggcgccaagttctgccaccgcatgggtcgcggcgggggacaaacgaaggcccgcggtcatggaccgtgcgatgggtctccggtcggtattgaactgatgcgggtcctcggtgaacgcgcggataaagaccatatcgatatgcgtctcaataaccgcgtgacgaagatcctgatgaagaacgggaaggttgccggtgtcgaggtccagaccccgaagggcaaagaagtgattcacgcgaaggccgtggtgcttgcgaccggtggtttcggcgcgaaccacaagatggtggaaaagtatcgtcctgaactgaagggcttctcgacgacgaaccacccgggcgcgaccggtgacggtatcgtcctcgcgcagcaggtcggcgcgtcgctcactgatatcgagcagattcagattcacccgaccgtcatcaagaagaacggcgctctgatctctgaatccatgcgtgcccgcggcgggttcctgctgaataagaacggcaagcgcttcacgaacgagctcttgacgcgcgacgtggtgtccgctaacgaattgaagcagccgggcggtatcgcctacctcgtggtcgatgactcgatctacaagaagaacaagatgctccgcagctacgtctccgaaggtctcatgaagaagtgcgacacggtcgctgacgtcgcgaagatgatcggcgccgatccgaaggtcgtccaggcgagcttcgatcagtactggaaggcctacgacaataagaaggacgatctctttggccgtcccgaaatggtgatccgcctcgatcaggccccgttctatgtcgctgaagtcactcccggtatccatcacacaatgggcggcgtgacgatcgacccgaaggctgaagtgctgaacaaggcaaagaagccgatcccgggtctcttcgctgcgggcgaagtgacgggcggcgtgcatggcggcaaccgcatcggcggcaacgctgtggcggatatcgtcaccttcggccgtatttccggtaacagcgccgcggcctacgtcggcaagtaatcggaaacaaaaaaatccgaagtgccctgctcccgacagggcgcttcgaaaacacaaagcgcgtcggttttccccggcgcgctttttttgcccctgtcgtttcttcgttacctttttctcttttaccgtgattcagaaaagaaattttccgtgtcttataaaaaagttttctgaccccttgaaaaaataaaaaacgcccccataatacatattgcaaggggatgaaaagaagtacagggcttccactcatcccagcaaagaaatcagtgttaagtcactgtaaattaagtgttgaccgctcagacgacggccataatggagtgtgtattatggcaaatgttcctactatttttgatgaatcccctctgaacatctttgatccgtttgatgtgttctctggtttcaaattcccggatccttccactacggtttttggcaagaacgctgaccgcctgatgaagactgatatccgcgagaccgacaagggctatgaactcgcgatcgacctcccgggcttcaagaaggaagaaatctccgccgaactgaaggacggctacctcacggtttccgcctccaagagccacaaggaagaagagaagaaggaaggtcacctgatccgtcaggaacgctcttccggctcctgcgcccgtacgttctatgtgggtgaaggcgtgaagcaggcggattgcaaggcctcttacgaaaacggcatcctgacggtctgcatcccgaaggtgacgaaggaagaaaaggccgcgaagcagatgatttcgatcgcctgatcggagcttaatctgagcggcggtcctccaccgtaaaaactggaagacaaaaagaccccgcggttcacttgcagagtgtggaccgcggggtcttcgtacgaatgaagcgcggtttccctcgatggagaccgcgcttttttgttcccttggcgcctccccttcaggcgccaggagagccgggggaaaagcaaaacttttacggcaccttgaacttgaagttatggcactgggcgcagtagttctcgctcttctcgtgccccacgtggcagttcgtgcagtcaagatccgcgccgtagtgcggggagttatgcgggttcgtcggtttcacgtttttcgtcgacgcgacgagcttatccttcgggtggcaggcggtgcaggtcgcggtggtgggcatcgtgtccttcgtcttatggcacgccacgcacttcatgccgtgcgccgtgtggaaatccgccatgcctttcgcggcggcggggccggacgcgagggcgaggctcaccgcgaaggcggctgctaaagcgataaaggctttcattcttggaatcttctatctcagtcagggatacgccgcgggcccccttcggaaaagcgggagaccgcggcgagacgggaatgtcgcgagtaaaagccccggacaccgggagagagaacagtgcccggggccgaggagagactatttagcggcctgctgacccgcgatacggccgtcgatcaggcagtcaaggatcgagcaggagccgagacgcacagcgccgtgcacgccagacgtcgcttcacccgcggcgaaaagccccggaatcggctttccgtccacgatatcgatcacgcgggcatccatatccgtcacgagaccgcccatgcagtggtggatcttcgggctcatctcttccgcgtaccacgggccctcggtcatcggcttctgttcgttattgatatagcggccgaattcggggtcgtgcttcgcggcgaccgacttattgaaggcgtcgacggtcttcttcaggtccgccgcggggatcttgaagtccgcggcgatgtcatcgagcgtctggtactgcttgatgatcttccgctcgaggagcttctccatcatgccggggcgcgctttctggaacgcggcggtgttcgcccggttgcagatcgcgaccgcgcggcggccttcgctctgctccaccatgatggcgtccgcgcgcaccttgcggttcgcgagttcgttcacaaagcgcttcccgttcgtcgcgacccagaggccccactcggcagcggccgactgcgcgaacgtccagccgatacccatgcccttttcgttcgggttattccacggcgtgcactgaatccagtcgttctgcacctgagcgcagccgatgcggctcgtttcgcgccagagttccgcggtggcgccaggctgattcgtgctgtcaaacttcgcggtgagcatcgggttctgcatcgtgcgatagggaacgtcgcaggagaagccgccgtagcaaagcacaacacccttcttcgccgcgatgaacttcgtgcggccggagttctcgttcgggaagcgatagccctcgcggacctcgataccgaccacgcggccgtcatcgtttctgaagatgtgcttcacataggtgcgggtgcggatcttgaccccgagttcatcaagcttctgcttttctttcgacgtgatgccggagccggacccgttcttcgtgaagacgtagcgcggcacgctgtgaccgccttcctggccgatcgcgtccgggttgtactcaacgccgaggtaattcacggtccactcgtagttcgagagagcgtgagacgcgacaagcttcaccttttccggctggttcatatagagaccggcgaccagcatgtcgtgcgcgaggagttcaggcgaatccttgatcccgtgcttcttctgctgcgggcagccggtagcggtcagaatgccgccgttgatcgcggagttgccgccgtaggtcggcatcttttcgagcacgatcacgttcgcgcccgcgttcttcgcctcgatcgcggcggccataccggcaaagcccgagccgatcacgatcacgtccaccgtctcgtcccacttcttcgggaacttcacggcacccgcggcatgagccgtgccgaaaagaccggcggcaccgagggcgaaagaccctgcgacagaacctttaagcatctggcggcgattcaactgagccatgaggaactctcctatctgatgagaaatatattcgattaatggattccttggagcagccagggatggtctgctgtggctggaatctctctggatcgaatattgcctctgaccatgtcctaagacatttgacagatagcaacctcccccaattgacggagcagaggtacttttcgccgcctaaaattcttccatcgcgtttcacttgcctattcaccgctttcctcttatgacacgacgccccgctccccgccctccccggctccgccgcctgctgatcgcagcgggggtcgttgtctgcgccgcgatcctcgttacggtcgctgtgactcagaggaaaacgcctgttcagacgccgtcccctgacaccgcgaaagcggcccccgcgagctcatccgcgccggatggcgtaaacgaggaactccggatctggacacttgaagacaaggcggcggataaggaagcggaccggcgggcggcgaaactccgcgcggacacccctgagcatctccaaggcaccggtgtccccaattccccggcactcaaggatcagaaaaacgcgtccgcgattccctcttcggcgctcccggatttctcctccggcacgcccgcgaaaaacgggaaagccgcccggacaccgatccggatcgggatcttcacgtacgccccgccctggtacgacggcgccttcatggatgagacgctgcagtacctcgagtggctgctcccgcagtttgagttcacggtgagttacctctccggcgacgaaatgaagaaggcgctcgaatcccggacgatcgatctcgcggcggcgccgaaaacattcttcctgatgtcgcctgttgccgggcttcaggaactcgcggggattgtctctgacaccgcgtctgaccccagccggtcggccgccgcggccgtgatcgtgaggcgggatgacacccggttccggtcgatcgatgacatcgcggggcacaccgtggaagtcaccgccggggaaccgtcccctgggctttatgaagtgcagtacgagctcgtgaagcggggcgtgaatccggaacgcgctctgcagctgaaatacgccccgcagctctcgatgcggaaggtgattgaggacgtggcagcgggccgggcggatgccgggatcctgcgggcgtgctttgttgaggatctctggagagccggaagccagaattacgagaaagaggtccggatcctcgaatcgaaagaccatctgaaggacgggctcacgtgtcttcactccaccgcggtgtatcccgggtggacagtcgcggcgtcagaccgcctcccgcaggaagcggcgcgcgtgatcacggcgacgctcctctcgaaacccgcgaacgcctggggccagtactggtccgtctccaccgcgaacggagaggcgcttgagatgctccgcggtctcaaaaccggtccctacagctacctcggcgactggccgatcaagcggatctgggaaaactactggggcgtgatagtggtgagcatcctcgcgcttctcatgctcgcgttctacagcctgatcctgaagaaactcgtccgacgccgtacgcgggagcttgaacgcgttcacgcgaagcagcaggcgtctgaacgctccgcccgcgagctcacggaaaaattcgacgccctccagcgggcaggggccgtgggccagatctccagcatcgtcgcgcacgaaatgaagcagccgctcgccgtgatccagaacctctcccgggggtcactgcggatgctggaagatgacccggacgcgatccaggatccggacgcgatcacgaacgcgatcgagtcgatcaatgaggaggcgggccgcgccgcgaaaatcattgaccgcgtgagaagctatagccagggggtgacggagcgcgagcatctcgcctttgaacccacggtccggaagatcgtcgatcagttccgagcgtccggcaaagggcggctcgccgagattcacttcgaggggtcggctgaaggctcagtcttcatgaacccctttgatctcgaactcatcgtgatcaacctcctctcaaacgccgtcgacgcggcgtcgaagtccgagaacccgctcgtcctcgccgaggtatcgcgcgaggccgataaggtgaagttcacggtgaccgataacggcccggcgctcacggacgacgccttcgcggcgcttggcggctcggtcctcaaaaccacgaagaaaaacggtctgggcctcgggctcatgatcgtgaaaacgatctccgaaaactatgtcgggcgcctcgccttcaggcggggaactccctccggcaccgcggccgaagtgacacttcccgttgacaccgcccggataaacgaaaaagaacacgcatcatgatttctgacaccctgaacacggataccgcttcccgccctcctctcatccggatcgttgatgacaacgcgccgatgcggggatcactctccttcatgctgaagcaggaagggtatgagaccgcggaatacgcgagcgcccgggagttccttcagggggacaccccgtcccgcccggggtgcctgctccttgatgtccagatgcctgagatgacggggcttgagctccaggaagaaatgatccgccgcgggatccggctccccgttgtctttctctcggcgcacgggaatatcgatatggcggtggacaccatgacgaagggggcgatcgccttcgtgcagaagaccgcggaccgcccgaggctcctcgccgcggtaagccgcgcggtgcggcagagtgaaggctcgtcccccgccgcggttccgtcagaactcatttccaagtggcgttctctcactgagcgcgagcggcaggtcgcggaactgatcgccgaggggctccttaaccgcgaggtgggggagcggctcggcgggatcgcggcgaaaaccgttcaggtgcaccggggtgaagtgtgccggaaactcggagtccggggcgcgtccggcatcgcgaacgccgtgcggaccgtccgcatgatccttgaccgcacggatccggcgtcgaagggcgcgaatcccgatgaaggaggcgtctgatgacgggaaaaccttttacggtcggccgccggaacgtcgtggtcggggcgctcctcgcctcagccgcgatcgcgaaggcggagatcgacgcgtcagaagcggacctctacggaccgcccgatcacgcggggcacccggttgatctgcatccggaccgggaggagacgtttgacgtcgttgtcatcggttcaggcgcggcgggcctctccgccgctcttgaggcccggaaggccggcgcgtcgaccgcggtccttgaaaaaatgggaagcccgggcgggaacagcattatttcaggcggtcagatgaccgtccccggttcgccgatccagaagaaactcggcatcgcggattctgtcgaaaaattccagcatgagctcctcagagccggctactcaagtcacccggatcgggtggagacgcttggggcacacgcgctcgacgccttcgcgtggacccggaacgaactcggtgtccgctggtttgaggaccggcttgagcgggatgacgcggacacgattccccgggccgcgattctgcagagccggaacggcatggggctcgtcctcccgatgctgcagcgcgcccggacgttcggggttgagatcaggctccggacgaaagcgcttcacctcctcacggatccggatgacgggggccgcgtcacgggggtgctcgcggaggataccgcgacaggagaaaagatccgcttccgggcgaagaaaggcgtggtgctcgcttcaggcgggttcggcgccgatatcccgatgcggcagatgctgaactggcggctttcggagcgcgtcggcaccacgacgcagcccgggagcacgagcgaaatgctgcgggacgccgcccggatcggcgcctggctcattcaccttgaatacatccactgcgtgccggacgcgagtccggatgagaagggctggggcaccgcctggcagttcagccggtactgcgcgtcgcctttcgggttctgggtttcgaagaacacgggagagcgctttgtgaacgagctctccgggaacagcgaaaaaacaaacgcggtgttcgacattctgaacaccggggatgagccgctcgcgatcgcgaacgcggatgccgtccgacacccgcagtcgatgatctttcaggagagcgacgtggagacactcgtccgccggggcttcattcagaaatactcggatatcgactctctcgcgaaaggctacggaatccccccgggacctctgaagcagacaatcgaggcattcaacacggcggtaaaagccgggaaaccgtttgaccccatggggcggccgatcccgaaaggcgcgaaacccctgacagacggcccctggtacgtgggcgcgattctcgcaaaggtgctgacatgctcaggcggcatcgcaatcgacgccgcggcgcacgtcctttccgtgaatgacgatgagccgatccccgggctctacgccgcgggggaagtgacaggcggcttaagcgggatctcgtttaacctcacctgcggactgcttgacgcgatcgtcttcgggcgcatcgcggggcagcaggcggccatgtaaaaacggcaggagaaaaaagaacccgcgatacgcctcacccaggcgcgccgcgggttttttctttaagcccctcaaaggatatgtttttatgacgcctcttcattgaggcgctctttttgttattcagactcggcgcggcgcaatcttcaggcgtccgcgccatttttatccgttctcagtgatcgctcttgatcccggcgctgcacatcgaaagcagcgcgtcatgcgtcgggccgtactgacggcagtacgtgtagtaagcggcgagcgacgcggcggtcgtgtgttccgcgtaaatccctcggtgcgcgagttccgcgcgggcggggaggatatcctcttccgcggcgcagacgatgcggatcttatgcttccggatcatcgcgaggatttcgtccgccctcgcgggcttcccgatcgcgatcccttccgccatcgtgggcttcggggtaatggagacgatatgttcggcgccctccgcgatcgtttcggcgaacggcgcgcagttcgcgccctggaccgcgatcacctgcgggaagtgatcgatcgcgcccgaggcgtagaggtgctcaagcgccttcacggcaccgataaagagtgtcccgttcccaagctcgataaagatgttttcgggcatccggtgcagctgctcaaagacctcgtaaatgtaggtcttcgttccttcatagaagaaggggttgaaaacgtggttcgcgtagtacgcgccttcatcccgaaccttcgcgcggcagacatcggcgcagtggtcacggtcacccggcaccaccaccgccttcgccccgaacgcctcgatcatcgcgatctttttcgggctggtgccttcaggcacgtagatctcgcactcgatcccggcgcgcgccccataggccgcgaccgcgatcccggcgttgccggacgagtcctgcacgcacttcttaaccccgatcgacttcatgtgagcgacgagcgctgccgctccgcggtccttgaaggacaaggtcggcatgcagtaatccatttttacgaggacgtcgtccgagaaggggatcacaggcgacattccttctcccatcgtgacctctttccacgcgtctccttcgagcgccatgaacgcccggtaccggaagaggctccaggtatcgcggtcaatcttcgagtcgtcccaggccggaggcacgaagtcgagctcaaacagtccgccgcagtcacacgccggcgccttcgtatcggtcgaaaccttctttccgcagcaggtgcaaacgaaattcatgatggaatcctcatagggtggggtgagtccgggaacgactctgatgacagacattctacctagggactttgcgtgcgactgatacagtttggtactatctcactgatacagatagcaataaaggaagttcccgtggaagcaaagaaaaaaccggtggtgtcagtccccattcatatccggaaaaacgggaaactcccggtcgggaagcagatcacgcgggaactgatccggcttcggagccgcggggcgctgaaacccggggacaggctccctgggatccggagtctcgcgtctgacctcggcgtcgccccgaacaccgttgccggcgcctacgcggaactctccgcgacggggttcgccgtctcaaaacccgcctccggctacttcgtcgcggaaacaaaaccgatcccggaaccccctcgccccgtacacccgccggttcacgcccgccccttgacgcggaaagcggaagcggcccggagcgccgcggcggccgcgggtaccggaaactttgagaaccgcccgttcaagatctatgggtctgcgatggagaagacggtcgaacgggactgggtgaagatcaccgcgtctaccgcccgaagcccttggcggcacaccttttacagccctcctgccggctacgctcccttacggaaagtgatcgcggcgaagctccgggaaacgcgaggaatcgtgtgcggagaggagaacatcgtcattacgacgggaagcgtgcagagtctctcgcttatcgccggcacgcttttcacgccgggcgacgccattctcactgaagccccgatgctcccgcttgacgcgaaggtgctcgatttcgcggggctccgccggatcccggtgccggtcgatcgggaaggcatggtgtttacggcgccggaaggcgtcctgaaaccgaagggaatcctcgtcaccccggcgagccagatgccgatgtcggtcccgatggcggacgcgcggcgagccgcgatcctacgcttggcgcttgatacgggagcctggattctcgaagaggatacggatggggttgtgacgctgggcgccaaaccccgctttcccatccggtcgctcccacgcgcggatgaagccgtgatctatatggagagctttacgctgcaggtgttcccggggctgaggctcgcctacgccgtgctcccggaaccgcaggcagaggcactcgccggcgcaaagcttctcacggatcgctttacgtcggaatcgctccaggcagctctcgccgaatatctcgagagccccggctccgctcatcacatccggaagatggcgcgggactaccggaagcgcttcgcgctcctccgggatgctcttcgctcgtcactcggacctcttggccgggtgtcagaaactgaagccggccctcacctcgcgctccttcttgatcccactatccctgataccgcattgcaggccgcgcttgagcgtgacgggatcaccgcaagagcgatcagcagtttcacggacgctcctgccggaacgaatgggctccttctcggatttggaacgtttacggaaagagagatcctctcaggtgccgcccgtatcgcggaacgcgcgaaggcgcttttcgccgcggccaatccccgctgacaccgttcctctttctcaaagtcaaaaaaaaccggctgatcagaaacacgattagccggataagactggagtcaaaggaaagaagtcacacactacacgctgcccccactgcactgctttgcacgttggggctgctcggagattttccttacagatcatccccttgcagaattaacaataggcgctttccgtgattgcgcgcggatcaattgcaaccaaacgatgcagtgagcgaagtttttcgcatttcggatacaaatagcggcagatgacgtattttgcccgcctgcggataaaaaaattccggcatttctcgtgaaaacgccggaaaatcaaacacttagttagttcaaaggagagagatacttcatcacactctgcgcctcgggtactcaccgagactggctgtcgctgcggggtctgcaaacccgcacctcttgcgtaattaaaactctattcgaattgcctgcaacattcttccatcaattgcaacaaaatcttttaacaacaagcgggaacagcacggacgggacttccggagcgatatcggggttttcgtgtaatcacctggattacctccaacagatcagataaattccggcgtttctcgtgggactgccggaaaatttccaacacattcaaaggagatcgaacaactgcctgattattcaggagattccgatacatcagcagcttttccgacgaagcaagtttggaaagactcgcgcggtcggacgtcactgcggacacggaaaattttcgtctgcactgcctctgatgtgaaacccggcgatgggtcccgcacgagccgcgacaggaatctctccctgtcaggaccctttggcagtttaatgtcgcgcacaaaccccgcagacttaagctgatgttccacagcctgccagcacctctcaatgctgaccgggtcgtgctcgccgttcttaacgcagcaggccaggagtgcgctgtagatgtctcgggacaccagcgtatcgctgccgcccaatgaatgccatcgctgttgcagcggtttcctggtataggtctgcgttctatggtcatactggctcatacgcagtttccgggtatccagttcatttaccgtcaaggcagcactttcagccttcctcttgagtcgctgaacaaataatcccgatgcctggcgctgagcgcttcttccaaaattacgttgatagctcctatagctgattgtttcaagattgaccgttccggcctgctcaaaaatcgagttaatcagtgctccgtggtcgcgctttcgtgtctctgccgctcggcgatacaggtcagccaattctcgtaacagtttttcatagtgattggaacgcttccattctcgtgctccttttttagtcgctccgctgggttcgtaattgtccggattcattgcccgaagtgaccgagccatcttccttcgcagattcctgatctttgcccagggtatttctccgtaaggggaaaggaacgtaaatccggcgaaattcgggctgaccatcgccaccttggaagggccgatatcaaggcctatcgtctcgctcttcggagcgtacacatggcgcacgggtggcaaaccaaccatgacaagctggacgaaccaccgttctctgcaattaagaatccgacggacaatgcggcagatcttgacctgcctcgggctgtcttccgacccaagcgcttcctgaaagtaagccgtgtgctttacaagagccggaaaccgataacccctccagaccacagactgcagctgcggtttccatataattcctctgttgccgcagcagtacatggaatgaagtccgcgccgcttggttttaaatcggggacgtccgcccttagcatagatatagcgctccagtgcccgccacacggtaaaaccgatgaacttagcttcagtaaagccaatcagattggttttgccagacgctttgcggtggttagcggccatatcaccaagaccgaactcattgagtccgtattttttctgaattcgtttgagttcagcgttccgatccgacaccttcttgatgaggaaagcgttcttccattcggtgctctggcgcatatgtgtcagctttcccagtgcctgaccgagcgtggcgttgtaaatagttcgcccaaactcaaaagccatcgcgagcctccgcgactcttcatcgccgattcgaagcggaagctcgacaacataatattgagatgacgttcccatttacagctccgttagatcaaatcaggaacagacacctttccttcaggtgttcaattcctttttgagtttcatgacatagaaaagcccgctccattaattactaaaaataacgttttagtagttacgtttaataattttcataagggtccgaaaaatcgtccccgcgagcacaatccaattctcttacctgatttaaatgggttttcgtgtaaaaatattttgttacatttgggttgaagtgaaacgaatcgacgttttttctgcttgtattttcaaaaattcgatgtgttaaagcaacgattcgagttatcacagacttaacgagattccgcccgtaagactcatcctcaggcttatctgaggcgacgattgaagtttcagccttcagacagtggatatcggcgcgaaggatcagccgccctaggtcagtgccaaagccgcgagtcacctgtcgggaggaggttgcgccaatctttctggagactggtttcctgagaacagcggattaaacaaggaagtgtttctgctaagagacatgaataggcagggtttccggtgccgtaatcgctgattcgttcgaagagaacaaaaaaagcccggcgattccggaaagaaacgtcgggcaaatctcgttcaatttcaaaagcatgcctgcgcgcgacacacagagaccgcgtccggaggcgacccggacagctgaggctgccaagcgcagaaaagaatggacctcagcgcgcctcgctactttatgcccgctgactgcaaagatggctcagggaaatgaaacagaagtgttactgaaagcgggaccgcactctcctctgcccgcggcaaatacttttgacaagtgtgtagtatttactctacacttttccgcaggtaataatgattgctgatggtcttgggtcgtttttggtttagctaaaatgtggagtaactgctacacagactaataccatggactttggaacatacattcgcgatgcacggctcagactccaagaggaagaccgacgcacctattcgctgcgccaggtcgctgaacgagtcggcatcgagccatcctatctttccaagattgagcgaggcatatttcctcctccatctgaagaaacgattgtgttaatcgcccaggagcttcacgaagacaaagacgttcttctcgccatggcaggcaagctatccagcgacctcaaggccattattaccgcccggccaaagcttttcgcccaggttctcaggcagatgaagcagatgccggacgatgcgattctggagatcagccgtgaagtgaaagacggcgattggtgataactgaaggaggtcctccatgtctgagaaaggccacactgtccaagtacaactccgtacccataagccccgcagcagcgttcgtttaattgacaataacgaactggaattcgcctttcccgcgattggcaaagactgcatactgcgcatgaatttccagcgcaccctgcgagttcctgatgatgaagtcaataatcttccgcccggactagaccggtttgaactcgaacacgtcgaagactatgaaggcaggattcctcagaaatggctggagcacggcggacttatgctgccaatgtaccaggctgaagccatgtggatctccttcaggagccccagagaatatccgttcgccgtccgaatcgcggcaggcaaaatctgcgcggtgaccggggatgaatggaagcccggtctcgttaagggcacacgggttgatggcggcaaagaacagaatcttcagaattacctcccggttcccgactaaccctggatcgacggcttctgcgtagaaaagggagtcatccgccagttcgtcgccgccccgctcggcgaaggtcaaaccgcggaggaacagctgactggcaaggcagagtttggcggcattcagattcaggtttatccgcttaaaaaggaaaaaaagcaggcggaagaaagaagcttctcctcgtatcaggaagatttcgtcctctgcagcaggtcaactctcagaccgtcagaaatgggactcggcgccggcggccgcattcatcaggaaatctacaaagaccgccgtgaggtctcggactacgatacaacccggtcggcgcgagcctatgtccatctcgtaaactcagccgattggtcaaggatcacagggcttccaatgccccgcaaacctatatccgcggaggactacatcaaggctgggcttccttggttcgattactactctgaagagagcgcggtttcggggagcaataggctcgccggtcttaaacccattgaagtgactgacggcaactggtaatccttaatcatccgacgatcaactctaaaaactcggggatatcaggccgatcagcatcgtctctgcggtccgccagttcatcaatagcaattcatttacctgagataatagaaaccgcaacgtgatcagccatcggggtgccatatgtctgacgacaaaatcagttttgccagctacacgctttcaggtcttttttgtgacttacaagcccggcatcccgagattcttgacgaactggccaatgagttcaaagactcttttgctttattgccttgcggcacgacgcaaagtgagaaagcgtacttcgctgaacgtttcggaacccgatgcgataaagctgttgcggaaattcaaaccgacccgaatttccccatatccccgataatggccgcgctctgccgacagaaattcatgtcctattacacaaggcagagcctggtgctcacccacaagagagaagatgggacagtcgactatcggctgataaccgctaaaggtgctgtcacgcagcataagcggcttgatacctctatccgccggcggcatattgggagcgatcgcgtcttctccgtggatcttgcatcgcacgcgtttccgagcgacatcataaagtcctataccttaacgccgaagggcatgattaggaccaagcgaaccatttttattcaggtgaaaggcctcccccagggatatgggccttttgctgatgagttggctgatgtcgcttttattgatccccgcagcgatgcctgccccgtattcgaaagggccggcatgcctatcgaattcataggcgatgaaatgcgaatttatctcgatgaggagatactgcaattcattcattgcagcactaatgatcaattacggattcggttttccatccgcgtatccgatttttatttttggcgaattatcacttcaagtgcaaagcctgagaaaagaatagtggcccataaagcttccataataga

SEQ ID NO: 1362 - DNA, 1109 bp, Unknown
  gut microbiota DNA sequence
taatctctaccgtctgatgctttttattgtagaaataatcctttgcgatatgaggatacttggtggcaactcttatctgctcatgatgctgtaaaagctcccttgcgctctccggtccgcatatgcacatgcggcattttccaaaacctaaatcaagcacctcgtatatatttctgccctcctcgaggatggtatcctttcctaccacaccgatatcagcagcgccatactccacgtatgtaggcacatcaggtccctttgccaggaaaaatctaagcttaagctcctcatttacgaaaatcagctttctggtatccggatccttcatctcctcacaggtgatgcctatctgctcaaaaagctgcaaagtcttctttgcaagtctgccctttcccagggcaaaggttaaatatctgtcatcactcatcttttattcctctataaactctactctgtttatacggttgtctaccgcatatgaagcatagtcctctttcgttttatttttgtccttaagcaccatctgtgtatttactccatctcttcgaagctccatagagcgcttgattgccgcatggtatgcagcctcctcaaatactataagtgatgaattctcaatgacaggcacatcaatatcctgacggcttaatgctgccatgagctgatccacaacaattgcaaagccgattgcagcagcgtcctttccaaagtgtgaaagcagcttgtcataacggcctccctttacaataggctctcctgtaccatatgtgtagccctggaaaatgataccagtgtaatatgtgtagtcactgataagtccaagctcatacgaaatatatttctcgatgccatatgcctttaaatattctctaagcttaagcagagtatcaatagatgataatatctcatcatatcccttcgcaagctttaaagcctccataagctgctcatcctgtaaatcgaaattgtctaatagtccaaacagcttccttagcttgtcgttcattgaaagactgtcaacaaactcctccacaccgaagaaattcttatttgctatgagctctcttaggttttcctcctgctcccctgacagccctgctgcctttgtg

SEQ ID NO: 1363 - DNA, 4471 bp, Unknown
  gut microbiota DNA sequence
gcatcgccgagcttccgaagctgattgccgggtacggaaagaaagtgcttctcacgtacggtggcggctcggttaagcgaatcggtctctatgacaaggtgaaggcgctgctcgcggctgaaggctgcacggtgtttgagctctccgggattgagccgaatccgaagattgagtccgtgcgggccggggtcgagatctgcaagaaagaggggatcgacttcatcctcgcgatcggcggcggctcgacccttgactgctccaaggcgatcgcgcttggcgcgaagtatgacggtgatccctgggatctcgtgattcaccgggaccgcgtgaaggggcacctcccggtgtttgacgtgctgacgctcgcggcgacggggtcagactacgatggcggcggcgtgatcacaaacgacgccacaaatgaaaagcgcgcggtcggggtctgcttcccggtcgcgtcgatcctcgaccctgagtacacgtttaccgtccccgcgagccagaccgctgcggggtccgcggacatcatctcgcacacgtttgagcagtactttgtgtccgagggcgcgatgctctcagacggcttctgcgaatcgatgctgcgcaccgtaatgaagtacgcgccgatcgcgatcaaggatccgacgacctttgaggcccgcggtgaattgctcgcggcgagttcgtttgggtgctgccggctgcttgccgtcggccgcgaagccggtgcctggccctgccacgggattgagcacgagctctccgcctggtacgacatcacgcatggcgttggtcttgcgatcattacgcccgcctggatgcggtactgcctcaaaaacaacccggcggtcgtcgctccgaagttcgctcagtacggcgtgaatgtcctgggtctcaatccggcggacggcgcagccgtgaatgccgaaaaagcgattgagaaaaccgcggaattcttccgttcgatcgggatcacgcagacgcttaaggacttcgggatcgatgagacgcatttcgacgaaatggcggatcacgcgatgaccacctggttcgcgggtcgtcctccgtacaccttcgcgccgctcggccgcgagggaatccttgagatcctgaaggcgtcgctctaagagatcgatttccgggaggggatggattcgaatcagcatgtccgcccctccgggagatgaatagaagctccgtctcgcgttatttttttaatcgttctacagtgacgctgggttcagagaggggacggagcccaacagtttttgttttaccgccggctcttttccgtttgtggtctgacgggacgcggccggtttttgagaggaatagtcatgattcagtcttacgatttgtatcttccgacccatctcgttttcgggaagggccgtgtttcggaactcggtaacctcattaaagggtacgggaagaaggtgctgctgacctacgggggcggctccgtcaagcgtatcggtctctacgacaccgtgaagaagatcctcacggacgcgggctgcgaaatctttgagctctccggcattgccccgaacccgaagatcgagtcggtgcgcgcgggtgttgagatctgcaagaaggaaggcattgagttcatcgtttcgatcggcggcggttccaccctcgactgctcgaaagcgatctcctgcggcgcgttctacgacggcgacccctgggatctcgtgatccataacgaccgtatcggccgtcacctcccgatctttgacgtgattacgcttgcggcaaccggttctgagtacgacggcggcggtgtgatcacaaacgaagaaacgaaggagaaactctctgtcggcggctgctacccggtggcctcgatcctcgaccccgagtacacgttcacggtccccgcaaaccagaccgcggccggaatttcggacatcctttcgcacacctttgagcagtacatcgtggcggaaggctcaatgatttcggatggcttctgcgaatccatgctgaagaccgtgatgcatttcggtccgattgccctcaaagatcccacaaactttgaggcccggggcgaagtgctcgccgcgtcgtcctttggctgctgcgggctccttgggcttggccgcacgccgtccccctggccctgccacgggattgagcatgaggtttcggcctggtacgacattacgcatggcgttggtctcgcgatcatcaccccgcactggatggcgtattcgctgaaagcgaacccctcggttgtcgcgcctcgcctcgcgcagtatggcgtgaatgtcctcgggctcaaccccgcggacggcgtggaagcgaacgcgaagaaagcgatcgaaaagaccgcggaattcttccggtcgatcggcatcacgcagacccttaaggacttcgggatcgatgacactcatttcgacgaaatggcggatcacgtcgcgaaggcctggttcggtgacttcagcaccgcaatcgcgccgcttgatcacgcggcggtcgttgagatcctgaaggcgagcctctgatttcagggctccactccgcgttgaggtttcatctcttctcctccgcctcattgagaagcggaggaggggaggaagactgaagaacccgcgcggcgggaaaacgctttctgaagagaaacgggcaatctttactgattgcccgtttttctctttttttgaggattccggcgaatcgatgagaaaatcaggcaagtaagacctaaatcccacttcatagcctcacagcgttctgctattgcctatagagtgtccgctgtccgccgcgcggtctatccgttttggatcgagcggtgacattttttgatgcgtgacgccggggtgtcatctgtaacggcgtctctaaaaagagagaggaaaagaacatgattcagtcttatgacctttaccttccgactcacctcgttttcggcaagggccggatcgcggaactcgggaacctgatcaagggttacgggaagaaggtgctgctcgcctacggcggcgggtccgtcaagcggatcgggctttacgacgaagcgaagaagatcctcgcggactctggctgcgacgtcgtggaactcggcggtatcgccccgaaccccaagattgagtcggtgcgggaaggcgtggcgctctgtaagaaagaaggcgtcgaattcatcctctcgatcggcggcggctcggtgctcgactgcgcgaaggcgatcgcgctcggcgcgaattatgacggcgaccccggggatctcgtgaagcacccggagcgtgtcggtaagccccttccggtgtttgatgtcatcacgctcgcggcgacgggctccgagtacgacttcggcggcgtgatcacgaatgaggaaacgaaagagaagctccccgtgaacggctgcttcccggtcgcgtcgatcatggatccggagtacacgttcaccgtccccgcgaaccagaccgcggcgggcgtcgcggatatcgtgtcgcacacgtttgagcagtatttcgtgcgtgaggcgtcgatgctctcagacggcttctgcgaatccatgctgaagaccgtgatgcacttcggtccgatcgcgatcaaggagccgaataatttcgaggcgcgcggcgaaatcttcgccgcaagctcgtttggctgctgcggacttctgtcgcttggccgctccccgtccccctggccctgccacgggattgagcatgaggtgtctgcctggtacgacattacgcacggtgtcggccttgcgatcatcaccccgcactggatgcagtggtgcctggatacggaccccgcgctcgtcgccccgaagttcgcgcagtacggcgtgaatgtcttcggtctcaatccggcggatggtgttgaagtgaacgcgaagaaggcgatcgaaaagaccgcggcattcttccgctcgatcggcatcacgcagacactgaaggacttcgggatcgacgactcgcactttgaagcgatggcggaacacgtcaccacggcctgggtcggggactacaagtacgccttcgtcccgatggataaggaagcggtcctcgccgttctccgcgcgagtctctgagtttcggacgagagacggattctttcttcaggcgtccggagtcaccccggatgtcctgaatcaagaccaaaaaagggcggtgcgccttacccagtagcccgcccgatattaggttcagagcgcaggcgctggatgtcatccagcgcctgggcgtactgggtggcggagacagtcttctttccctcgctgtgtccccaatgccaatacccctttcttagctttcgatcgccagattttattctgcagtccagtgtttcctggtttccctgtcgacaatcaccggaggctcatcatcagccatcacggcaccatcgccagaaagatctgaaagtccttccgaaactaattttttgacctcaatttccgaggttcccgaatcagaactagtcatacgactacctgaattcccgattt

SEQ ID NO: 1364 - DNA, 15473 bp, Unknown
  gut microbiota DNA sequence
agccgctcgaggagcttcgcggcgtaggatgcggcccaggcggcgtccaccaccggcggctcatcgacaagcttcatatcgtccacgatcgcgtcgtaaaactccttcgggaaggtgtcctcgccgatcggttcgccgttttcatcgaaataaacgatgaagttcttattttcgtcatcaatcatgaagcggtttgaggcgacgtctgtcgtttcgccatcctgcttctggatcgagagcgtcatcgacttgatgatttccacatagcggtcatcaagccccgctttcagaatcatcgccttttcgcgaaggtcatccggcgtggtgacgactcggaagtgttccccgaaatccgcgtccgcttcaggcagcttcgcgcggagttccgccatcgtggtctcgcgctccgcgatcgcgtctttcacggagtcctcaagcgtgagacccgctttcgcggtgacgagctgcagcgtcgtgcggcgcacgaggtcctggtagaggagcgggaacgtgagcaccacgtcggtgccgcagcccgggcactggtaactgaagaggtcacccgagatcacgcgttccgcggcctcgggctccgtcaccgtgttcacggagcgctggatctcaggctccgactctttgccgcacttcgggcacttgaaaggaatgcgttcagcttcagacatcgtggggttctccgggggaagagggaaatattgttatcggcggccgtcttaaccctggaacgtgtcctgagactcgatctcagaaatcacttcgcgggcccagccggtgtcaatgatatcggtgtccgcctcaacgagtgagagtccgttcttaaacgcgttgtaggactccatatcgaagtcgcaggagcccgcttccttcccgtccttatcgaagaagtagaggtactgcttcccgtccttatcgaggaagaaccgcacggactcaatcccgagatccggcttcatgttggcggcctgcggcatgatgtaggccttcacgagttccacatagcggtcgtcgagcccggctcggagaatgagcgccttttcccgaaggtcgttgaggctcgtgacaaagcggaagacagagccgtaaagctgcttcgcgagcgccggatcctgggctttcgccgcttcaatggattccttcctggccttgcggtactccgccatctctttcgcgcgctcctcgcggtccggcgtcgcgatgtactgaatcatcatcccgtgctccacgtcgtggtagaggagggagtaattcgccatcgtctgatagccgcacttcgggcactggatatagaagagatcaccgtaggcaagcgcctccgcttctttcggattctcagcggtgttcaccgactgccagagcgtgagcggaatttcttccccgcattccgggcacttgaaggtgatgtctttcgtaagcggcatttcagttcctttggttcctttttggggtctgttggtttttctttagggcaatccgttaatactagctttttattcagaggtatgcccagagcagcaccagaacaatctgacccgaaatgatacggagaaacatcgcggaggggtagatgttcgagtacgcgatcacggcagtgctcttttcggagagcgtaccggcgaaggcgagcaccgcggtgttggtggaggtacctgccatcaggccgcagattgtgtggaaattaagatgcatgaatttccgcccgaccaccgcgatcgcgatcatcgggatcacggtgatgacaagcccaagccccatataaaggaacccgatcccttcctcaaacgccttgaagaacgggacgccggccgagagcccgatggacgcgaggtagaaggagacaccccactgccgcagcatcaggttcgcggaattcgtcatataggtgacgaggtggatccggggaccgtagtagctgagaagaatcgcggcgatgagcggaccgcccgcgagcccaagcatcaccggagccggcatcccggggatcgcgatcgggaggttcccaagaatgacgccgaagagtatcccgataaagagcgcgatcacgttcggacggtcaagcgacttcgtctgatttcccatgagatccgcgagacgggcgagcgagttcttcggccccacgcagtagaggctgtcccccatctgaagctggaggctgttatacggaaagaactggacgccggagcgcgtgacgcgggtgatattgacgccatccaaatgcgagagatggagctgctcaatccggaccccgttcatcgcggaccgggtcacgcggatcgactgcgccatgaggggcgaatgttctgtcgcgaggtcgatcgtcgtgtcctcctcaccgaagaaggagacgacagaaagcttagcgtctttgttcgacacaatgcggagcttatccccgaggtgcacctggcagttcgcggtgggggaggtgatgagagcgtcgtgaaggatccggctgcagataaacggccggtcgatgatgtcgcggagttctttaagcgtccggccgtcgagcgccttattcgttaccgtcacgtggtagtagatcggagctggggagaacttcatctgatgctcggcccaggcctcgtcctccgccgcgatatcgacgtggaaggctttcttaaggaacagaatcgcgagaatcatcgcgatgatcgcgacggggtaggcgcaggcgtaccccaccgtgatatcggtgtggttccccatggcgtgcagcgcctcctgcgttgcgccgagacccggcgtgctcgtcaccgcgccgaagtgaacgcccatcatctgcgcgagactgatgtcgcccttaaaaatgaagaagagcccgatcgtgaccgcgagactgaggaggacgccgaaaagcgtgagcccgtttaagccccagccgccgtttcggaaggtggcgaagaacgacggccccacctgcaatccgataaagaatacgaagaggatgaggccgaaattcttgaagaacgcgatgaggtccgggttcacctgaagcccaagccagctgaggatgaggcctaagaagagcacccaggtcgacccaagcgacacgccgaaaaccttcatgcggccaagcgtcagcccgagcgcgatcacaaacgaatacaccaccatcccgtggctgaatcccgctggattgaaaatcaagtcactaagccacgtcataaccgatatcagactccttcagtttcagtagatattcatttccgtaaaaccgcgtattgtaggcgtttcagttttatctgaacgtctgaagatgcccgatccccgcgggttttgtctcggtcggagcagagattgacgcccgctttgatcagaagccaaaggaagcacggtctttacatttcggggcggccgatgctgttcaccctgccgggctgaaatgcgtctctctcagtctgactgaaagcaacgcttttgagaagggggagataagggggagccttcgaaaaaccgcgctcccaagtctatcggtgggcgagagtgaagaaatcgtccttcatgaggcgggtgttctcgaacgacaccgattccaccgtgatcccgtgcttccagaggatgaagctgagcgccaattgatcccgcttcgaatacttctcaatcatcgcccaccactcttccatcaattggatgatttcagggtttttgtggcggcggtagaggatgttggtttcattcagcccgtagttcgcggggaaaccggccgccttttcaagatcaatctcagcgtcgacgagcgcggggtcatcgatcccggccgctttgaccgctgccgcctcctgataaatacaggttctcgcgaagtggcgagggatcagaaggtcatgattctcggtccggatctttttaaagaggaaatccgtgaggatattcacgtttccgtccgcccagaggctctgatcgtaattttgaagaagcgcgtgcgggtgcgtcttatgccagcggctgttccggacggggtcgagtgacgaaaattcgagcggccgcacgtcccacgccccgtaagttgggtttttgagaagggcttcgttatccgtgtaaaggatgtagtcccaggccggatcgaggtattcgtgcgacttcaggtgcgccatgctgtcgtactgccccgtgacgcaggtgtaaaccgcgccttcgcactttgtccgcgcttttttcgcttcccggtaccgctcgacgtgctcttcaatccggtcttcgtaggggttagcggtgaggtgcgtcacccagtcggtgttggaaccgagaaggaagatcacggggttgatgtttccggagacacttcggatcgcgcccacatcaataaaagagcagggattctcgttcagcttccaccccgtgcggtaccagtagtcgagcgcctgagcccgggtgaaatcgtggtggtacgtcttgatgtaccacatgtagtcccaatagcgggacgagccgattttctctttctccagaaactcgagccgcgcgatcgcgtcggactgagcggcagcgagcaccgccttctccgtttcgagcgtcccgattctcgcccggagagtatccaccgtggcagtcagcgcctgtttttcagacgagagggtttcaagcccccgggtgagcgcggtttcacggtcttcgagcgccgttttttcggtttcaaggcgcgaaagctcatccttaagcgtcttctgcgcctcacggaaagcggtctgctgctcggtgagcgccgcaagagctgctttcgcttccgcttcagactgccggacccggtcccgctccgcttccaggctttcgagctgcttcaccatggctttctggattttgaggaacttgaacacggcgtcggtcctttatcgataaacggatgagaaaacggagaagagccgaaaacccacggcccccgtcgttttcctgcccgagtttaaaacagacacggaaatgggggtcttgcgacgatcccggatagggggcagtcgggaaaacgaaacgccgcgtgagactcggtccaacagatgccgtccggatccctatgaatccgcggatatttccgctatacattacgttataagtaacgtttcgttctgcctcggtcccattccccctcgtgtaagatagaccggcaatggattggttcgggagcgagcgaaaagtgtcccggccgcgagaggagcgagatggaaaacgaaaaccagcggggaccccggttccacacgttttacagcaacagctttgaagtgctggagaagatctttttccagatggcggagcgggacaggaagcgcctcgcgaaggatcggaatggatccgcgttccccgggctcttcacgccgatcacggtgattgtgccaagccgtgcggtggggaaccgcctttcccgcgggtacgcttcggggtcgggagaggggatctccgccgggttcaatttcgagctcccgggcgaatggctgacgcctttcctcggagcccaggtcgggagcctcgcgcagaccccggaactcgagtggctcgtctggaaccggctgctcgaggacgattttctgaacgacccccggtcggagaacgtccgtcactatctcaccgatcccctcacggggaacccgagagcggaggatgacaccgcccgcatggaactcgcggtccgggtgtccgccgcgttcgcgaaatacgcgacgtaccgctttgactggatttaccgctggatgacgggcgaagggattgagcatcaccgcgtccccaacttaagagaagagcgggaacgcgtggttttcaatgagcaccccgagaacgccgggtgggaagaaggcctctggcggtggctcgcggaagagagggggacagacgaccgccgctggcacggagccgggcagctgctgcggctcgcgcacaggcttgccgcgccgacactggtatcagacgacaccgcgccccttcatatcttcgggctctcggcgctcccgcccctcatgctccccttcctctatcagcagagttaccaccggagtgtgtcgctctacctcatgaatccgtcccccgaatactggtttgacgcgacgggggcggaggagtcggggtgtccgtggctgagacggaacgccggccagacccgcgcgatcgtggaccgactctggaaattcactcaggcctcgagcgccccggtggtggaggatgacgtggggtccccgaaagaaacggaaccggagacccacgcgatgccctttaaccccgcgaccccgatccaggacgcggagctcctcagttcccccgagcccccctttattgaggcggacctcgcgaggatttcggggagaccgatcgatcagcgggggacgatgctcgaccgtgtgcatgaggcggtgcttcggaacaacacggcgttcctcgaggatctcgatcccgaggagctagccgagtggacccggcccgaagtcgggatgccgtctgtccggatcgcgtccgccccgacgctcgcgcgcgaagtggaagcggcggcggactggatttacgcgctgaaagctgagcacccggaattgacgtcgtccgatttcctcatcgcgacaccggaccttcagaccgcggctccggtctttgacgcggtgttctcttcgctcccgaaaccgatcgcctacgggattgtggggcggtcgctttttgattcctcaggtgccgcccaggcctatatcgcgctcgggaacttcctctgcggaaccgcggatatcaacgcgttttcatctttgatcagcctccccgcgatcgcggaaaactggggctttggcgtcgaagatctcggcacgatccgctcgtggcttgatgacgcggggttccggcttggaatctcggaaactcacatccggaacctctcgaagctgcccgggaaccgctatatcgatgacgggacggggtgcgaggggacgctcatgcgggcgctcgagcgtctcacgctcgccgcgatggcgggggacgaggagtcggagcaggacgcgtggctggatgtccgcccaaagtcgggcggcgggttctcgacccgcgtgaccagccgcactgagctcttccaggcgctggtccgcttcgcggatgggctcgacgccgcggagcgtctcatttttgagctcgaggatcaggggacggatgactggaagccggtgcttcagatgctcctcgatcagttcttcccgaagggaaagagctggtgggccgcgcccgacctcgagagcctccggacgattgtggtgagggaggccgaaaccgcgcgcgacgcggcactccgctccggccgcgcccagccgatccggattccgttccccgtgatgtggggttccgtcacccggcgcttcaagagcggctcggtcccggcgcgcccgaccggagcgatcgcgatttcgtcgatggacgcgctccgcggcattccgttcaaggcgatctgcgtggtggggcttgatgccgcaagcggcttcccgggcacggtgcagctggatgaatttgacctcatggggctcccggggctgaagcgccgcggggaccgtgacagccgccgcgataaccggaacattttctttgacctcattatgtcggcccgcagctggttctcggtcttttacgccgagggaccggagaaggagcggcctctcccgccctctgaagtcgtgacggactttcgggggttcctcgcggatttggaagcgagccgcgcccttgcgaccgggaccgccgcccggaacacctgggacgccgaggtgccgctcgcgcggtactcacgccggaatttcacgaaagacgctgaagcgaagcacctcctcgggtcgagtgtcgacgcttttgacgcgatccgggagggcggaggaaacgcggcctcggtgtcctttgtggggaccggggcggcgcttcccgggtacctggatctcaggcttcccgtctcggatctcggagacttcctctcggccccggaaaatttcgcgatgaaactcgtggggctcaggcgggatgatgattccgggacgacggccgcggcgctcgggttcccgaatgacggtctcagcatgtgggccatgcggaaggacgtgagtgacgccgtggcgcggggcgagacgctcgaaaacttcgtcgccgtccgggagctcgatccggcgtacgggacgaaagcggtccggaaaaccgtgctgccgcaggtgtcggggcagcactaccgggcggcgcggctggtgtcggatctcgcggccggtgaaaccgtcacgcttcgcccgtacgcgatgcggatagatgacccgagagccccaagccctcactggactgtggagtttccggaggaacggctttacaaaacgccttccggccggtgggccgcgattgaaagctttctatcggaaggcgaaaaggtgaaagcgctcctcagagccgcggtgcgcggtgtccggtttcccgacacgctcacggtgcttctcgatatcaagaagctttcagggctgaatgacagcaagttcccgtctgccgtcaccatcctgaagggggcggggcttcttgaaaagggatcggagcctggcggcgtccccgacggcgtcacgcttctttacccgggaaccgcggaacaggcggaactcgtgatccggacctgcgtgatgttctttgacatcatgaagacgaccgcgatgataccgggcgggtcagagttcgagtcttctcccttcttccgcggtgaggagggagcgagagacaaaaagacatcttcagatctccttaacaagctgatcaaagaaatggaaagctatctcagaaccgggagcgacagccgggaggacggcgctgccttcaacgccgcggggaaggcgctcgcgctggagcttttggcccgggccgagcgtctggaaggcaaaccggcttctgatttgggtgaagactcgccggatgaaagcccttatcttcccttcacgacggactatatcgaatgacaaaccctgaattccgctttgatgagactccgatctcgcccctcatgtttattgaggcgagcgcgggaacggggaaaacgtacacgctgcagcggctagtgctgcggttcattgtcgagaagtcgatcccgatcgagtcgttcctgatcgtgacctacaccgaggcagcgaccgccgagctctcaggccgcgtgcgggagattctggggcgggcggtgctcgggctttcgcccgggagcgagtcgaaactcacggaatccgaacggaaagaattcgggaagctccgtgataagtggacacatgacgggatcacgcttgaagaggcgctggatcgcgtccgccggtcgcttgaggaatttgaccgctgcgcgatctacacgatccacagtttctgccgcaagatgctggaatcctgggcgttctcgggcggcaacccctttgagggggagatcggggacgatgcctcggtccaggctgccgcgatcgacgaattcaagcgccggtatctgaatgatccggcgtacgccgatcccgagctcgtgcgccagatcctcgcgttcgatatcggagggttccttcgctggaagcggagccacccggaggcctcggtgacgttcccggacgcggatccggccctgcagccgatgctcgccgacatgagtgagcatctggagtcccagatcgttgagcggaagaaccggctatccctcatgtcgtttgacgacatcctgatccggatggaaaaaacggcgtacgaaagccttgacttccggaaccgcgtgcggtcgctctatcaggcggtgctggtggacgagttccaggacaccgatacgatccagtaccggatcttcaagcgtctctttattgagtctgagaaagaaggaggaccggcctgcttcgcggtcttcgtgggtgacccgaagcagtcgatctatggcttccggggtgcggatatcgggacgtatctgaaggcgcgggacgaagcatccgcggtcctcccgccttataccctctcaaccaactatcggacgacgccggctgaggtcgccgcggtgaacacccttttcacggatcccgccgggaactcacggttcccgggcggcatcggctacagcccggtgaaaagcaccgcgaaccacttcccgctgttcgtccgggaaaagggcaaggtgaagccgctccccgcgtttgaactctggagcggccgctgggtggaagggcccgagacgtcagaagtctggccccgctgcggcagcgcggctgccatgcgggaaacggacggggcgctgatcgcccgccgcatcgcctggctcctcgatccggcgcgtgaagtctatgtcgggaaccgtctcgcggatccgaagaggacgcttgccgaatcccggatccgggcgggcgacatcgcgcttctcgttaagaaccataaagacgcgtacccggtcgaatcgaaactcgcgtctctcgggatccggacactgcataaaaaaccggaagatgttttcgggacggatgaagcgtacgaaatccttgccgtgctccgcgccgccgcgaatccggagagccgcaccgcggtgaattccgcccgggcgacccggatctgcggccggacgcttcccgatcttatgggggacggggcggatgacctttatctcgctgatctcgagaaattccggacgatggcggatgactatcagaagcgggggctctccgccgctttcacgaggctcttctcagcgtttgagacggtgcgtcagaatctcggccgaaccggaggcgaacggagcatcacgaactggacccatatcgcggagctgcttcacgcggcggacgaacggatccggaatctcgaagggctgcttcgctggtatgacctcgaagtccagcgggtgaatggttcgaacccgaagccgtccgctccggacgggcgcgagatccgggtggagagtgatgaatcgcttgttcgggttgtgacgatccactcatcgaaaggccttgaatacccggttgtgttccttccggactcgggcagtctgagcaaccgattgcataggaaaaagccgatatcgtttttccggaatggggagagtgactgggaggcgctcttcaatccgaatgaggaccggcagagtgaagcgaacgcggaagaggataacgaactctaccgcctcgcctatgtggcggcgacccgggcgagcgcgctcctcgttcttccgattctccctaactgcgcgaagaagaagctccagtggaatttcaacatatccgtctggaccgagctcctcgggctgccagggggcaagttgttcaagggaacgaatatgaatgaggcgctcgaaacgttcagcgagcggctgaaaaccgagtcgccattcgcctccggaacgctgaaggacgagatggcggcggaactccggaaggcgacgagtgaagtcgaggatccggagaaaaaggctctgatgcttgccgcggccgatagcattgaaacgctgacgccggaggacacggcaaaggtcgtgaacgtggagttttacgccgcggaccccgagcttccggatccgattgacctccgggcgtcgccggactcggtgacctccgttctcacaccgcacccgctttacccctcgtggcatctcacgagctacacggggcttacgcgcggtctggaacttgagacggacgacctcgcggacgaaggttacgacatcgtgggggacacccgggcgaagaaagacccggggaagaattcccccgcgttcctccggggcgggaaggacaccggtgacgcggtgcatgggctcttggaagccgcggtgaacgccgggctccacctcgaccccgcgttcctcgaagggaagaaagcggggcaggatcggttccacgacctcgtgacccactcgaggttcctcactcttctttctgacaaagtcccggattcggtcggctcggatgaccccgagacccgggacgaggtgagatcggacgcggcggaagcctggctcttcgaccggatccgggggatctttatgtcggggttctcgagcgacggctcggtgtctctaaagaatgcgccgcttgggtgcgcgctccctgaagtcccgttctcgatccacgtccggaaccggcgtctcacggcggaccagttcttcaggacgctggttgccgcgaacgcgaagctcccatctgaccgccagctcccgctcgtcccggtcgcggcggccgacgcgaagcggagtctcgctgggtacctcgaaggccgtatcgacctgatgtttgaggaaaaggactcggggctcttctggctcgcggactggaagactgatcagccaggggacgaacgccgtggggcggcggaggactataacccggcagccctcatgaccctcatgcgggaagagaagtacgggtggcaggcgctgatttatcttgtcgccctcaggcgctatctcggacaggcgtttgatgagacgccggatgaggccctgaaccggatcggaggcatggcttacgtctttatccgcggctacagcgggaagacgccgcctgagactccgccttccatccttctcaaacccgacgcgtcgcttgtgcggctcgcggatacgctgcttttcggagaggactgacaccatggcgcttgataaagaaaccgatctggaagcgggattccggggagaggcgaaactcctcatcgccgcgatgaagcgaaacggggagcttcccgagaacgcggaagcggcgctgctgcaaaccatggccgcgttcgccgcggtggaagagaaccgggagacgagcggctcggtctgcgtgagctttgatgactgggagaaggcgggcgtattgtcagctgacgccctgaccgacattctgacggcatccggcgcggcggtcccgatggaaaccgcgtccgggaacctcgccgcggctccggggacgcctcttttcttcgctcccttcgtgattgatgaaccgggggagcggctctatgttcagcggcggttcgcggaagagatgcgtctcgcgcgcgccgtgatcgactacacaggaagcgcaactgacgacccgggtgaaggagcggaagacgctctggagaaattccgcgaggcggatgagagaaccgggcggatggatccggaccacgatgaagccgtggatctcgcgctccgccatcggctcaccgtcatcacgggcggccccggcaccggaaaaaccacggtggtcgcccggattcttgcttccctcctcgcggataacgagagactcgtgatcgcgggtgccgcgccgaccggaaaggcggcctcaaacctcgatgaatcgatccttggcgcgatccgctggatggagtcggaccccgagctcgaggattacgcggagatgctgtacgaagcgaaaatccaatcaaaaacgctgcaccgcctgattctggaaccggtgaacggaaagaggctctcgcgcgactacccgctccccgcggacgtcctcgtggtggatgagtgttcgatgatggatattgacctcgcggaccggcttttctcgatcctcgatccccgccgcacgcggctcatcctcttaggggacaaggatcagctgtcggccgtggggccgggcgctgtgttctcagacctctcggacggtgacggggcgctctccccctggatcagcgcctttacgtcaagccaccgcttttcgatgacctccaacatctaccgtctctcccgtgcgattacgcctgaggacgggagccgcgcgaaggtctcccggatccttgagattctgaggcagggcgcggtgacggacgccgataacccgatcgtgtggcatgaggagcagaagctgcgttacggcgctctcgtgacggaagaactcgccgcgtggctcgagcgggaattcagtttcctcctcaagcccggtgccgcggatcacttccccgcggttccctcaggcgacccggaggacgataaggcgcttgcggccttctggaccatggcggacgccgttcgggtgctcgccgcgatccacgcaggcacaaacggcacggacgccgtgaacgagtggatggagacccgcgtgaagcgggccgtaaaggccgaccccctcgcggtccactacccggggcgcttcatcatggtgcggcggaacgacaccgcgcttgggctcgcgaatggcgacgtcgcggtggagctgccgggtgaagcgggcggcatcgtcgcgtggtttggaaaccgccgtaaggcgcttcccgccgcgctccttccggaacacgaaaccgcctacgcgatcacgattcataagagccaggggtcttcgtacccgaggcttgccgtaacgcttcccgacggaaacgaaggcgcggggtcccgcgaacttctctacaccgcggtgacccggctctcaaacggccgcgagaagaaaggggaactcacgctcttcgcgactgaaaaagccgtgaagcgcgcggtcatgcatgaggtgaaacgaagcggcggactcgcgtcgcggcttaacgatttcctccttctgaaatacaaagacatagccggctaagcgccctgttttgtgatacagccattttgagagcggaaactatttagccggctcatgaatccaaaggcctaagctgtttttcttagtttagatcaaacccttcaggggaaacccggaagggttttcttttgcggtataccgtagtctgaagcgggcgcgaaagcctcctggtactgatttttgtgtctcggaatttagtatttaccgtgtcgctataaatgtttaattagcgttgaaagatataacagcggttgtcgttttgttttacgggatgaaattcaaatacgatataaatcaattagataatcgtaaacaagggaacataacaaccgggttaacaaggttgtaaaatttagtcaatgtggatattctgtacattacgatctatgtaaattattttaggggttcgatttccgtgtagctttttttggaaaaaagtgagttttccggggaaaacggcggaaggtcggtcgtcttccgactcccggaacgaaacgcggagtccgtcgcgcccctggataggtcgggcagtgaatcaaacgtaccagaggcggtacctgtgttttgtcacgaacagtctccggcgtccgctgtcggaccgtgaggaaaggagaactgtcgatgcctcagtcaaaagaaggaaaacggtatctgcgaagcgctctcgcgcttgccgtggcaggcgctttcgctgccatgcatccggcctgggctgacgtcccggagctggaaacgaattcagacggcgcttatatcaatgtcaccgcgggaacgggtacgggtgagacccagagcgtcacgggggacgcggtatcgattacgaattcggggaatgcccacgcgctgaccctcaccggaaccggaaacaccattctcattgatgggactgagtcagtatcgatcacggcgaattcccaatacgctccgatcgcgaacttctccggaaatccctgggcggaaacaccttcgtcctactccgcgggcggcacgattgatatt

SEQ ID NO: 1365 - DNA, 276 bp, Unknown
  gut microbiota DNA sequence
ggccggtaccatctcgctatccaacaccgcgggcggcaataatcaggtcatcgatatcgagaatggggacagcgacacacccctcaaactcaccgtgaatggcgaaaagaccgcggctcaggtcgtgatgacggggaatgtcctcacgcagaatgagaataccgccgccgaaatcaacctcacggggacggattcgagcctcacgggtcaggtgtacgcgaaggacggtgcggcgattacgctgaatgtcgatccgaaatcggggtcaacggcgac

SEQ ID NO: 1366 - DNA, 2831 bp, Unknown
  gut microbiota DNA sequence
aaattcagacggcgcgtatatcaatgtgaccgcggggacgggtacgggttagacccagagcgtcaccggggacgcggtatcgattacgaattcagggaatgcccacgcgctgaccctcaccggaaccggaaacaccattctcattgatgggactgagtctgtttcgatcacggcgaattcccaatacgccccgatctcgaacttctccggaaatccctgggcggaaacaccttcgtcctactccgcgggcggcacgattgatattgagtcagatggcacagtcacgctctcaaacaccgcgggcggtaataatcaggtcatcgatatcgagaatggggacagcgacacacccctcaaactcaccgtgaatggcgaaaagaccgcggctcaggtcgtgatgacggggaatgtcctcactcagaacgagaataccgctgccgaattcaatctcactgggacggattcgagcctcacggggcaggtgtacgcgaaggacggtgcggcgattacgctgaatgtcgatccgaaaacggggtcaacggcgaccgtcaccggatccggtctcgcggatggcacggattccgtgatgaccgtgaacgcgaataacgccgtgctgaatggcggctactacgcgctcgatggcggcacgaccaccgtgacgctcaccgggaactctgtgctcacggccccggaaaagacgtcgggattctccgctgtccatgggtctctcccgacacgggaagaagaatcgatctttacctgcaccagtagttcctgtgtccgcgtcgttatttctccagctacggaaatcaaagccgttattgggtctatcacagagaaaaatgtcgcgggcggcgcgatgtcggggtcttcattcaccgaaataactgagtctggaacccaggtgaccggcgatttcgtggcggaagacgaatccacgatgaaactttcgattggcggcacgctggatggcgacgtgctgtcgaaagggaattctgaaacaactctgactgtcagcggcacacagactggcggcgtagatgttgaaaatggttcctccctgaccgtcacggtcgatggaactctgaatggcgacgctgaggcgaaccaaaacagcagtaatccttcacattcggatctgacccttacgatcaacggttcgatgaacggtatggtcgaagcctgggattattcaacgggagatgtcaccgtttcaggctcgtgggtcggagaatccacggcttactacaccggcgaaaattccgtctcgatcataggttcaggatcatggacgggtgacggctgggcctattgcggcggaacgtttggtgtttcagtcgcggatggggcaaagtggagcggtgacgcgtattcgacggacgttgaaaacggggtctacgctcatctgacagcggatatcgcgggtacgtgggaaggagacgcgaaatccgattagggcgcagttctgaacgccaatattaaagagaccggtgtctggacgggtgacgcggtgtcgacagactcctatgacgataaagcgtcagaagtccatgtggataacgccggagtttggaatggcgacgccagagcggatggggcgagtctcctcacggtggataacagcgggacctggaccggtgacgcaagcaccgaggataccggttcctcgatgacgattacgagttccggcacctggaacggcagcgcagcagccgcttcaggttctgttatgacaatcgatgtatcaggcgcgtggaccggggacgcgaaagcgtctgactccggtaccacgctcacgattacggattcgggtgtgtggaatggcagcgcgacagctgaatccggagccgcggtgacggtgagcgatctgaaccagtggacgggtgacgcgacggcgaccggatccggctccacgatgggtattacaaataccggggtctggagcgggaacgcttctgcttctgatggcgcttctcttacggtgagtaacctgaaagagtggaccggtgacgcgaaagcgacggggtctggctccacgatggaagtgacggacgccggagtctggaacggaagcgccacggtcgcggattccgccgtgatgacagtcggcgctctgcagacctggaacggaaacgcgacggtcacggactcggggtcgaaactcacggtgtcgctcccgggaacctggaacgggaacgcgtcggtctcagccggcacgatgacactcgcgcttgacggtacctggaccggtgacgcggcggtctcaaacgccggccgcatggatgtggccctcaacggcacgtggaacggcagtgcctcggtcacatcaaacggcatcatgacggttgacatgaatggcacgtggaacgggaacgtttccgcgacgaagggctccgctgtcgccctcaatatcaagggcacgtggaacggcgcggtggttgaggcgtcagaagactccacggtcgatatcacggataacacatcatccaatacggaaaccaagactgaaaccacagcggatacgacagaatccacgtcgtcaacgcatggggttctccggttcgcaaggcttctcgccgtgaataccgcgtcgaacgaccttacggatacgtcagacaccacagaagccacggggaccggcggtgccgcggatgctgaagaggaatccactcccgcacccggtgtcagcgtgaatttcgagggtgacaacgtgagctggaacctcacgggcgattcagaactctctggcctcaatatcggagacggcacgatttcgttcccgactccggcttcgggtgaatcctttacgggcaccacgcttacggtgaacg

SEQ ID NO: 1367 - DNA, 2208 bp, Unknown
  gut microbiota DNA sequence
cacggatacgtcaggacaccacagaggctaccgggaccgatgatgccgcggatgctgaagaggaatccaccctggaacccggtgtcagcgtgaatttcgagggggacaatgtgagctggaacctcacgggggattcagaactctctggcctcaatatcgggggcggcacgatttcgttcccgactccggcttcgggtgaatcctttacgggcaccacgcttacggtgaacggcgactatacggcatcgaacgcgacgctcaatatgtctgcgtcactctctggcgaaaattccgcttctgacctcctcacggtcaccggagccgcgacgggggcgaccacgatcaatgtgacggcgttcccctcaaccggcgaaccgaaggcggacggcgtggaactcgtgtctgtcacgggggattcctcgaacgccacattcacgatgccgaggacgctgaagtccggcgcctatatctattctctcaggaaggcgggttccggctggtacctcatgaacaccgtggagacgcctgaaaccgtgtcgggcaccgtgatcccggggacctctgatctctcggcccacgtgatccgtcccgagatcgcttcctacgcgaataacctctacgccgcgaacacgatgttcgcgatgaagctttcggaccgcctcggcgaaacggcgtactcagacgcgatcaaggcagctggaaagaaagccggaagtttctggatccggaccgcgggcggccacacgcggaacgtgatggcggatggcgaaaacacgacccgcgggaactggggtcttgtgcagctcgggggtgacctgatctcgtggcccacctcagggacgcaccggatgcatgtggggctcatggccggttacgcgcacgaaagcaataagaccggaagcgacacggcggattattcatcgaaaggcaaggtctccgggttctcgggcggtctctacgcgacgtggatgaattcgaacgccaccggggacggcccttatgtcgacgcctggttgcagtaccagcgctttaagaacacgacgtccgtcgggaactatgcggaagaagagtcgtatcactcgaaaggctttaccggaagtctggaagctggctacacgttcgcgctgaaggattggcagaacggcgcggtctcgaacgccacgcgtctccgccttgaaggtcaggtgatccggatgggcgtcagggcggataacgtgatcgacagcacggggacgctcgttcagggcaccggtgccgggaacgtgagaacgaggcttggcgcgacgctcttccatcagttcacgaacaccgcgaagggcaccgccgtgaagccttacctcacgctcaactgggtccacgacacgaagtcgttcggcaccgcgatggatggggtgcatgacacgattgacggcggccggaacttcggcgaagtgaaactcggggtcgaaggccggatcacgaagaacctcaacctctgggcctacacggggtaccagggcggggatcacggctaccggaatgtggaagcgctggttggcgtgaaggcgctcttctgatcggataggtgagagggttccggccgcaccgggactctgaccacatcaaacccgaatcccgcggggattcagtctccgcggggctttcttttcatggagcctgacaccggaacctgtcatcctgaccaatccggaatcggcgggaagtccgcgcttttaaaccgggtgtccctctatttccgtacatcagtaattccgttattcctttttgggtacaaaaacagatcgaataaggacgggattctgtctgaaatgccgggttttcgctctgaatttccgctctacaaatcagcctcacgtttttcaaaatggcacgttactgagatacgaacacccgttcacccggtgctagtccgatccggttaagccccgttttcgacctactttaagtccggacgaaagaatccccgtttacctctcacgatcctggaatttgaatgtcgaggctgcagagaaaagggtggaatccggtaaaaggaggtcattacggcccgaaaaactgtcaaaacggggtgtcttttttcaggcagaggcattaatcctatgaatcgataggaaaaagcgaattctttgggcccaaggtccaataggtatgaaaagagatacgaagaagagaggacccggttgaactgactcccatttttaggacaca

SEQ ID NO: 1368 - DNA, 1161 bp, Unknown
  gut microbiota DNA sequence
tctaaattgggctggaaaaatacgtagtcgatagtttcggttatttttcagcccaatctgggatcatcgtatacaaatcagggaacccaagccgagcggcaatgccatgttgccgcttggtaacctcaagccaatgaccgaccccgttcctgtcaaagataacccgcggcgtggccagtcggtttttcagctcgttaaatgtcatttcgtctgcaagcgccggcatttctttgagtccgctcttggtttcggtatacgttttttgcttcatcaaaacatagagccggttgagaatcgacatggcagcaaagccgatgatgaaccgtccttccatcgttgcctcgccatgagctctcacgacatccaattcaatatttgtcttgccgcccttgaatgatttttcaatgagatcacgaactctgtatgttgtcatggcttcgcgggcagaacactccatcgtggtgacattgcagaagataccgaagtagcgtgtagcagcgtcaaccgcgtcgttatcctgttcaagaggcgtcctgccggggatgccaatccccggcttgaaatatttcatccaccggctcttgagaagaggacacgtttccgagctgtcaccctcgtggttcggccgccaccgaagccactctttctgaaacgattccagttcgtcgtagaaggctgtattttcagtgtgagatttcgagtcactgcgataaacatgaacccagagtttacgattgcccccgtcttcaaaaccggggtggacgggaaccgtccagccccagcaatgttcgcctggaatacgggcggcattactccagaggtgttccatagcggtttcaatggcatcctgaatccagattgaatcagtcttggccgcaacaatgacgcggctgcctgcatcgacaaaccgggccagattggccagagagaaataaccgcgatcaacaaccgccccaaagactctgcggctgtcggtaatctcatcaaaccggaacagcatgtcctgaaccgtagtcacatcggtaatgtttccaggaagcactctgaagagcaccggcatatgcgactcatgaccaaccaggagaatcaatccgagctggcgctggtaccctccttcttttcccatgccgtattgagcataggaaatctcagcggcttcgg

SEQ ID NO: 1369 - DNA, 16576 bp, Unknown
  gut microbiota DNA sequence
tattgcagaacttttgggggaaatagggcgtagacgctagaaaatacgatagtttgcctagaagactgaattcattcacatgactttttaatcgggaccgtggggtcgcttcaggcaaagaaaaagcccggatcgacatccaggcttcaggagaaaaggaagaaaaagcgatcagccgaagagtttcgagaagaatccctttttctcataaggctctgactgataagaggtggtttcatatcccgtcgcatcaatggcggcgcggagttcagtttccggaatctcacgcgctgcgatcacgacgcagttttctttacccttatcggctttcaccttttcgacttcaaatttgtcccgcacggctccggcgacatgcgactcgcacatcgcgcacatcatgcctttgacgccaaccgtcattttgaccatgaatacgctccttatttctgataaacgtaatcatactcatttacaaccacggtcataagcgatcttcggggaattgcgaaagtctcagttgataggaggggtcacgaatgtaaccgcgaaagaaattgcgtcaggcccagacgatacggaagaggcgataggccgaccggcgctgaaccggaacattgctttcactttccgtaaaccagatgttgccccgggaatcaagcgagaaaccgtcggcccaccggatcggggtcggggttttcatttcagagacacggtgcgtcatcagatgaagcgacgcaacacggtcatgacggacatctccgaaatagagcactccggaacgttcaaccatgccggcagacgggaaggcatcccgcgcttctgtcatgatgtagcgggcccggtcatgggagcgaagactgcgatcccgaagaatatgagtcggaatcgaataaatcttggtttcaatgagaggcgtgaagtagagcgtgcggcggtcttctgaaagggcaagcgccgcgatgttcggcatgatcgggtagtaattgccggtcgggagcgcgaggaacttcgcgttcgcgcgggtctgctgaaccgagcgatcaagcccgagccatcctttgccggactccaggtcaagaacaatcagaccgcccgcgccgccgtccgaaataaaagcgatattctgctgggaatccacccggacattcgcgagcgtactgttgctctcaaggagttccgaaggaatccgaaaggtctggagcaccatacggtgcgtgatattgacgcagatgagacgcgccgcgctcttgttaaccggtcttccggcaagctttccggagtccagaatccagagtctgtcagcgtcatcaatgaagatattggaaacgttgacgagagactcgtttacgtcacggggaaggaatgagacggtaacaccgccccgaagctccccgacatggaacgatggaaactcattccgggtaggaaaactcgtaaaaacacggccggttcttgaaaccgccgtgctgttccattggtactccgacgttgccacttcctgaaaaacaggtccccgataagccgctcgcgctccggctttggctgccagaccggaagctaggagaaaagggacaaaaagggcagtacgtcgttgcatgattgaaaccagccggagagaagctccggaacaggcatttccaaagttaagatatattacctactcattataggggcttttaattactgtattcataaattcatttcatttttttagcaaaaggacagtaatgaaaagtcatgattcacggtcaggttaggacagaaacgttgtttttcttctgttttgtcagaaggcaataaaaaatacccccgaaggggtatttttaaaattcaggatggattgtcagagatcccggcgaagcaaatcggtaggggcaggtttcccgaacacgttcaggcgttctgaaacagtgagcgaagggttttcggaagcctctttcctgaaccacctggcgagcttctgtcccgcgtcactcggaaaccgggactgtgggcgcaggagccacatgacttcgggctcaatctgccagtcaggaaggacttcaatcaggtcacctgtctcaagctctgactcgaccagatagcggggaaccgcaataccgatgccgccgccttcaagcacccggtttttgagagccagaacgagaccggaatctcccgcatgacctgtgggaactgtgtaagagcggcccgtcccggtttcatgaagtgtgaccggaagctccatttcccggctggacacccggatcaggtgccgtagcaggtcttccggagactctggagttcccgctttcgcgagataagccggtgccgctacgcagacgagcggtacactgcagatcctcacggcgaccagggtgtcatcagcgggttcccgttcaagcaccacctgataattgaagtacccgccgttctggcccgcattggggtcccggatccgggaattgacccgaacatccgggttcgcttcagcgaacctcgcaatccatttctgaaagagttcggtcccttctgtaatagggaggaacaggttgatttcctggtccgtttcccggataagcgattcttccagtgtgtcaaaccgctctatcagaggaaggatctgctccgcaaacttggctccctcacgggtgacccggatcccggtcggaagccgggtaaagagttttacatgaagctcctgctcgagcttcgcgatttcgcggctcacctgcggcgtgcttttccccaggctctcagccgcctgattgagactctcttcattcaggacttcaaggaaaagtctggtccgggaaagaaaatcactttttgccatgtttcaccttttccgcgagtttctcgagcgccttctgttcctctgaagaaatagcctcaaaccgctttcgtatttcttccgcaagatagaagagcaggtactttgaatgctgtaaggcatggactgtgactgagacctgaagcggcggcataagccagtctgatggaaccggaataagcttcccctcgcggatcagatctttcgtaacgcagtagggcaccccgatcgcgataccggctccagcctgagcgccgcagattgcctgacgcggagtccgtcggacgggaccggttcctagcggaacggaaatggtttcagccccccgggagaaagtaaaccgtcggctgtagcttgagagttcagaaaaaatcaatgtgtgttctgtcaacgcttcagggctctcaggggtaccgtgttccgcgagataaccgggagacgcgacacataccagaggcagcagagagacagggcgtgaacctgttgggatcatgggactcacctgaaaggcaagccccgctggatcatccccggaccccgggggctcaagatcgagtctcagtccggtgttctcaaactcaagctgcgacatcacttcccagaccgcgtctgtctgaatcggttccggaatactcacccggattcgtccgcggactccagacacactttttgccaacccatctctcacggcgagaatatcggtcagcacatcatgcatctggttcatgacccggcggccggctgctgtaggacggagaccggtgctctcacgatagaagagctgcatcctcagacggtcttccagtttcctgagacgccgggacactgtggagggatccacattcatggcgcgcgccggctgcaggtagctcccggactccataacagccataaagagctcccaggtttcgagttcgatatgttccgctgcgcccatagactctcctcaatgctgaatgctctttcataatcccgcgaagatggagtcagctgtcatccacattcaaacaaatattaactggtttgcaaccgcaattgactcggcaaaagacgtagatacctataaagaatctacctacacgggtcattatctagttatttataattatagcaaccgtatgatagtcaagacaaaaatcaaagcctgcccgatatttccatcaaaaccgtgattcataaataaaagtatttagttgatttttatggaattgcattttggttaaaacctaccgactttttggatcattacgaaatccgcacctcaaggcgataatacaaaaggacagggggacatagtccccgtgcaaatcgggaaaaggggtcagccccgattccctgtcttatgttcgtatgaacaaatgaggagagtaatgatggagatgaaccgcagaaaccttctgaagggatcagttgctatgggagctgctggtctcgttgccagcaaggcggctgttgctgcggtccctgcgaagtgggatgaaacggtcgacatcgtcgtgatcggctctggcttcgctggactggctgctgctattgaggctaagaaggctggatcaaacgtcatcgtgctcgagaagatgccgactgccggcggaaactcgatcatcaatggcggcattctgacggctacgggctgcccgcagcagaagatgcaccacattaaggactccgttgaactgctggaacacgacattctgaaggccggcaactacatgaacgatccgaagaaggttcatgaaattgccagccacgcgctctcgaactatgagtggtgcgtgaatgaactgggcgtggaattcctcccggacgccatcggtcaggaaggcggccacagcgttccgcgctatgtgacgacgaagaacggttccggctccggcattgtgctgaaggaactcgagatggtgaaaaagctcggcgtgccgattcgcctccgcacctatgtcgatcacattgtccgcagccaggaaaacgaaggcccggttctcggcgttgtcgttcatgaaggctatcgtttcccgaaggccggcagcggcaagcagaaggccattcgtgcccgcaagggtgtgatcctctgctacggcggcttctctgctgacgtgaagttccgtaccttccaggatccgaagctgaacgctacgcttgatacgacgaatcagccgggcgcaacgtccgaactctggcgtgaaaccagcgccattggctgcctgcaggtccagaacgactggattcagtgcggcccgtggggcaacccgaaggaaaagggcatgggcatcggctgggaatacaaccagaccgctgctgctgagtatggcctctgggtcaatcagaagggcaagcgcttcgtgaatgaactcgcgaaccgcaaggttcgtgctgacgccatcatggtgcagcagcagatgggcaacaagtgctacgccatctgcaatgagcccaatatgaagccgctcgaaaagcagcgtccgggtcacctgcagcgcatgcttgatatgaagatcatcgccaagtacaacacgcttgacgaagccgcgaagtccgttggcattgatcccgccaccctccaggcgactgtgaagcagatggaccaggctgttgctcagtacaaggacaagacggaacccgagtggggcacctacatcaaccacgaccgtcagccgcttgaacagggcccgtggtacatcggtgaactgcagccgaaggttcaccactgcatgggcggtctggtgactgatgaaaagggccgcgtccgcgatgtccgcactgacaaggtgattccgcatctgtgggctgccggagaatctaccggtatggttcacggcgctgtccgccttggttctgtcgccattctggactgcctcgtgaacggccgcatcgttggtgaagatgctggcaagtccgctgcctgatcagcagtacagcgtaagacaatccggtaaataaattctcctgagccggattgatgaaacgccccttctgaattccaaaggggcgttttcttgtccttaaataactgactaagcggtatggagtcagaagattttggaacccatccagaaaacgagaaccatcagaaggcaggcaaaaagcttcttcagcggtttcgtgttgagacgcttggctgccgcggctccgagcggagcggtcagtatcgtggcgcaagcgaccgaggcaagtgacggcagatgaatataacccgcggtccatgcgggcatccccgtgagattccatccggcgtagatatagccaatagttcccgccagagcgattgggaatccaagcgccgcggacgtccctaccgcgtgatgcatttccacgttggaacggaccatgaaaggcactgagataaagccgccgcccgcgcccacaatgccggagagaccgccaatcacggtacccaccgcgaaaagccctggctttccgggaagcgtattggtcggtttcggcttcagatcgaagaacatctttaccgcggagaaacccacgaaaataatgaagatcagcgtgatccagaaggtcggaagatagcttgcgatctgagcgccgagcgccgcgcccacgagaatcccaggggcgataccccagaacacattccaaagcacaaagtgattccggttatgggcccgggcagacgacatcgaggtaaaagaatgatggaaagcgatgtagcgatcgctgcgtgcatcgcatactctgccggcaccccctgcatcgtgagaagcacggaaaggaagggggtaataatcatcccgcccccgattccgagaagccccgcgagaaagcccgatccaataccgagggctatgagagacagaaaaatgaagagcgtcatgctgtgctgacccagagaaaaatacgtcccgcaatacaaaaatgaaggtcgcgaagattttgaatcagagtgacttcgcaaacttttgccgcatggggcgctagcttaagcgaaaaaggcggttcctgtgtgaaattgcaaaaccgtgtttcagaaaaggaattcagaagaagtcagaggctaagataaagaaagtgctttcataacggagaaggaggatctgcccatgacaatcgttatccatccggaagacctatctgaagatgccgcatttgcggttcccgtgcgggaagcgctgcattcggatcctgagatcggtcttcaccttccgaaaaccgaagcgagaatactggccgctttgaaggcgctgaaaatcgatgacgtgcacacgaatattgggggcggggcggtaagcggcattgtggccattctccgcggaaccaaacccgggcggacaattgcgcttcgggcggatactgacgctttgcctattgaggagaaaacaggaaaagactatgcaagccggactccaggccgcatgcatgcctgcggccatgatggtcatacggccgctcttctcactgttctctcctatctgtcacgtcacagggattttgccggcactctgatcgctgtatttcagcctggagaagaaggctttgccgggagccgatacatgatagaggacggactggtcgaaaagttcgggattgaggaattctatgcgctgcatggagatgcatcggtagaccttggtaaggtcgcattcttcccggggtacgccatggcaaacgcagacgcgtttgaaattgttttcgaagggaagggcggtcatggctcgaaacctcagctgacgcatgatccggttgttgcggcaagtgaagctgttcttgcgctgcagacgatcgtttcgaggaatgtgaatcctgatgacgcggcagtggtttccgtctgttccattgaagccggaacacgcgaggggacgagcgttattccccagtccgccacgctccgcggcacagtccggacatatgaaaaggatgtgcaggacctgattgaactccggatgcatgagatcgcgaatggaatcgcggtgatgttcggtatgaacccaacagtgacctataaccggctttaccccgcgctttataacgatcctgaacgcaccgccgaagcgagatccttagcggaaaccgcgctgggtaaagaaaacgtgatcgatttccaccggattcctggcggagaagatttcgcctttatgcttcagaagaggccggggtgcatcttccgtcttgggatccgtgaccgcgatcatcagtccccggttcataccgatacctttgactttaacgatgaggcaattgaaacaggggccgcagttctcctcacggtcgccctgaatcggatggctgaaaacaattaagaaatcattttgttttcactatcttgcctgactgaatgtcaagcaattctctaagcaatgaagaaggctctcagaatgaactgagagccttctttttcatctgaaccgcaccggaatccattggccagaagggggggattcctgcgcagagttcagaaattacggttcaaagacgatgatggccttcggattcttgacccgaggcatgaccgtttcaaagacgcggaaatcgtgattcagcttgtttgagcccaaatacccggtgatcatatcctggccgatcacaaggtccatattctgggttgctgccgcaaggagaatagcggtcttctgaggaaggaccggagtcacaatcacctgaccgccagcaagaaggttcttcacacgttcagcgaccagaacgccggtacccggctcaagtttctgcatagcagcaaagaggtccgggctgacgatgagggtataagtgccataggcgtggttcgaaagcagcttggcaaggccgtttgccacttcagtaaacgcggtatctcccttggtccaatcggagatcttgacatgctccacgcctttcgcggtagtgagaccgtcataacccgctttcggattgccaaggtaaatcagcttatcttccgcagtcgcggtgagcgcggcagacgcggcagcgcgcgagaacgaaatagggcggccagcctgagaggctgattcaagttcgcgccacgaaagcgtgaagtccgaatagagaaggggaatctgctgaactttgcgtgtaccgagtccggcagcattctcgccttcgccataaaaatcttcagaaaccgtaggcgtcggaagagcatctgtcgcaatggcttcggttccagcgccaaggggtccgtaaatatcgaggaatttacgtcccgtcagaacggtctttgcggtcttcacaacgaccgcatcaagttcggtccactgttcagggttcagaattgcaccatctctcatcaggaaatccatttcttattcctcctcaagccttcatgcttccgatagtcagtttggattccgccggggcgtcatcaccttcagcttcagctgtttccgcggtttcttccgtcttaatgccaagcttctcaaacatctcagccacttcagcctgaccgcttgcgaaatgcttggcttcatccggatcaagataacgaagcaacgtcatcagttcaccgatatgagctttttcttcatcacggatatcactgagaacagcaattgccaccgggtcatccgttgcctgaacgtgcgcgtcgtagccataaatagcgtcaagttccccggatatgtcagcgcgaattgcttggatcaattcgccttttgtcattttgcgttcaacattcgccgcaaaaggatcaccaaatgccataactttcctctctttcctcttatccagagggtcgtcagaagatttgtcttccggctgaaaaaactaatcaaaactactcagtcattgagtgacactataaccttaatcgacacatatgacgaggcttaattaataaaaatgggaagttatttatatttttgtatcatataaatccgactttccttaaagcagggaaagtgtcaatatcagctttgctatatagctctaatacgaatgattttctgtcccgtgatcggcttgtcagcacctgcagacacccggtatctggcaacgggaaataaagagtaatgttttacaaaaataaaaatcccatctttccttaaggtttgagatctgcggaatatccagaaaattgagggaaagatccaagttagggattaaaaaaacgattcatgtgattcttatacgtgttactgaatcctcttccggtcacggcctgaggcatagaatgaatgttataaggacgcatctatttccagaacccaaggggcggcagtccagcgcctcagtctcagcttcctaaagaaggcgactgctatgacagaacttaaaagcctgatacttaagactatggcggccgcaggcgctttgctggttatgacgtctccggcctcggcttacgaaccgactgctcgggatttgcagcaggcagcctatgccttcctcatgggcgattgggattaccaatttccaatggaaggcggcgaaacgcacctctttttcaagaacggtgctggaagtacgtattacagccttgtatctctctatccctctgaaagaacaggagtcttctgcgatctgatggaggtggactcctgccggtcgcgttctttgatgtcaactttcacagtggactgtgacaagggaaccatcaaaatgcggaagctctctttgtattcgagggatttcggtatgggaacgccttccgtggaaatcccggttccgcgccgagaccagaaagagcagacacctggacctgacacgatcggagagttcatcgttacgacgaaatgcggcagaacacccgatcagccgcagggtttccgccaggtgaaactcaattcattctgagcttcaaaattcaatttctctttgatgggtaagggcgatctgaaaaatgatcgcccttttcgttttctttctcccgcttctgaaacatctttgcagtggaagggcaaatccggttttctgactttttttctcactttttatgattatgcagatataaaatagtaacattacatatacattaattatggcaaaaactgaagatgaatttaaaagccttcaaaaattagaagacggtaattattcacgtgacgtcttttatttcgattggcgaaattgcacaaaatttcagcagaaattagagctcctggcattaatcgggttttggaacgcgtcattccgccagataaatcggtcctcgccgagccattacaggcaaatcacagtgatttttggtatagatagcggttcgggacagctgccgaacagtcataaacaaaaattcagctataaaaatttcagaaaacagaagataagtctttattttttaaagagttccatattttcttcaaatttcttattcaacataatataagttatgttgaataagaaccctaaaagagagcatctgaccttttcttttaaccagccctccgcagcctgttttcttgctcctggcttgtttccaggtcggtgaaattaccaatgcagaagcacttcctacactttttatttgcatttttgtccatacctgtacattcattggatgttttttatcactttctgtattgattcgctccattttttagggattgagagacttttcagactgattttcccttctaatccagctaaatttcagtttgaattctgatcgatatttattggtatcctttagttaactttaacagcataataatcgcagatatcgatttctatatttaaaaccatagatttaatgcttaattgtcgctatctttaacgacaaaagacgacatatattcacatcaaaagtcaagcacttttttgtaaacattacttgataaacttactataaaaatcaaatttttaaaaaatgtgcttttttagggtttactctaacaaaatagatgcgttaagacttaagtcttatttttgattaatttttgtattataggattctatttttatatcaaagtagaaaaaatgcttttgaattcggctttattgccagtctgagtgtggtcttcagcgatttgaccgattttctgagtgctgggcggaaaaattcaggcttccagtcagcctcaaacgctcaggaaggcattccccttggaaaaaacgcggaaataaaaagccgatctgaacccagatcggctgaacgttgacagaactcgcctgcttccaggaatcaaacctgcagctatctatatatagaggaggatgctcaggggactttcttaaaacggctgaacaaagcgcctgtgacctttctcacaccattctttgaaggcgtcacagattgaaaagcgcatgtaatcagctgttggagaaagctccacccctttctggcggaagaaagaaacagtaagaggcggaagcgggaatctccttgggtcaagcgcttcaagatgacgattcgcgtatcttggatcatccactacacagaggggtgacaggcttaacgcgccggaagttccattcaaagcatcgactgtgtagtaatcgcatagagtgaggcacctcggggcggtcacgccaaaatcatgaagacgccggatcaggaaaacttcgtcctggacggtggtcagccattccgctttactgagtaaagttttgagatccgagtccggagcgaggacaggatgccccttccctgccaccaccccttgcgtcagcgtgcagagaggttcttcaacaagcgacgtgagttcctcatgctgatgacggcctgccatgacgagcgcgaggtccagtcggtcagtcaggatctttggcagacagtctgaaaagaagccgctggaaaaaatcagcttgaccgcgggaaatctcagacggaatctctgaacagccgccgagagaacttcttccggcaatgtcggagtaatcgcaaggcgaagtgaggtcacgcggccggtcgcgcaggccgcaaccgcagctgcggcccgtgtagcgttggacgcgatggattcggcataggggagaagactctgccccgcctcattcagccgcagaccgagcgcgctgcgatcaaaaagcgggcaacccaattcggcttccaactggcttatcgctttggcaaccgccgactgcgtgatgcatagacggtttgccgcacgcctgacaccgccggtttcggccactgccagaaacacttcaatctgtcggatcttcatgacgtccccttcacttcagccttagcggcagttggcagaaaagcactgctttttgcaattatgccggtaaaacttccggtttattgtgtctcaaatctctaccccattgtttttctgtataaagcttcgatttgtgggagttcacttctagtgaacgggtggaaagataatccatcgtgaccgaaaaaacaacgatagaggcgtcctatgattcatatcaggttgatttatgccttattgggttagtccttcatgactactggcaataccccgtcggttatacggagagaggtttcccacggggattgtcacaggggcagtagtcatgctggacggcctgatataaaaacactcaaagggatgtccaattatgaaaaagactcttgttgcgttatgcgttgccgccggtatggtcggaactgcctctgctaccgatgttcagctctatggcctgatcaatacgggtctcggctatgtccacacgcactctgacgtggctggtgttgcgaacaccgacacgctttccatggagaacggtcaggaattcggttcccgctggggcctgcggggtggagagaacctcggcaacggctacaaggtgagcttcgttctcgagtctggttttgaatctgacacgggtctctctgataccaagcagaatggccgccttttcggccgtgaagcttccatcagcgtttccggcggcttcggtactctgtcgtttggccgcctgccgatcttcggcagcgtgctcggtgccaatggcctcttccgcgctattgatccgctcttcgctaactacacctctgcttttggttccggcgctgcgaccgcttcgatgtggacccgcaccgataactcgatttcttaccgcacgccgacctacgccggcctgaccggttatgccatgtattcgttcaagatgaatacggctaccgacaccggcactgaaggcaagagctcttctgaccgttacgcttctctcgctgcccgttatcagaatggcggcctggaaggcattctcgttgctgataccacgatgtacggctcttaccgtaccggcacggacatccccgatcagggctacaccgtgactctcggtggcaactatggcttcaataacggcttcaagatcattgctttcggacagtacttccatgatcaggaactgaccgcccgcgcccgtgctggcgttggttatgcgggtctgaacgccatcactggcggcaagggctacgggtatgttgacggctggggtatcggcgttggcgctcactatccggtcctcggcggtaccgccaaggttgctgtgaactatcgcgatatggataaccagaacaacaccgacttcaaccgctggacggctgctgtcggctatgactatccgctttccaagaggacttccctctacgcaatggctggctactcgtctgaaaaggtcaagaccccgaccggttccgctacgccgactggctgcgaactcgatatgggcatccttcaccgcttctaatcggatgaggattccggtttctgtctgaaaccggatctgcctgaaaagagtcaaagggcgctgcactccgcagcgccctcttttatttccggggcagctatttcagaccgttcacttcctcagcgaatccagtaaaaatccggaacgcaatcgggaggctggtttcatcctggatctcaaaattcggacgatgatgcccatggtggttgcatccatagagcacaaaaccagctttgccgccatgttcaatcactcgtttaataaacaaagcacagtcttcagaaccggccggtgaatgttcccggggaagcaatttagtcccaggaattctattcatgactttttcaataattggatagatctcagggcacggagtcaatgtgactgactcccccgctttaacaactgttgacttcacccgataggccttatcgacgccggcaaaaatatcgtaaacataatcagccataaactggtttactgccattgtttcgccgcgtacttccatctgaagtttcgcgtgagccggaatcacattcctcccctcgcctgcttcgagtttaccgacactgacccgtgtttcaccatggctgtttcttggaattccttgaagcatcaggcttgccgcacacgctgccatcagtgcgctgtgcccaagttctggagagttacccgcatgggccggtgttccttcaatggtgatgtcaaattttgttgaagcaagaaaccccccatccattactgctatctcgccaagcttagcagcaccgccaacatgaccacctaggaaatagtccacatgatcaaccatgcctgaggcagccatagctctagcaccacgaactccctcttctgctggttgaaaaataagtatgaatttcccgcatagcctatctttattgtctacaagccaatgcgctacaccgagcccaacagctgtatggccatcatgtccacaagcatgcatgaaaccaggcctctcagacgcaaaacctaattggttcggaagatgtttgggatctccagtttcccggacgagcacgcagtcaatatcacttctgaaagccgttgttggaccaggcctcccggtatcaaacctagccacagcccccgtgtaaccttctgtcgctttcagaaattcttcagggaccccgtgagcggcagccctcttcatggcatcagataccagaagaggatccctgcccagaacctctgattcacagatattcgccttccctatcgtgaccggaagtcctagttttcttaatcgctgcacgataaaccaagtggtttcaaattccgtccatccctcctctggacgcttatgcagatgacgccttattcccaccatttcttctgtgtaatcgttactcatcactattcctccagctttggaaaaaagcatatttctaagaattctccgttcgtttaatagagtttcgttctttgcttttgacggtcaggtatgcaccaatcgacgcaatccctgtcaatactgcacaaagacaaaggccataagccctctcgaacccccctgaatttttggaccatgagaccagagacggtcctattagcccagctactgcgtaacctagtgctatgacagaaaaattaacgctgttatgtttaggaccatactcgtcagcaactaatcctgggtaagttccaacaaacgctccaaaacaaagcccaactccgattactcctatcagaaattgaagaatgtcccctttcccagagaacaccagacaaaggagcccacatgcagcaactatcagcgatgcaaacaaagttgggattctccccatacggtccgaaatcaatccagaaaggagtcgaccagctgtattagcaagggatacggcggtaaccattccagccgcaataactacagtcgctccaagttggtgttcagcgattggtacaagacttgatatcagcatcagtcccatcaatagcggcatcatgaatacgatttcaagaggtacgaatgtaggagtgcggagcatttctcgccatgtgagatttctggaaggtaaaagttgcttcccattttggtttgtttcgggaaatctgagagttttcaaagcaacagatgcaagtatcaaaacacatccagtgaccaccccgaaaatcaataaggcattgcttattccggctgaaagaatgagaccattacggtgagtgtcaaatgatctttcg

SEQ ID NO: 1370 - DNA, 274 bp, Unknown
  gut microbiota DNA sequence
gttttgaacaaccggtaagcaaaatattgaaagctccctgaatgaggaaacgccgtcgacagctcactcaggcacatcattgttcctaaaagcacaagccccgcaaaaccgtacgccaatatagtacttagagcgccaatactttttaaaggctccgcaatccccaggaaaaatcctgcgccgatcgtcccgccaatactgatcattaaaatgtggcgcggcttcagagaagctttaagctctcgtttatcctcaatattttcgctttcactag

SEQ ID NO: 1371 - DNA, 132488 bp, Unknown
  gut microbiota DNA sequence
gagctggcgctggtaccctccttcttttcccatgccgtattgagcataggaaatctcagcggcttcggaagcgatttccgttgcgtcaaacgacagcatttctttgtctggcagtctcgaaatacgggcgttgaagaagttctttctccagcccgaaacctctgtcagactggcgaagaactcactcatttccttgctggaaatacccctggaataaggcagcagcttattgactgaccaggattcataaaggtaagcagcattggatccggtatgaagccattggtacgcgatagaaagcgccgcattggccttgtctttaccccaaaccgcagccagatcttccgtgagtccgatctcctgggcgattgcgtgataaacgggaaactctgcagccagctttgtttccaaagagcccagctgatccagcgagagtgaaccagatttaacggattcatcgtcctgttcaaccagccgcttaacaccgccgcgcttaaagagccggtggtaatcatcattggaataaaactgattgccgacaacgtagcccagataatttcgtttctcgcatccccgatgcttttccttatcccagtaatacagacgttcaaccacgcggataactccgcgggcagagaccatgactgctttggggttatccgggtaatcagctacattctgaggatcagggagcgagcttttagtaggcatataaacctctctattcatacgtatttattatatcatatgaatacgtatgatgcaagtaaaaaagaactgatttttctatattttcttaagaaaaatcggttcctacggattccctgagactaatttagatgataagtcccagccctgatggactctttctgaaaataatgcccgaaggtcgaaaccgatcttcgggcatttgactgattgaggaatgaatcaatcacttcagaatcggaaggctttccatcatgcgcctcagattccaggcgtcccacggcatatgttctgcaataccgagacccacgaggtccgcggtcttcccgatatcaagaatcagacgggttacctgttcgatcttcagtttcccgggcgcggtatcaaacggaatgccgttcggatcattcgggaactgcgagtagaagaaccggggatcaagcgagtcaatgtcaaaatggatggcaacgtgcttaaggccactggtcttcagccagtcagtcaccgcggtgcttgtctcaaacaccgattccggcgggaacactttcattccgagacgctcaacaatcgcgctttccttcggagagttgaagcggctcgggccgacaatggcaacctgttcgcctgtcagcggcttcttcacctcacgggcgaaaaccggatcaccgtctcccatcagatttccgagaaccatcgcgtgctcccggtcaaagacttcaggcgtggaaatatccggatgcgcgtctacccagataaccgcgaggtccccatcgtacttttcgttcagataggagaacggagcctgatccaaaaggcagtcaccgccgaaaacaacaatacgatccggtgcctcgcggtcaataatctcccgggcggcgtgaagctgcttcagcaccacctcctgctgatagacaccattcgtcttccagccgtgcttcccttcatagggagccacgggaacctcaaactcgggcgtggtctcgctcttcggggcaaggaaggaaaggagccgggctcccaggggatagatctcaccagtcactggcggcaggtcgtaatcgcctccctgccactgaggcatcaggagtcggattgttttcttattttcttcagccattctgatttccttacggaacctataggattcggtaaatagattaatccgatcggataataaccgtgaggcttcagagtaactttttctgaatacagaaaaggctgcgggaaaagcctccgcagccttcggttctgtgcgtctcagaagtttacttggctgggctcgatgccggtgcggaagccggcgcagagcctgctgccacggtacgggtgttatagagattgaagagatcctcgcggaaagtcttctccttacccgcggtgttcgcgacaaacggtacattgtcataaaccgcgtggaggctatccttcggattcgcgagattcgcggaatctttcccccagaagaactttgtcgaaacgctgctcagatcaaatttcttcttgtcatcggaattaatcgcgaaccggacggtcagttcgttcttcgtgacaccggtcgccgcgatcatcgtgtcgatattcttcgacatatcaagctgctgagaagccccgttacccagcgccgcgcggaacgcgtcagccatggcctgcagcacctgaacaccgctcttcgcgtcaaccgcttccttacggatgccggcatagagctccgcgctcggcttaagctcgcaggtaaattccactccgctcttaatctgatcggttgaaaatttcgaccacttggcggtcttctcgacgcagccggaatacttgcccagcgcgtccccaaccttcatggatgttgaaaattcaggcagcgtcccgtccttcaccgtagacaccgggtctgagcagccgctcaggaaaacgagggacaccgcagctgccgctgcaaacttaacgaactgattcatagatccaccttttcgggaaagaccaaaatccggaaccatagggtttcggataatgctgttttgaagcaggcaaagcgtgggccccgctgcctgtctaaaagggagtttctaggggttggggtaaactctcttccgttctttatgggcaagcagcgaggtagaggattcaccttcagcccggtcttaatgaacgaactgaaggcaattgctgttaaaaactttttattgaatccaacaccatcaatttctatatctatagttttacacttattgcccattctccgccacaattaatttgtaatttgcgtcacaaaaacccataaaaacctagaaaacatgctggtttcgtaatcagaatgtccaattttgtacgccacgaagcgtttttatggcttcccgcaggatgggcggaagtgttgtgtttaagcggcagaaattcccatagggtataaatcttccgtaacggtccctcatccgggctttctgttcgaaacctggcgcaatttgccgtaaccttcggaaataaaggtgtttgtttgaataaccacgctttcgatcgtcatttttcttatcgaaaactgctgagatttacgcttccgaccgtcgcgatgatggtgtttctgtcctgctacacgattgtggacggtttctttatcgcgtcctttgtaggtaaggaggcctttgccgcggttaacctggtgttcccggtcctgatggcagccggaacgcctggttttctgctcggcaccggtggttccgcgtttgtcggagcggctcttggacggaaagaaccggaaacggcgaaccggatcttttcgcttctcgccgcgatcgcggtgggggttggactcctgatttccgtcatcctctggcttctgatgcctgagatttcaagggctcttggagcggatgccacgcttctcccggactgtatttcttacggcaggatcattgcggctgctctcccctgcttcatgattcagtcgttcttccagtctttctacattacggccggaaagcccaacctcggattcgcatcaaccattgctgccggggtcacgaatatcgggctcgacgctcattttattattgtttttggctggggtgtcactggtgccgcggccgctaccgcgatcagtgagctgctttgcgggcttttcccactgctttatttctcccgcccaaacacgagcctccttcggtttatccgtccagtctggatgccgcgggttgtgctggatacggtgatcaatggatcttcagaactcatgtccagcatcgcgatgtcggtggttggcatctgctacaacctgcagctcctccgctacgcggggaatgacggcgtcgcggcctacggagccgtgatctacaccgcgttcgttttcgtgtccgcgatgattggtttctctgagggcgtcgccccggcgatcagcttccacttcggagccaaaaactatcgggaagtaaagagtctctttaagaaaagcgtggtgatcctcgctctcacaggcattctgatgacgattctgtccgccgttttcgcggatttcgtcgcgagactctttgatgccggagacgccgggctccacggtctgatcgtgaatgccatgacgatttacggcctctcctaccttctctgctggatcacgattttcggatccgcctttttcacagcgcttggaaacggtccggtgtcagccgctatttccttcacccacacgcttgtccttgaaacgggatgcgtttttctgattccttttcttatcgggatcaacggtatctggttctcgatcagcgtggcggaactgctttcagcgtttgtaacgggcttttttctccttcgcggcaggaaaatatttctttctaactagactgctggagttaacacggcttagatcgaaagttgtgtaattttcgcctccctgttttcttcatacgatttcggcacgcctggtatttcagttgccaggcgcgaaaacgaccaaaggagaaaacatgttcaaacttacgcaggcagctgccggcattgccgccgctctgctcgccttcagcgctcaggccgctgactttcagatccgaggtgtcattgatctcggtcttaccgtaacccatgcgaagcatggcgacacgacgctctccatgacgcctgacaactatatcggttcaggctttgacttccttggggaggagaaactctccggcacgacgaaggtcggttttgccctgcgtaatcgtttcaacccggataccggcgctttccagactcaggacaagcttttcgattacgagtcccagctctacgttgaggggccgtacggtctgatcggtgcgggccgcatgagcccgttctccgcatccgttggtactcagggctggatgtgcccgtttgacgtgtttgaggctggataccaggatgctggtctgcagtccacgcagcagacgacctgggccgcgtacgacaactccctctactacgtcacgccgacctttaagggcttcaaggcaggtctcttctattcgttctcgggagacgcgaaggagaacgcccggcagtcgaagaacaaccgcttctggaacgctgccattcgctattcagatgaaaaactctccgccatggtgtccgcagagggcgacatccgaagcacggattctgatctgaaggacggccgcgtattccgggccgccgcaagctacgacttcggccgattcaaggtgatgggcggctataaccgggccgagcatcagtatcagtacgcctacgcgacctttaacgaaaacctctactccatgaccaccgcgtcaggcgaagcgctgaagaagggtatttcatcagaccaggcctggatcggtatccgcgtgccgatcaatcagtacgaggtcgtcgcccagtatcagtacctggacggcaaggtgaaggacgacggtacgaagttcaagcgccatgtgcttgcgcttggcggttactactacatgtcaaagcgtacgctgatgtacgccgatgtctcacagtcaatcggccgcggcgctctctcctgggataacgacggttcagacacgaattacaccgcgttccaggttggtatgacgcacttcttctgatcccggcgtcattttcattttttctttctcttgcagtgagctgccggggggattgtgtatcctcccggctttttttcagaccgccgggaatttcacctgaggccaggctttcttcgccgccgattcgaacgcgtcacagtgattcagtgcgaaaagcatctgaaccgtgttgacaccgcacttcgtcttgacgaagtggatcagctttgcctcaatatcctcatcgctgtcggcgtcgcacgcccaggcacagatcccggaaagtgtcccgtcaggctcaagctgcttcacgccgcatatccgcttttcgattccggcacagtgccttacccgtttttcccacccgacgaggagccggatcgtgccgggagcgggagcggtcagccacttctcaagcgactcaaaaagaatcggcatctgcttcgcaatgatgagaccgtcagaccgctgatcctgataggcctgataaagcagaatcgcgagctcttcccttcggtacccctccgctacggcgaaagacagaatgtcttcaattgaaggtcggaattcccttgaataggtatgaacaaatgacggtcggaagacgccgttccggtcgcgagggatctgcaccggaagcttttcctttccaacgtgaagttcccgtgggatatagccgttccgatagtttttctttgcgccccgcttgctgttttcccgcttcagaaacgcgaccagttcgctttccacgatggcgctgaccacagtgcccgccagctcaaggtctgactggcggttcgccgcttctgaaacccggccctgatggtaaatcgcggcgaagaactgcttctgggcttcttcactcgtaaggagctgcgtaatcagatcgacggatgtcggaattatgtcgtcattcaggatatggagattcttcatgtcagctgaatcaatggatagaagcgaatgttgtgtaattttatcccggaattttctttgccagaatcatcgggcccctagatcgttcggggaacaattcatatacgcataacggaaataaccaaaggagtcatttttcatgcagtggatgcgcaaagcgatttctatctccgccatcaccctcgcggtggcgatgacggccccggcttttgccgctgactatacggctgatgttgttgtgatcggcgcgggtgcctcaggttccgcagccgccctcgcctcccagcaatccggcgcgaagaccattcttctcgaaaagactcccttccagatgggcgccgggtcgttcgcgggcggtatgtttgccgctgactcttcccagcagaaggctgccggaaagactgttgataagaagtggctctttaatcagtacctcagcctctcgggcggtttccagaacagcctccttgtccgccgcatcattgatgaatccggaaaaacggttgactggctgaacgcgaacggctgccggatgacgcttgtcgacgccggtactggcggcgcgtacgctcacattggaatgcccgcaacgctccatggctatcaggatggcggcgcgaaggctctcgtcgccctgaaggactcgttcctgaaggctggcggccaggcgcttttctctacccgggccactgaactcattaaggacgcaaagggcaatgtgaccggcgtccggattattggcaaggatgggaagcccggcaaggtgacggcaaaggctgttgtgattgcttccggcggcttcggcggcaataaggacatgcttgaacgctacatcggtgtcccctacacgatgggtgaagtgacccagaacacgggtgacggtatccagatggcgtggaaggccggtgccggaaaacgcggtgagaatgtcgcacagtatttctgggaaacgttcagccaggaggaaatgggcaagatcacgaagcaggtgggtgatgattggttcgcgcttacggacttcacgcgttacccgaatctccgcgtgaacaccaatggccgccgcttcagcaacgaaacggacgcgacgctctactcggttcacggcgctgaaatcgcgatgcagccgcatcagacggaattcgtgattgttgactccggaatgctcgataaagtgaaggcaaagggtttcgccgcaatcgaagaacagtacgcgaactggaagggagacaagcgtcagtacttccaggaattcaatgagccgaacgacacggatgaactctccaaggctgaaaacacgccgaaggatgtggccgcgttcctcgataagctggtcggaaataccgcaaccgtttacaaggcaaattccattcctgagctcgcccgtgctatcggcgtcgacgaaaagaacttcgccgcttctgtcgagcagtacaacaaggcctatcacgatgggaaagatccgctcttcttcgctgacggaaagcgcctgattccggttgaaaagggaccgttctacgctgtccgcttcacttcccgactcctcggtacgctgggcggcatccgtgtggatgaccgactccgtgcggtgacctctgatgccacgccgatcaacggtctctgggctgtcggcgctgacgcgggcggcatgtatggcaaggcgtacgtcgacttcgagggcggcacgctcggctttgcctacacctcaggccgtctcgctggcgaagatgccgctcactacgccaagacgcactgaaattaagcagccgatttaaaaggtctggccgtcagtcccaccgcggaaactctctctccgatccgcttaggactgacggccaaatattattcgtaatcagacgattatctgaataaacttcaagcaaaaattctacttttcttcagaaagatccccaataatttcaggttccgcgaagagcgctgtcgcgcctccggtgtgaagaaacaccacggtgctcccttggggcacatttcttttgcggatttcttccatcatgccgtggaacgcctttcctgaatacaccgggtcaaggaatatgccttcagtccgggcaagcagccggatatcgtcgttcgcgaggccaaaaggcttttcgtaacccgcgccgacatagtcgtaaaggatctggaacacatccggtttggtcagcttcttttcaccgagcagcatcaggacatcgtccgccagcagccggacttctttcccatacgtctcaggatctttctttccaaccgcgattccggtgagcacggtccgatcagatccgatcagggtacgtccggcggcaagccccgcgagggttccgccgcttcctgtacaggtgtacacataatccggatgaatccccgccgcctctgtttgttcggcaagttcaatccagcactcggcaaacccgagcgcgccccgaggaagggagccgcccatcggaatgtcatatacccggtgcccttctttctcgagctcattcttccgtttttcgaagagctcctgattcgcttccatggtctcccgcgtactccctcgggattccagaatatggatttccgcgccgagaattctgtcgagcagcatgttcgcgcgaagcgccgcgggattcggctccacaatcgcgccaagccacagcacgggtttcagtccaagttttctagcggcagtcgcggtctgcatcgcgtgattggattctgtcgcgccataggtaaaaacggtgtcgcaccctttccggaccgcgtccgcgagtagaaactcaagctttctcaccttgtttccgccgaaaagcgagacacccgagaagtcttcacgcttcacccaaagattcaccccggtaagctcggacatccgttcaagcttatgaaacggtgtggggtaaaaaccaagaggcaccttcttcacagcatcaatcaaggccctcgcatcttctttggtccgcatgggagtctccttcagagtggttcaacacctttctgtgtcacattagcaccggaagactgaaatgtcgcctgatttttcggtatcggggtgcgattactctttgtttcagcggagattctccgcctgcggtttagcgtcgcggagactcctataattcgcatctcttaaaacgaatacggtatttctcatggcgctctggcttctcttcatcaatattgcggcgttcatcaccttcggtatcgataagtggaaggcggagcagcatatgtggcggatccccgaagccacacttcttgggctcgccgcggccggtggctcaatcggagcgcttgccggcatgcgtttctttcaccacaaaacccgaaagcctctgttcgctttcggcattccggcactccttgtactccaggtcctcgcactggcgggtctgggatttgatcctcaggaattcacgcggattctgcgcttcgcgctccgctcgtattaagccttttcactgtcagaagaaaacggtagcgaatcgcttttacattgcctgttccaccaagtaatatcccggtttaatctatctttttaaagcgttttcaccgggtgccttccatgcttcagttcttctcgaatctcgccgactttatcggtattctggcctttgccttttcggggctgctggcaggaaaggaacggcgtctggatccggtcgggatttttgttctcgcgttcacgacggcgttcggaggcggaattcttcgtgacgtggtgattaataaccgtccattctggttcatcacgcacgaatactacgtgtggctcacgctccttcttacggtcttcgccccggttctcgtcaagcgcttccatcacgatattccttacgccgcgttcatctggcttgacgccattggtctggggttcttttcggcatcaggcaccgcgcttgcctattctttcggagtcccgatgctgagttccacccttctcggtgtcaccacgggcgctgcgggcggcatgctgcgcgatgtcttcatgaataagcttccaatggtcctctcagatcgaaagccctacgcctccgccgctttcctcgggagctggctcacgctcggacttatctatgtcggagtcaattctgttgccgcggtctggataggctcactcttcatctgcggagtccgtatgattacgtggtacgccgattgggaaatcgcctataacagcatgggagtcgtgatcgcacagtcacgcctcgtgcaggcgatcttcaaggccggcccatcaaaacgccgccggaagtcttccaatcgggacacattcccccccgaaaatgagtgagatttaaaaagatgactgaagctcttgatattgcacgccgccgctttacggccaaagtttacgatccggcaaagtccgtgacggacgccgagtggaaggatctgctcgagatcctccgtctcgccccgacctccgtcaactatcagccggtgcagtattttgttgctgaaactgaagaagagcgtgctgccgttgcggctggtgtttctgacttcaatcaggaacgcgtgaccaaagcctcccgcgctatcgtgtgcgctgtgcctttccgtccgtcggaagaacacctgcaggctgtttataagcaggaaatcgctgatggccgctacgccggtcacgaaggcgaagaaaacatggacgccggccgccgctactttgtcggcctgcacgctgtcacctccggtgaattcttcgaatgggcctccaagcaggcttatctcggcatgggttacctgatgttcgccgccgcccagatggggctcgacacgacgatcatggaaggtattcagttccagaagatggacgagaacctggggctcgctgaaaaaggcctcgcctccgtgctcgttctcgcgatcggacaccacgacgaaaaggaagaccgcaacgccacgaagcagaagagccgtctcccgatggacgctgtgattcaccgcatcgcgaagtaatccgcgcaggaacacaaaaaatatggttttacgcgcactgcgcttctaaaatagagggcagtgccggaaaccaataaacggagccgtccggctggactggttccgtttttttatctgagcagtgcgtttcagcttccggcgaagtcttctttctgtcatccgggagattccatcgtatgaaaaccatcgcgctgatcggctgcggagccctgtcccacatttttgcccgcaatctgcttcggattcttcccggtgaattccggattacaggcgtcatggcgcgtcacgccgggagcgcggaatcctttgcggacacactggactgccggttctttaccgagattgatccgcttctcgccctgaagcctgattttgttattgaattcgcgggcggagccgcggtccgggagtatggtgaagcggttctccggtccggtgccaatttcatacccgcttctgtcggcgctctggccgatcctgaattcttcaatacgctgaaaacagccgcgaagaaatcaggggcaaaactttttatcccttctggcgcgatcggcggactggatctcatgcaggtctatgccctgaaaggggacgcccgggtcgaaattgaggatgtcaaagctccgagaagccttgaaggcgctccgggacttaaaggccgtatcccatcagcaaccgcggaagaagttctcttctctggcagtgtccgggacgccattgcggctttcccgaaaaacgtcaatgtcgcggttaccgcctcaatcgccgccgaggctccgaacgcccgggtgactgtgagaagcgtccccgggcttcgcgaaaatattcaccggatcagcctctcaaacggccttatgcatgctgagctttcaatcgcgtcgaagccggatccggcaaaccccaagtcaagcacctctgccgcctggagtgtcatcgcgctgctcaggaatcttgtgtctgacgttgttttcttctgaccgagagcactggaggtcctgaatcttgtcccatacgctgacgcttttcatcattctcagcatcacagtggtcgcttctcccggccccggggtgcttctcacggtgatgacgactctggaggaaggcggccggaagactccatggtgtagcggtgggctggcatgcgggacctttattctcgccatgatcgcggtgggcggactcggggccattctttccgcccgtccctctttatttacttttattcaggcgcttggcgcgctttatcttctctggcttggtgtcaaaagtttccggaagcccgcggttgatctgatgtcactcgcggagaaaagggataaaaaggaaactggcgcttcacccgcctcgatttttacccggggcattctgcttcagcttacgaatcccgtcctcatcatctttttcttctccatgttcccgcagtttatcgaccaggacgggtcgttctgggggcagtctgttctgctctcgctcctctacgcgctgacactcgtcgtgatccacgccgggtacgcggccgccgcggcgtatgcccgccatcttctcacaggaaagcgagggcttctttgggtgaaccggatcggtggattcttcttcctcgcctttggcctctttatgcttgggaaaatcatcgtcagaatcatttccggctgagccagtgtctcagaacggagttttcttctcagcgaacgtaatggtgaagagcgatcccttcccctcttcactttccaccgaaattttccaccccatccgtgtgcagatacgggagaccagcgagagcccgattccgtgaccctgaccatgggaaagttttccccgggtaaagggcaaaaagatcttttccatttcgtccttggggataccgcacccttcgtccttcacggaaaaccgtgtaggttcgagcgtgatcgtgatagtcccacgggtggaatttctcaccgcattccgcacaaggttggaaagcacgcaggaagcgaaactatccgaaagtcggggcggaggtgtaccggaccggtcgtcaatcaccatgcggagccctttctggcgggcatcaggctcatcctcttcctgaatctcacgggcaatatcaggcagatatttgatatcgttatccgcggctttgacatccttatcgcgcgcaagtgcgagaagcacatggatcagtcgctgcattctctctgcggcaagcgtgatttttgccagccgccgctcctgctgcggggtaaggtcgccgatttcccgcatcagctcggctgtcgtggaaacaattgaaaggtgagtacggaattcgtgagagagatcagacgcaaagaatcgttcgctttgcacggtttcatgcaattttctgagcgagttctcacaggtcttcgcgagatagccgacttcatcattcgtcaattcaaccgagagcggccggaattctttttcagacgcacatctctgaacctcgcgcgcgagctttttcaccggacgcacaaccgtgccgccaagcagccaggccatcagaaccgcggccatcaccgcgagcagaccaaaaagaacgaccacagcgacgagactgtgctccacctcttcaaactcagtctgatcggttgtgaggatataggtcacaccgtgacgctgcatcctgaagacataatccgcctgatgatcgtcttcgtactcggtgtacccgtcagggagattctgaaattcgggcggaatgggttccagttttacgccattgacgacgctcggatctgcgtaaagcttcttattcggaagcagccgtggggctttcccatgcgcgatatcactgtcaatatagccgcgaagtgagtagtactggttctcagaaaccagatgatcctccgtgaattcaatcgcgtaggagaaagcggcaatagaaccggccgtgagcacgaaggcaagaataccgatcaccagcatcagcctcgcccgaagcccaagtctcaggaaaaagcgtccgatacgtttcatgcggcttctcctattggttcgccccgcagcagctgctggaatttatttgtcttctgtcgctttggctggtgccgcggccggtgcgatcgaccagccaaatcccggatgcgtcttaatcatcggcgcagcaaagggtttatccactacatttctgagaagccagagatttgagcgaaggctgtctgaatccgggcggtctccgccccagagagctttctcaagttcgtcgcgcggcacgatattcgggctctttgacatcagtacccgaagaatctggaagcacgcggggctcaggtggagtgtttttccctcacgttcagcggatgccgtggaaagatggagcacgaggtcctcaaccttcagatccttaaccactttcccctggctgcgtcggaggattgcttcaacacgggctgaaagctcccggagtgaaaaaggcttgacgagataatcgtccgcgccgctctgaagacctgccacacggtcatcgagttcatcgcgcgcggtgagcatcatgataggaagagaataaccttcgcttcggagtttccggcacacttcaatgccatccatcccggggagcccaaggtcaagcaacacgagatcaaaggctcccgtgtgcacctgagcgactgccataggaccagttgaagcctcctccgctttccagcctttggctctcaggtattccgcgacatttgagcggatatcgtcgttatcatctacaaccagaatgttttcctgcatggctccggtccaatcatttcatccatctaataataccgagttgacagagttcggttaaagcggcgtgagacacaaaaataaagagtctcagttgcaaatgtttcgaattgcaagtattttgaccttcatttgacagtctgcaatgcagactcgtcaccgtctaatatggataggtttctctatgtccgttctgcattcccttaagagctttgtccggtatttcgcgaccggcgctaccggtcttgcgctgattgtcgcggcctggtggctgacggtggacagcttccccttctggaagcttgcggccgcaaccggtacgaatccgctgtcgctcgccggcgtgaagttctacgcctcagcgtggctcggactctttttcctttttgcggctctgggtacgctcctcgccgcgattatggaccggcggctctataaagcgctgctcatcatcctctcgctgatcggcgcgggcggtttcggtttctcgcttctttacggcgcggtgatgtcgcctgacatgctgcgtaacgcttttgcgaccaatgtggctgaaacccgtgacctgatttcccccgggctcattttcacgttcctctgcgccgcgattccgccgattcttctgatctggaagtttccgctgaaacccgcgccgcttaaggatcacgcgatgcggttcctggcggcaattgccctcgttattttcggcattgtttctctgctggctgacttccagggattctcgtacttcatccgcggtcagaagagcgcccgctatctgctgactccagtcaatatcgtttactccgcagtcaaaacacagttttcggatgaggctccgggttcggtcaaagtccggacaatcgtggataaaactccgaccctgtcccctgccccttccgcgactgagcgtcccctcctcgtcgttgtcgtgacgggagaaaccgcccgtgcggcaaattggggactcgatggctatgaccgcgacacgacccctgaactccgcaaggaaggcgtggtgaattacaccgacgcttcttcctgcggtacgagcaccgacgtctctgtcccctgcatgttcagccggattgggcgagaaaactacaaccggaagaagatcattacggaagaaccgcttcccgcggtcctgcagcgcgccggcgtgaagacgctttgggtggataaccagggcggtgataagggagcgagccaggggactccgtacacggaacccgtcaagtctcttccgaaggcgcttcgcgattccgtctgtccgaatggcgaatgctatgacgaaggcatggttccctatattgatcaggagaaactgaagcccggtaccgtaaatgccctcttcttccacatgatgggcagtcacggcccggcgtacgccaagcgctatccggaaaaattcaataagtggggtccggtctgcacgaattctgacctccggtcctgtgacccgaaatcgatccggaacgcttatgacaattcgatcctctacacggatcatgtgctgagttccatgattgacaaactgaaggcgatgaaggacgcggataccgctctgatctacatgtcagaccacggcgaaagccttggcgaaaagggtcttttcctccacggcgctccctatgcgatcgctccgagtgaacagactcatattccgatgatcctttgggtgtcggacggtctccggtcccgccttggcattgcgaaggggtgccttgaagccggcgcgaagaaaccggtttcgcatgacgacatctggagcacggttcttgctctcacccaggtgaagagctcgacctacaacgcgaagcaggacattacggctgcgtgccggaagccgtcgaagtaagcaaaaaccgacacataaaaccttaagttcccctgggtcccggcccaggggtcttctttttgcagggcataactatgaaattttcaaagctccctcccaaaacagaccgcgccaagatcccccgcacggtctgggccctcggattcgtctcgctctttatggatatttcgtctgaaatgatccatgcggttcttccgctcttcatggcggtgggactcggagcctcggccacagcgatcggtatcacggaaggcgcggcggaatccgtcgcgctcatcatgaaggtcttttccggcatgatctctgaccgcttcgggcacacgaaggcactcgtcttcacgggctatgcgctcggcgtgatttcgaaaccgttcttcgccctttctgacaccgtgcttcaggtcttttgctgccggtttgctgaccgaatcggaaaagggatccgcggagcgccccgagacgccctgattgccaccgttacaccgaaagacgtgatgggagcgagttttggacttcgccagtcgctcgattccgccggtgcctttattggcccggctattgcggcgctgctgatgtggctcacgtttgataactaccggctcattttctggtgcgccctgattccgggtctgatctgcctttcactcatcatctttgaagtgaaagcgccggaaccgaagaacgctcaccggacgaacccgatttcccgcgaagctatggggaggctgtcatcggccttctggatgctgatcgcggcagcggctgttttttccctcgcccggttctccaacgcttttatcgtgctccgcgcggctaatgtcggaatttcggccgccatggtgccgctcgtaatggtgctcatgaatgcggtgttcgcgttttcgtcctatcccttcggaaaagccgcggaccggatccacccgatctggctcctgacgctcggcattgttttcctctttgcctcccaggtgactcttgcgctggcgtcatcccctgtctgggttctggctgcggtggtcctctggggtctgcaccttggcgctactcagggcattttctccgttttcattgcgaaactcgcgcctgaagatctccgcggtacggcgttcggtctctataacctcgtgtcaggaggcgctctattgattgccggtatcggggccggcgcgctctgggacacgctcggcgcatcggcgtccttctgggccggtgcctgtttcgccgttctctcccttctattcatgctgattctttcgcgcggcccgctgaaagacgtctgaaatagatagcttttaccccgccctgcctgatatcaggcagggtatttttttgttttctgatacagaaactctcaatttccggcatctcccttcacgtccggagctcttagaatgggcggcacccgcgggcatagaaatcatttttgtagtccaccagaatcagtctgatttcgttcagagagatgcgcagaaacttttccgggactgactatcgttatgtttgagtcacctcaccgggaagaaatcgtttctttcccttacgctcgcttaacagttattactggtatctttgtctcatccagactggcggagatggtgtacccggatcgcgcgaattcatttctggccgccttccctgccaaaaaacagttaaaaggtccttccatgaaacgccgcaaactcgtcttctccgccattgccatccttgctgccgcagcaatcggaggcggcggataccagtactggaagaataaaaaatcgaacgccgcgccgcagcaggccggaggccgccgcggccgccggatgccgacctcggttctgacagttcccgcgaagacccagaatgttgatgtctacatttcagctctcggcacagtgactccggcgcagagcgtcagcgtgatcagccaggtgacaggccgtctcacgcagattttcttcaaggaagggcagtatgtgaagcggggcgctcttctcgccaaagttgatacccgaggatacgaagcaaacaccgagcagtaccgcggtactcttgctcaaagcgaagctcagcttgcgaatgcccgccaggtgctctcccggtatcagaaactttacgcacagaattccatttcaaagcaggattacgacgctcaggccgcccttgtcaaacagtatgaaggcgcggttcgggcggcaaaaggccagatttcaggcgctcagctttcggtgggctatggccgcatcacagcgccgatttctggctttatcggtctccggggtgtggatatcgggaacctcgtaggaccgagcgactcaaccgccatcgcgacgattacccagacccgcccgatttctgtcgaattttccattcctcaggctaacctctctgatgtcgtaacaccgatccgggcggggaaatcgcttcgcgtcgaagtctacgatcagagcggatcaacgctgatcgctcaaagcaccgtaaaaacggtaggaaattccatcgataccacgaccggtacggtgaaactgaaggccgatttcccgaatacggatgacaggcttttcccgaatcagttcgtcaatgtgaaactcatcaccaacgtgcttgaaaatgccatcgttgtgccgactgccgccgttcagacgagtacgaccgggcagtttgtctttacggttgacagtgattctgtcgcccaccggactccgatcaaaatggggcctgacgccggtaatggtttcaccgcgattctttcgggcctcaaggcaggcgaccccgtgattacatccggagtcgattccgccacggatggcggaaaagtcaacgtggtgaagcctgccgcggcaaacgcctctgatggggccacaccgcggcggagaaaaccgtctgccacaggctctgacgccgccgcgtcccccgcagcctccgctcccgcctcgtccgccgcttctcattcctaaagcgctgaaggccaccaaatgaacctttcgcgactctttatttatcgcccgatcgcgacgctccttctgatgatcgcgcttgtcgtcgcgggcgcgcttgggtaccgatacctctccatttcggccctgcccgaagtggattatccggtgatccaggtgacgacacagttcccgggtgccggtcctcaggtgatgacctccggtgtcaccgcgccgcttgagcgccagctcggccagatgtcggggctgaatcagatgtactccgtgacctccggcggcaattcggtgatcacgctgaaattcaatctcgatctcagtctcgatgtggcggaacaggaagttcaggccgccatcaacgcggctgacgccctgctcccaagtgatcttccgaataagccgacctataagaaggtgaatccggcagataccccgattcttaccattgcggcgacttctgacaccctccccctcaccaaggtccaggatctgatcaacacccgcgccgcactgaaactctcccagatttcaggggtaggccttgtgagccttgcgggcggccagcaacaggctgtccgtatccgcgcgaatccggtgaaactcgcctctgccggtctcgcgctttccgatatcaacaccgcgatcaataacgcgaacgtcaatggcagcaagggtggtttcgacgggcccgagcggagtgtcacgattgacgcgaatgaccagctgaagtcgcttgaggactatcagaacctcgtcatcaaatattcgaacggaaacgcgctgcgtctgaaggatgtggcagacgttgaactcgcgccgcaggatgaatatcaggaagcgttcgcgaacggcaaacccgccatcatcatcaatattcagcgtcagcctggcacgaatgttgtgaatatcgcggatgacatcaaggcggcgctcccggccattcaggaatcgctccccggatccgtgaaactcacgattctcgcagaccgtacgcagtcgatccgtgcgtcgatcgatgatgtccagacggaactcctgatcgctataggtctcgtgatcgcggtctcgttcctcttccttcggacgccgaccgcgacgctcattccgagtctcgcggtgccgctctctattgtcggcactttcgccgtgatgtatctcgccggtttctcactcaataacctcacgctgatggcgcttaccatcgcgacaggctttgtgattgacgacgcgatcgtagtggtggaaaacatccagcgccatattgatgacggcatgaaaccgctcgacgcggctcttctgggatcaaaggaaatcggcttcacgattgtgtcgctcaccttctcccttattgccgtgctgattccgcttctcttcatgggggacgtagtcgggcgtctgttccgcgaattctcgatcaccctcgcggtgtcgatcctggtctcgatggtcgtgtcgctcactctcacgccgatgctttccgcttatctgctgaagcatattccggaagagaaacacagccgcatcactcaggatttcggcaaggcctttaactggcttctcaatctctatgagcgctgccttaaggtcgtactgaatcatcaggtcgcgaccctcttcgtggcaatcggcacgctttttgtcaccgctcttctctggatctgggttccgtcgggattcttccctgcgcaggacaccggtttcattcagggcatcacccgggcacctgctgatatttcattctctgaaatggcgaagcgccagggagagcttgcggccctgattcagaaagatcctggcgttcagtccgtgagctcgatcgtcggcgttgacgcggtaaacaacaattccctcaacacgggccgtctccagatcacgctgaaacctttcggagagcgagacagtgcggacgccatcatttcacggctggaagccgacgcggcgaaggtcccaggcattcacctctacgcgatcaagaaccaggatctgaaggtggatgatcaggtcacgccatccgagtaccagctgacgctcaacacgacggaccagtcggaactcgaaaaatgggtcccgatcttcacgcaggcgctttcgaagcgtcctgaactgaaggatgttgtgacgaacctcatggggaacgcccgcatcgcctatgtcgatatcgaccgcgaggccgcggcccgctatggactcaccgcggatgatgtcgatacggcgctttataacgccttcggccagcggcttatctccacgatttacacgcagtcaaaccagtaccgcgtcgtgcttgaggtgggtaagcagttccgggatgatctcaatgccttctcgcatatctatctgaaaagcggtacggcgacgacaaccagttcggcgtcttccgattctgccgcgcctgcgtcgagcaccatggtgccgctcacaagcatcatccgggtgaccgagcagctgggaccctctggctacgcccgtctctcacagactccggctgccacggtttccttcaatatccgggacggctattcgcttgatgacgcaaagaaagcgatcgaagacgtgaagactcagatcaaacttccgatcacgatgaacctgaagccgcaggggtcgctctcagcttacgaaaacgcgaacgccaatacgctctggctcattttcgcggccgtcatggtggtgtacctcgtgctcggcattctctatgaaagctggattcacccggtcaccgtaatttcgactctgccgtccgccgctatcggcgcgctccttgcgctgaagctcaccggaacggaattcacactgatcgcgctgatcggcatcattcttctgatcggcattgtgaagaagaacgccatcatgatgattgacttcgctcttgccggagaacgtgcgggaaagacgccgtttgacgctatttacagcgcctgtctgctgcgtttccgtccgatcatgatgacgaccttcgctgcgctcctaggcaacgttcctctgatgctggcgaccggaagcggcgctgagctgcggcgtccgatgggccttgtgattgtgggcggtctgatcttcagtcagctcctcacgcttttcacgaccccggtgatttacctctggtttgagcggcttgcgtcgcacttcaggaaggggaaggcgcttgagcccgaacctgccctcgaggaggaaaaaccgtgaacatatcgaggctcttcatcctgaggccgatcgcgacgcttctcctctcgatcgccctcaccgtggtcggagcggtttccttccggttcctgccggtcgctccgatccccacggtcgatatgcctgtgatttttgtgcaggcatcgcttgccggcgcgtctcctgaaacaatggccgcaaccgtcgcgacaccgcttgagcgcgcgatggggcagatcgccggcattacggaactgacgtccgtctcatcccagggatcgactcacgtcattatccagttcgatatgtcgcgtgacgtcgatggcgcggcgcgtgacgttcaggctgccatcaatgcggcgcgcagcctccttccctccgcaatgaagacgcttccgacttatcacaaagcgaatccgtcttcagcgccgattatgatgcttgcgatgacgtctgaccggctgaaccgcggtcagctttacgacctcgcaagctctaagctccagcagcgaatcgcccaggtgcagggtgtcggtcaggtttcaatccgaggcggcgctttgccggcagtccgtatcgaactgaagccacggcttcttgaaagctatggaatcccgcttgataccgtccggaaggcggttgacagcgcgacatccaactcccctcgcggcctgctttccggaaaggccagcacctggtggattgaggcgaacggtcagctcacgcaggcgagccagtatcgggacctcatcgtgacctataagaacggggttccggtgagactgaaggacgtcgctaacgtctacgactcgattcaggacaagtactcttccggttacttcaattcgaagccttcggtttccatctccatcacccgtcaggcgggcgcgaacatgctggaaaccatcgattcggtgaaggctctgatgccggaactgaattccatgctgccggcgggaacgaaactcacactcgcgattgaccgctcgagcacggtacgcgacgcgctccaggaaaccgagaagaccctgctcttctctatcctcctcgtgattgtggtggtttacgtgttcctgaggcggggacgcgctacgctgattcccgcagtcgcccttccgatctcactggtcggaacattcagcgcgatgtatttcctcggctacagtctggacgctctctccatgatggcgctcatcatctgtacaggctttgtggtggatgacgcgattgtggtggtggaaaacatcagccgccatatcgaggaagggatgacaccgatgcaggccgcgctgaaaggcagccacgaaatcgggttcacgattctttcaatgacttcgtccctgatcgcggttttcatcccgctgcttctcatgggaggcgttgtcggaaagctcttccgggaattcgcggtgacactttctgtcgcgctcgcgatttcaatgtttgtgtctctcacactgactccgatgctctgcagccgtcttttcaggaaagacgctccgaaacctcatcggatgccgaacggccggcgctggccacaaaccgtggtgcttgactggatctcttccggtctccggaaacttcacacggcctacgtcgcgagtctcggcaccgtgatgaagcacaaactcctcacgatggtgattcttctcctcactatcgtcggaaacgttttcctctacattacgatcgacaaggggctattcccggatcaggataccggcattctcttcggtatggttcgggctgatcagcagacaagctttacgcagatggatccgaagattctgcgtctgagcaaaatgctggaaaaggatcccgccattgagtatgtcctcgcctccacgggcggcggcggattcgggtcgcggaacaccggacagttctttatccggctgaagccgctcgatcagcgtactgagaccgcctcccaggtcgcgaaccggcttttcgcgctttccaagcggatgccaggcacgtcgctctttttgatgccggttcaggatttccggaccggcggccggagcgcgaacgcgacgtatcagtacagtattcagagtgacgatctcgcgacactgcgtcagtggagcacgccgatttataaagcgctctcgaagcttcctgaactcacaagcgtggacagcgacgcggaaaccggcggctctgaagtaaaggtgatcgtggatcgcgaagccgctacccgctacggtctcaatgcccgggaaatcgacactttcctgaatgacgccttcgcgcagcgccagatcgcgacgcagtacaagatgctgaatcagtactacagcgtgattgggctcgacagctcgtggactcaggatccgagcgtcctcacccggctcttcgtggtgacttctgccggaaagcagattccggtctcgaatttcgctcgcattgaatattcgaccacaccgctttcggttgaccatgaggatcagaccgcgacaacgaccattgccttcaatctggctgacggtgtgtcactcgacactgccaaggccgcgattgatcgcacaatggcgtccctcggtctcccggactcggttcacggaagtttcgctgggactgccgccacgttccagaaaaccatggggcagattccgcttctcatcctgaccgcgatcctcgtgatctacattctgctgggcattctgtatgagagctggatccacccgatcacgattctctcgacactgccctccgccggcatcggtgccctgctcctgatggaaatcactggtacgcagttcactgtgatcgcgttcatcggcattcttctccttatcggcattgtgaagaagaacgctattctgatggtggacttcgcgattgccgcggagagagaaggacggaccccggaggaagccattattgaggcctgccgtaagcgtttccgcccgattctgatgacctcctgcgcggcgtttttcggcgcggtgccgcttctccttcagaccggcagcaacgcgtcattccatcggccgctcggcatcgcgatctgcggcggccttgtggtgagtcagattctgacgctctacaccactcctgtggtttatgtttatcttgaccggtttggttcctgggccaaacgactctggagacggttcttcaaagggaacggtacggctgctgccgttaccgccggaaagtaagaggaaagaaacatgaagaagacttttgaaagtacccagaccgctgtacggacaccgctgaaactcgcggcggccgctgcagccgccctcctcatcctttccggatgcgcagtcggcccgaactacacccggccgtccgccgtgagccagatgcccgcgcagttcaaagaggctcctgccggctggaaatcggccacgccgaatgacgccgcccttaagggagactggtggacgatgtatggcgatccggtgctgaacagcctggaatcccaggtcgaaatcaataaccagaacgtcgcgcagtacgcccagaagtacctgcaggctgtcgccctggtcgcgcagtctgacgccgccctttacccgtccattacggccggcgcatccggatcccgcggacggactgccggtgtcaccaagaacaccatcagtttccagggaaatttctcctgggaaccggatctctggggaaaactccgcagggcccggaccgccgatgaagcaagcgccgaagcttccgcagcggatctcgcaaatgcccgtctttccgctcaggcgagcctcgccgaagactattttacgcttcgcgttctggaccgccgcatcgcggtttacggcgaaacgatcaaggtttatcagaagaatgtcgaaactctgaggaatcagtacgaaagcggccagatcgcgaaatccgacctgacgtccgctgagcagtcactctactcggcggaagcatcgcgtgacgccctgaagtcctcccgggctcagtatgaacacgcgatcgcggttctgattggcaaggctccggctgaatttacgctcctgcctcaggacacagcactgccttctgttccggcaattcctgcagccattccgagtacgcttcttgaacggcgtccggatatcgcatccgccgagcgtgcggtcgccgctgccaatgaaaagatcggcatcgcgattgccggctattacccggacatcaccctttccggttccggcggctggagcggcggacatttttcccagctgatcagcgcggatcaccttctctggtcacttggcgcgtcagccgcgcagacaatcttcgacgcaggttccacccgggccaaggtggctcaggcccgcgcggcttatgagcaatctgtcaccgcttaccgtcaaaccgtgctcgaggcgttccagacgacagaagacgcgctctcctcacaggcgagccttgcctctcaggtggcgaacacgcggaaatccctctccgcggcgactgagaccgcttccattctgatgaatcgctataaggccgggatgattgattacaccaatgtttcttcatccgaagccacaaggctttccagcgaacagtcgctgctatcactccagtcgcaggaactcgtgaacagtgtcgaactcatcaaagcgctgggaggcggctggaagggactggatccttcgcataagaccgttaatccgtaataccggtttttaatacgcgcaccgccaggctaaccccctggcggtttatttttgagctatagaaaagcctgtcctccttagagacttttcttttgtatttttctctattcctatttttttaagcggctaaattactctaccttggtatttattagggaccaaaatcaaaaaaattcccggttccccgggaattgtctcctgaaacagccgattcttatcagacaccctgcggtgcgtcgctgccctcacggataatcagaagcggcacattgccttcggccgccacatgcgtcgcaaccgaccccatcacggcgctcttgaagtttgtatagccgtgggaccccatcacgagaagatcgaggtgtttatcttcgacgtaatcagaaatttcgtcccgcgggtcacccgtcagcatcacctcttttactttcaggccattctccttgaagatcggtcttacctggttcatcgcggcttcaaagtcttccttttcaagcctctcgaagtcatcgtctgacagctgcttcccatcgaccgcggcgatcaccgaatacttcgcgtcccgcatatcggacaccacattgattacctggaattccgctcccggtccgaaaagatccggattttcagctacatatcgggccgctgcgaccccgtaggttgaaccgtcaatcgcgataccgaccgtgaggtcttccttcgccggagtctccttccctcggagaatcagcatcggggtcgtagtctgcgcgagaacacccgtggtaacggatcccatgaaaagcccctggtaggcgctgagcccccgggatcccataatgatgaggtcaggctggaactcagcggcctcttcggcaatcgtatcggcggggacaccgaccttcactttttcacgggcggtcatgccctcggacttgaagatcttccggataggaataaacgtgttttcggcctccttcgcggtgtgctcatcgagcgtttcccgcgagaacagtttctgcaggaacgtgggaggagtctgaacgttaaggagctcaatatcgggatgcttcccgaggagagacgcccgggtagccacaaaatcaatcgctgaacggctgtaaacgctgccgtcgaccggaagaagaatcttcataaaaaccccgtttctttgaaaagcgcgaggacgctttccttgattgtgttccattaattatatctttgcttttccggaacgctgtcacgacgcggctttggcaccgccggtattactgtttttgatcctccacaggagttttccagaggatctttggtaatacctcacggagcacaggattcccggaacatcttttttttctctcaggtacaactgttctcacggggcgcggctatgagggccgccaccccttgaagacaaaatcaagttctggagaaatactatgctgaatcgccgttccctcttcgcagcctttgccgctgccgctctttcgactccgttctttgcctccggcgccctcgccgcctcctccacccccgtgatccgtgtcggcatcaacccgggcggacaggctgagatcatggaagtcgtgaagaagaacgccgagaagctgggtctccagatcaaggtgttcgagttcagcgattacatcgctccgaatgtggcgctcgacacgggtgacatcgatatcaacagcttccagcatcagccctaccttgaccgtcagatcaaggatcgtcactacaagattgagagcgtcgcgaagaccattatttcgcctctcgtcttcttcacgaacaagggctacaagagcttcaaggacattccgaatggctccaagatcgctattccgaatgacgccacgaatgaaggccgcgcgcttctgatccttcagaacgcgggctacatcaagctccgcccgggttccggtctccaggcgacgccgctcgatatcgtctcgaacccgaagaagctgaagtttgtcgaaatcgaggctccgcagctgccgcgcgctctgcctgatgtggcagccgccgccgtgaacggcacctatgcccgcccagccggtctctcgatcgcgaagcagggtgttctcgttgagagcgccaaggggtccgcttacgccaatgttctcgtcgtccgtacggctgacaaaaataagccctgggtgaagaccttcatcaaggcctatcaccagccgaacgtgaaggcgttcatcgaaaaacggtttggggattccactttcccagcctggtaagtttctgcagtttgtctctgtcttttctctccgtattttttgagcccggtatttccgggctctttttttctgccctgagacaaatgtaacgaagtgattctcaccccctgcatttctctcaaagacacaaaaaagagcagaaaatagcgccttctgcgggggaagcctgaccgatcagtttcagccatccatacccgcaggctatcactcacttttcaatctccgaggcgctgtccgatttctgtgaaccccgcccaatcggagaaaaagccagaaggacaacattatgtcaatgaccgcctatatggcgctgctcgctgccaatcagccgtggaatctgattctcttcatggtgatcccggtcgcgtgcgcggaaaccctcgtcgccagcgaattctttgttctctacgggaaagccacccacggtgacgctgcccagtcgacgttcgccgagaagctcacgaagtacctcggtttcttcctcgcaatttactacgcctgcctcgtcgtgtatctcctcgtcgcagtcgtaccgggaattgagtggcagggtccgattgacatcctcgcgatcgcgttcttcttcctcgcctttattccggcggttttgattgccctctccggccgtcacctgagcgtgaagcagatcaagcatcacttcatctggctcatcagctacctcatcatcgcccatctcgcgatggtgttcggcatgctcgaccccgctctcacgggcgacgcgcatccgatgcatgaccacgccgccatggaaatgaattccggcgccccgatgcagatggatccctcttccggccgtatggatatgggcccctcgaacgccgccccgatgcagcaggaaccgaatacccaggggtctgacgctgccgcgtcccagcccgcgtctgacggaatgacctcagtctccgcctcttcccccgctgccgccatgccgatggggtcctccccggctgacatgcagggtcacgatcacatgcatatgcagcactgaacggaaggattcacgccgaaggctttcttcggcggaccggcagcataaaggagcggctttcagggtcgctccctttttcttagtcagaatcaggaatccgttcagggacgatcgccgaggcgggctgccgtacggatcaccatgaccggaatcgtggtggcggcgaggacatgggccgcaacggatcccagcaccgcggattcaaacttgttgtatccgtgagaccccatgatgaggaggtcaaactgctgcgatttcgcgaattccgaaatctgttccgaggggttcccgtgaagacagacctccttcaccggcacatccgcttcctggaagatcgggcggatcgaacgcatggcctcatcaaactcctcagcctcaagcttctccgcttcgtcccctgtcagacggccttccgtcatcgcgtaaagcatcgagtagtcgtgacctgaatagtcattcaccaccgtgaagaccgtgaaggggttccctggtccgaagagatggcggtgccgcacaacgtatcgggcagctgcctcactgtaggcggaaccatcaaccgcgagaccgatcttcagttcttttccttccggagccttgtcaccccggagaatcagaatcggcacacgggtgcgggcaagcactccggtcgtcacggagccgagcagcatctcagcgatccggccgcggccgcggcttcccataacgataagatccggatgaatcttatcggcctcttccgcgatcatttccgcgggattgccgaccgcggtccgttcgcggactgaaatccccgccatggatagcttcttacgggcttcgccaaaagccttctcttcagctgcatggtaatacgcgtcgattttttcctgcccgagcagcgcgctccggttggagaagggagtctgaacgttgaaaagcgtgacttcgggattctcgccgaggagcgacgcgcggctcgctacaaaactcaccgcatgttcgctgagcgggctgttatcgactggcaataggatcttcatagtgattcatcctgaggttagatgtacgtactgaaaatgcttctttgattattcttttactctttaatcccgagcttaacgcggccgactccgttttcaacctggattttcgtcccgtagggctcagaaagatctttgaggtggctgaggatcgctttcgcctcgtccccttcggcaagacgggggagtccccgctgtgagcgcgaatctttctggccgagcgtcacggggtgaagcaccagggcccttaccttaccatccgctacgatccactccggaaccacagcttcccagatatggggatccacaatgtaaccccgcgttccgttcgcgcttcgggcatccatataggcaccaaccttggtgtcagccggcatgccttttccgatgaaagcgtcagcgggctgccgcgcgactgtctcggtttcaaagataaagtttccgatactgtagaaaacgggagcgcctttataaatttctaggccccgcagctgatgaggtccatgaccgatcacagccgaggctccggcatccacgcaggcatgagcaaaggtttcgaggaattcaggcggcaccatcgtgtcgcgccccttcatttcgtgggtatgaacagaaaccaccacgatatccgcctgccgcttcgcctcgcggatctcagccactgtccgtttcaggtcgatggcaagcggctccgtctcattccgctccggatccgtttcaagatcattcagctcgaaattcattcctccgagcggcatcgtgccttccgggtacggtgacgaatatccggtcgcgatcagatagtctttctgggcattcacttcggtcacccgggcgagttcctccgccatcgcgaagtgccgggcgttcacatggtgaattgtgcggaaccgaagcggattaagtcccgggcgcccgggcatatccacaccctggcttcccgcaattgctgccgggtcgagtgttgacgccacgccgatcagggccactcttccatgccgggtttcgagatacgccgcgcgggacgcgtcttcaagcgtcctaccggtccctgcgaaaatcatcccgcgctcttcaagatgccggattgtggcggtcaccccaccctcaccgaagtcacccgagtggttattcgcggtgttatagagattgaaaccgaaccgccgcatatcgtcgagcatggagggatcggtcatcgcccaggttccgccggacgctgcggccggggatccctcacaccgatgaaaggtcatctcaagattagcgaaccgcacatcatgatcccggatcagtttgcgaagcttctcaaagccatcgtatccgtcctctgaaatatgacgcgtgatgaaactgtcgccggtcgcgacaaaagttaccttcgccatgctctccatcccttttctcttggaacgcggcggattccgtccggtatccaccatttctgtaatactaccgccgggatgagcggaaagatatcggaattatggtgttttagtgcccggatcccgggcactttcggggggctcctcacccttctttccggccgtgaaccccgcggctttcagttcgttataggcgtccagcgacaggatcaccgcggtccccgcccggcagcctgaaacgagaatcgggcctcccgaaatggcggcctccgcgaccgccagatcggggtgaagcagaaagttttcaaaatcaatgactttcattattttttctcctaaatgccgggctcagccttttttcccgtgaacgagcgttgcctccatctttttcgttgtcacggaggccgcgacaccggacgcgagcaccagcgacatcgcgatcagtgacatcacagtgatcggatcatcgaagataaagtagccgaaaattgcggagaacgggatcgctgaaaaaccaagacaggatgaaaggagcaggttcccgtaggcgtaggcccgggtcataaatatctgacccagtgtcgcgaacacaccgattcccagaatgcagagcgctccatgcgggctcgggtaatggaaaccgtcagaaaacacccactgtccgataaaggaaaagattgcacctagcagcgagaagtagaacacgattctccaggaaggttcacccagcttccccatcttctgcatctgccagtagacgagaagatcaatcgctgagatgaaaaggcagacaagccccggaatgaaatccttttcatgaaattccggccgcagaatcagcgtaataccgatgaaccccacgagaatagacgccaccatcgcccagggagcccgttcgtgcttcatcttcgcgagcacgatgaagttcgcagccataaaaagcggggtcgtatagatcagcgtcatattggtgctgaacgtcatatcgcggagcgtgaagaaccagagcgccacggacagcaccccaagccccgatcggatcatgtgctccctgaaatgctccgtccgcatggacccgtgctgggacgccgcaagaaacatcatgagcaccatgccgaaaaccgaccggtagaacaccagttcgagtgacccgaattcaccggatgaaagcttcacgatcgcggccatcagagaaaaactggcggcggccgcgagtgaccaaagggaggaaagcatgagtgcggactccaaagcggctctgccgcggagcaattggttcgtctgtagcctgagatcttagcgcatcggatacatcagccccgtcagaccgccgcgaaccggacagcggcgtgccgcaccggttttccaaagtcaccggttttcactgtgtaaagtgaatcccggacccagggaaccagacgggcgatagccggcgcgacggacgcctcgtagtgatcccggatcacacctgccacggcatccgcgacccaaggccgggctcccttcttcgtaataatggatgcccgtctgagcagcacggggggcagcatcggaaccgcgttcacctcgcgcgcaaggtccggatactgcgcgagcgtggtcggccgggcaagagcccagccgtgcccctccgcggtgagcttaagaagaagggaattttcgttcacgacgatccgtccgggaaactccagcgcgtgggtgttgaagtaattcacttcgctctgccccgcggcattcattttggagcagcggatgtggggcagaccgcaggtgcgaagcgactcccaggtaatcggggtcccgagcggcgcgagatcaaacggctttgggaaaatgaggatcgacggttcctcaaacaccgggatacggttcaggtcattccggttcgcaaacggatttgagcagaaaagcatatcgagctcgccggcatcgagttccggaagcatcgcgccgcttgaagcgacaacgatccggatatcggagaggcgggatgcaaggcgtgacgcaatcacatccgcgtagctccaggcgacgctttcacagattccgatccttaaagagggcctgattgcgttcgcttcgcgaagcccctgcagaaggtgtgtgagttcggtctgctcagaatcgagaaaacgaagcagcgcatccccctccggggtcagccggatcggccgcgtcgagcggtcgagcagcgtgacgccaagcgccgcttcaagccccgcgacatcgcgggacaccgagggctgacttttccccacacgctttgccgcttctgaaaggctccgggtcgcaccgaaagccacaaaggcccgggcaccgtcctgcaggatcgcgtgcgccggattccgccccggggtatcgtccgtcagtgtctcttccaatagttttcccataacgccctgctccgtttcgactcagagaaacgaccgatatcatttattcataatttaactaattgagaaccagtctcaattatctgcgtgattcaaaaaaccgagtatctgccgctttttcagcattatggagtttttcagactcacctgctgaataatcagatttcattatatgaatactgttttctgagaactaagcctttcgaataatataaaaacagacggcaggaagcgcgaaaaccgtctgacaaaaaaatgacactgcctgagaaattcagtgtcttatataggagagcagaacatgtcaactatcgacctcaaccgtcgcggtctattcaaggccggagccgttatcgccgccgcctctacgatcagcagcattccggttgttgcccaggctgcggaagaacccgaaaagaagatccgccccctcaccggcaagaatctcaaaatgaaagacgtgcttgaccgggcgcgcgaaatgatgatgccccgctgctacgtctgcgcggagtgcaacggccgcggcccctgcatcggccaggtgccaggcttcggcggcatgggcgcgaaccgttccttccaggcgaattacgatgcgcttgctgcaatccgtctgaatggccgcgtggtgcacggggtccatgtgccagatacctcattcgatttctttgggaacaagctttcgatgccggtcatggcggcaccgaccggcggcacaacctataacatgggcggccatctgacagaagccgagttcgttaccgcgatctgcggcggctgcaccgcggccggaacgctcggcgctgtggctgacggtatcggcgaccctctgaatgttttcgaggaacggctccagacactgaagtcaaagggattcaaagcgatcgttggcctgaaaccccgccgccagcaggacatcattgaacgcatgaagatcgctgcgaacgccggtgttgtcgccttcacgatcgacctggattccgccggccgtgcggcccgcgcgacgaagggccagaccgttgagccgaagacccccgagcagctccgtgaactcgtgaaggcgagcccgcttccgctcttcttcaagggcattctcacgaccgatgaagcacttctctgcctcaacgcgggcgctgccggcatcgtggtgtcgaaccacggcggccgggtgcttgcggatgaacccgggaccgcggaagtgcttcccgccatcgctgacgcgattcacggccgctgcatgattcttgtcgacggctgcgtgaagcgcggcactgatgtggaaaaatacattgcccttggcgctgatgcctgcctcgcgggccgtcactttgtccgtggcgctcacggcgcactggcggacggcgttgaactcttcgcgaacacgatccggaatgaactcgctgtcgcgatgacgctgactggcgcggcaaaggtgaaggacatcaaccgcaagatgatccgcatgacgactcccccgccgctcgctttcggcgtcccggcgtaaggtgagacggatgagtctctgattctctcaaagattcagaagagaaatcccgcagaagaaattttctgcgggattttatttttaattcagaatattagaaatatctgattaaagtgttacttaatcttgaaaaccgcgcttgcggagagtgacacatcggattctcccgggctcatttcgacagaatccgcagcgggggccgcttttcggaccgccatcagcatcggggcctgcgggtaatagttcccggtctgaccgccaaaggaaagcttataaaccttcacgccgctcgcgggaatcccgaaagccttcgcgacaaccgcggccttcgcgcccagatccgccatcgcgtcagccatcagatcggagcggttcctgagcgaggcgtcacgcgatacccggaactggagcccggagaattcaaaataccggttcgcggcgtcaatcgcttcaccggcaagcgacggatctttcagcgttacccggacttcctcgcgggatgtccagttgagaatcttcacgccttcccctttcttcgcctgggagtaattggggtttgtgtagaggctccccgactgaagcacagccttccccgcgggaagcgcggcgcggagtgccttcataccctgattgagcaccgtgagcattgccttctgagcgtctttcgccgtagcgccctgacgggtcaccgcgagtgtcagcaccgcttcatcgtttggcaccgtacgggtcacggttgtggagagcgtgatttctgcgtccggcgccgccgtgagatccgcggctgacgcggccgccggcaccgaagccaccgcggcaagactcatcgcgaggaggatttttttcattttcataaaaagaggctccgtagggtttttaatctgtcttttcactatagacccgcaaaacccatctccggaatcgctttttacacactgcaaaaaaatgacgccccgccctctggagagaaaggcggggcgctgattcattcccatgaatcagaggagagagagttaaagcttctcgtcctcaatcgcctggagagcggcgtgacggccggaccaggaggagaaaccaaaggcgttacccgagaaccacaccgggtagctgtcgccatacataccgcccgcgtccatacccgtgcagtagagtcccttcacaggctggttattcttatcgagcgcatgcatgtactgatcgatcttgataccgccgattgaagtgaaggaatatggagcaatcttgatcgcgtagaacgggcccttgttgatcggggtcagccactcgcgttccttatagaaatcacggtcgaagccgaaggctacgttttcgttgtagcgcttcatcgtttcttcaagcgtcgcggcaggaacaccgatctgcttcgcgagttcggcgatcgtcgcaccggacttgaaaccgtcagaccccttcgcgagaacgtccttgatttccttcttcatatcggtcatcttcgcgcccaccggaacaagcacgccgacaccaagatcaaggccttccttctcgaagtaatccaccatattggagtcgataatggcccaggcgtagccgttatgctgctgaccgagggcgttcgcggcgtccgagaactcatgcgtaacggtctcacgcacgaagcgcttaccggaatcattcacccagacgggcttcggctgccaggacatcacccagatgttcccgaggagcttcacgttggaagcgcgcgtaccggggtgcgccatcagagccatattgccaggcactgcgcccgcggcttcagccatcgcgataccgtcaccggtcttattgagcggtacgagaccctgataaaccgccgggtcatagtgaccccaatcgcggactcgctccgggctgttattgaagccgcccgtcgaaatgatcaccgccttcgcgcggatcgtgtaggtgttgccctgattatccgcagccttcacgccgaccacacggccgttttccgtgaggagagacttggcaggagtgctcgtgaggatcgtggcgcccttctcttttgcccagtcgctcagagcttcaatgtatgccgcgccgtgctcggaattcttgtactttccgaccacgtgccaggtgatgcattcggtcggcgacatctgcgtgagatggaacgtgaggttatgcttcgagagccagtcaagattttccgcagacccttcaaggaagcggcgcagcaacgggccgttcgtcttgtaatgggtatagctcatcatgcggttgtatgcggtttccacggcaagcgaataattcttatcacgctgccagcgggtctgaaccgcgccaaggccttccgccatcgaggcgccgccgccaaggaacgcgttcttttcaagaaggatcgctttcttgccggcgtccaccgcctgagtcacagccgccatgccggccgcaccgccgcccaccacaacgatatccgccgtcatctgcttctcagcagcgcctgcggctcccgcaatagcgacaaccgcggccgcgaccgccgtacgggtcagaaaatgcttgagtgtcatctgtttctctccgctatatcgagacgccgtctctccggcgctctctgttcgaaataactagttggagagtaatctgaactccgtatctctgatgttgtctgcccaacaattctaggtataaggatctaaaaattccggattacggggtccggctaccccgggaattgaagttgagccagtcgtactcatcccggaaaagcttcccgtgaagttcgagccagctcccgtcccgcttcgcgaggcctttatccacccactgattgatgattgtgctgactgtcgagcggtttgaggacgtgatgtccgcgatttcgaacgtcgtgagctgaagcggcatcggattccagccgtccggcttcaggggatagtaggaattgatgacagaggacgcgagcgcgatcaggcgcttttccgcgggcagcgtgaagaccgccatcatcccctccatatgggtttcttccttagcgactgcgttgatcgcgtagagcttcatgagttccggatccgcctcgagcgcttcccggtaaacccgccccggaaccaccaggcactctgtcggccgggcgctcgtcgcaaacacattgatgctgaactgcgtcaccgcgtcaagatcacccactacacgatccggcggcagaatgccaaaaacgcggaacttatccttggggtcctgaaaggtaaagaaaaccagccccttagtgatgtagtacacattcccctgggttccgccatgattgaaaatgaaccctttcgggaacttgcgaagcaccccatgctgctcaaaaatcgccttcagctgagggggttccgcatcgtgaacccacggcgcgttcagaaaaacctgcctcacctctctctccttcattaaatcaatttattttttgaagcccgcccatttttatttttttgaggggcagagcccctctattctgaaaaaattattttgaattagcaagttgcaaaaataagtctgaattatcagcgttttccgccgcgagatttgccgccctgtctccaaagtgttgtccggacaacggagaaaccaatttcgtttctctatcttttttaactacgtctgatggcttatagagacaggttatctgtaagcgaagacgccaataaatcaaaggagaacaaattgagaaagtcactcacggccattgcggccttactggcagccgtcggaattccttcagcggcagacgccgcgtcttcggtatcggtgtacgggctgattgattcatacgtgtccgtcaataacgacagcggaaccgtttcttccggacttcacagcggcggttcatccggcaactactttggtttcaagggagaaaaggatctgggagttctgggcggcgctcaggcggtattcaagcttgagtccgggttcctttctgatgacggcacgtacgctcagtcgttcgccgggaacacgagccggctctttcaccgtgaggcctgggtcgggctccggagccccatgttcggccagatttcttttggccgccagtattctcctcactttcttctctggccgatgacagacgcgaacgctctgtcactcgggaccgcagggtcccccttcttctacccgggagcggggaacgctatgggggggtctgaccccacgcaggatgatctcgtgcgggccaataactctattttctgggcttcgccgaatctcggcggcgtgacagtgatggcgtacgcggcgctcggcgaaaacacccgctctgacggcacgaagtcaagcacgcagggaaacatctataacctcggcgtgaattacggaaaaggaccgctcttcgtcatgggcagcgttctgtaccagaaccttggaaactcagctttgggattccggccgacgggacacgacacgtactacgaactcgccgcaagctacgacttcggattcacgaagccatcgatacagtttgagtataaaaatggaaacgatcagccctggagtcaggatttcttccttattcagatcggaaccagcacaccgctcttaggaggccggctggggacgaccgcggcgtattacaagaatcagacgctctcgaaagctgacgcttacagtttcggcatccgctacgactacagcctctcaaaacgcacgatgctttacgcgggcaccgtggcgctgattcaggaggcgaacgcgcagttctcgattgaagacggtcctgacagctcgttccattacccgacaagcgcgccggggaacgatgtgcagcaggtcttcttcggtatccgtcatcagttctgatcgtcttcaggctgacttttaaggccgcactgactgtgctcagcgcggcctttttccgtctttcccccatcatttccccggaagaacgattcccagccgcaaagaaatcacgggatccgccgtttcaagggtaacttcctagactgtgtgccacaaaaaaaacatcaaaaagggatgacaaatcagctttttcagttaaaattgagtcttcattacagcagaggaagtaaaggaactcagtttctacagaacccaacctggtatccacttcagaaatacttgaatcggataggaaggtggagcacctgtggttctggttttcagactatggcaaaggaagaccttattgaaatggccgggcacgtgcttgaagtgctgcccgattcccgttatcgcgtgaagcttgaaaacggtcacgaactgatcgcctacacgagcggcaagatgcgcaagaaccacatccgcattctggccggcgacaagatttcgcttgaactctcgccctatgacctgtcgaagggccgcattaccttccgctatatcgaaggccgctctccgacttccgcggctcctggcgctgctcacggcaacaacaaccgccgccgccactaagccgatggctctccggtgagttctgcccggaatgcaaaaaccctctgtctgaaggattgtccttcgcgcagagggtttttcttatgaggcgactcaacgcccggcgctcagatttcggcgatgatccgcagcagctccgcgtgcgtcgcgatcacatgccaggattccttcccctcaggcttcacgaagccatcgcgtccaagccgcctcatgaaaacaacgagcgggctccagaagccctgcatgtcgtaaaagtacgtgggcttatggtgatagccgagcgtatagccggcgagcgtggagaaggcctcgtcaagcgtcccgatcccgccggggagcacaatcaggatatccgatcgttccaccatgacccgcttccgctcggacaggtcatcaacgagaatcttctcgtcaagcgccgtatgcgcgcggccccgctcctcaaggagtttcggcaccacaccgaccaggcggcctcccgtctcgtgagccgcgtcagccacagccttcatgagaccgaaatccgttccgccatacaccatcgtctttccggcttttccgatcgcctcaccgatcgccctgccttcattcaggtactttggatcgatctgagaggaagacgagcagaaaatcccgatattcttcatagctgcaccctggattgaccgaacggaatccgtccgggtcatgaaaatgtcaacgattcaatatacggcaaacacccggctaagcctatacgcctatcaggttattttctgtagtgcagatcagcctttagccggattgaatcagacagaggaggaccggctcacgcctgtttcccggcgctgtgtacctcctgatggttttcagtctatcccggttcatcagaggatccgcaaaaatatctttttaaactgccgcccggcggctgaataaataagaaaaaaccccggatgcctgaggcatccggggctgaatcttggtgggcgctaagaggctcgaactcctgacccacgccgtgtaaaggcattgctctaccaactgagctaagcgccctcttcagaaaaaccgggatctataaagactgctcagtttttccgagaatggaggattattttacagcatccttcagagctttgccagggcggaacttcggcagcgtggcagcagcaatcgtgatttccttgccggtcgccgggttacggcccttgcgggcttcgcgcttagcggtcgtgaaggtaccaaaacccacgagggcgacttcgtcacccttagccagggcgtcagcaacaccagccgtgaaagcgtcaacggcaagagcagccttggctttggagatatcagccttttcagcgatgagctcaacgagttcagacttattcatatcgaatttccttcttcattgttaccccgtggggggcatgaacttcttctaatctcccctgtgtgcgggggatagagcgattttagccgcagagcgtggaaaatcaaaacaatttaggaatttccgtataaaaaaattgacgggggcaaatttctttgatccccgtcaattaaatcaagcccgaatctgaggcttagtgagcaacgatctcaggcaggccgggctgttcagcgggtacagccgcgagcgactcagccagatcttccttcggaagcggctccggcatacggacaagagcctgctccagaacctgctcaatccagcggaccggaacgatctcaagaccgtccttcacgttctgcggaatctcagcgagatccttcacgttgtcctccggaatcatcaccttcttgatgccgccgcggagagccgcgaggagcttctccttcagaccgccgatctcgaggatctcaccgcggagggtgatttcgcccgtcatcgcgacatcagcgcggaccggaatccgggtgagcgcggaaacaatcgccgtcgtgatggcgccgcccgcggacggaccatccttcggcgtcgcgccttccgggaagtggaggtgcagatcggtcttcgagaagacgtcctgcttgatgccgagagactcagcgcgctcacgcaccaccgagcgggccgcttccacggattccttcatcacgtcgccgaggctgcccgtacgctggaccatgcccttgcccgggaagaccgcggcttcgatcgaaaggagatcgcctccgacctctgtccacgcgagaccgttcacctgaccgatctggggcttcttcgccgccacaccgaacgtgaacttgcgaacacccaggtaactgccgatgttctcttcattcaccgtaacggtttcagtcttcgcgctcttcttcgtcccttccttcatcatgttcgccatgacaaccttgcggcagatcttgctgatttcgcgctcaagtccgcggacaccggcttcacgggtgtagtagcggatgatcgcgacgatcgccgagcggtcgatcacgagctcacccttcttcacgccgttaagacgcatctgcttcggcacgaggtgctcttccgcaatgtgaaccttttcctcttcggtgtagcccgagaggctgatcacttccatacggtcaaggagcgccggcggaatgttgtaggagttcgaggtcgcgacaaagagcacgtccgacagatcgaacggcacttcagcgtagtgatcctcaaacgtgctgttctgctcagggtcgagcacctcaagcagcgcgctcgccgggtcaccgcggtaatccatgcccatcttgtccacttcgtcaagcaggaagagcggattgcggacaccgaccttgatcaggttctgcaggatcttgcccggcatcgagccgacgtaggtccggcgatgaccgcggatttccgcttcatcatgcacgccgccgagagcgagacgcgtgaacttgcggccggttgcgcgggcgatcgattcgccaagcgacgtcttgccgacacccggcgcgccgacgaggcagagaatcggggccttcaccttcgtgacacggccctgaaccgccaggtactcaaggatacgttccttcaccttctcgagaccgtagtgatcctcgtcgagaatcttcttcgccttcgggatattggaggagacacgggtcttcttgctccaggggagcgagatcagcgtatcgagatacgcgcggaccacggtcgcttctgcggacatcgggctcatctgacggagcttattcagttcctcaagcgccttatccttcgcttccgggctcatccgggcggcttcgatcttcttctcgtagtcgtccgtcacgtcgttcccgtcatccccctgcccgagttccttctgaatggccttcatctgctcattcagatagtagtctcgctggttcttctccatctgctgcttcacacggccgtgaatccgcttctccatcttctggatttcggtttcgccgccaaggaggctgaggagttcggtaagcgtgctgttcaggtcatcagactcgagcagcttctgcttcgcggccaccgcgaccgggagctgctgcaccacgatatcggcgagccgcgtagcgtctgtcgtctggttgacactgcgcgcgagatcctccggaatcttcggattcagcttcgcgtaggccgtgaaagactcgatggtcgcgcggcgcagcgcttccgtttccgccggatccgattccttcatcgggcgcggcgacacagaggccgtgagatacccgtccacttcacgcaccgcgctcacatcgacgcgttccttgccttcgaccagaatcttcaccgtctgatccgggagtctcagcatctgaagaatggtgcccacgcagccgaccttaaacagatcctgtccggtcggttcatcgatctggccgtcccgctgggcgacaagaaggatcttcttaccctggttcatcgcaatttccgcagcccggatcgatttcgcccggcccatgaaaagggtgatcaccatacgcgggaacaccacgatgtcacgcagcggaaggagcgggaacacttcaagagcggtgttttgcgttttttctgtcattcaattcgttccaaaaaatgtgaaactgcccgtcagaaaacaatcttccggccgggtgtgtcccggctgacggcagtcctaaaaccatatatgggggcggttaacgcagtttcaagggtattcgagaaacggaagcggcagtcccggacattccgggttccgccgcagctttgaattaattctagcgaagtcaaaaaaaacgctcgagcctttttggacccgagcgtttctcagtactctgaagcagaggaaactatcaggcttccgtcttccgaagcacgagttcaggggcttctccctttgtcacgcagttttctcccaccacgaccttttccacatccttacgggacgggatttcaaacatcgtgtcaagcagaatcccctccacaatggagcggagtccgcgggcaccggtcttgcgggcgatggcgcgcttcgcgatcgcggaaagcgcttccttcgtgaactcaagcttcacgccttcatcatcgaagagcacctgatactgcttgagaagcgcgttcttcggttccgtgagaatcgaaatgagcgccgcctcatcgagttcggaaagcaccgtgatcacggggagacggccgacgagttccggaatcaggccgtatcggacaagatcctctgcctcaacgttccggaggagcttcgaaagcggctcttccttcttgctcttcacctcagcgccaaacccaatgccgctcttctcggtacggttccggaccactttctcgagcccatcaaacgcgccgccgcagataaagaggatgtttgtcgtatctacggcaatcatctgctttccggggttcttccggccgccctgcgcggggacattcgcgaccgtcccctcgacgagcttcagaagcgcctgctgcacgccctcacccgacacgtcacgggtgatcgaggggttctcgctcttacgggcgatcttatcgatttcgtccaggtaaacgataccggtttccgcgcgcttcacgtcgccgtcagacgcctggaggagcttcgaaataatgttctcaacgtcctcacccacatagcccgcttcggtaagcgtcgtcgcgtcagcgatcgcgaacggcacatcaagcgctttcgcgagcgtctgcgcgaggagcgtctttccggagccggtcggcccgatgagaagaatgttgctcttctgcagctccacctcgcggtcttccttcgcctggtggcggagacgcacgtagtgattgtgaacggcaacggcgagagtcttcttcgcgcgttcctggccgatcacatagtcattcaggtgctcaaaaatctctttcggagccgggatcggcttctcagcggcagccgcttcgacttccgcctcttccacggaaggcgccgccgccttttcccccgtttcatccgcgaggagcgaggcgagctgtctcgtgcagtcatcgcagacgaaaaccccgttgccgccgaagaggtgcttcacctccccttccccacggccgcagaatacgcatttccgggtctcgtgatctgaacggctatctgtcatgaaggaactccaaaagtaaaaatagtgaattctgtccggctcagacgccggaattgaaaagcccggagggatgattgaacccgccgggctttcctgctgatccataaaagagaagagttctgagaggcggcctgaggcagtgcccctcatcttcctttctggactcaggcttagtctgtttctccgcggcgaacgaagatatggtcaatcaggccatacgccttcgcttccttcggattcatgaagttatcccggtccgtatcgcgctggatcgtttcgatcggctgaccggtacgatcggcaaggatctgattcagctgcttcttgaggtacaggatttcgttcgcctggatctcaatatcgctcgccatgccctgggaaccgccggacggctgatggatcatgatccgggagttcgggagcgcgtagcgcttgcccttcgtgccggcggcaagaaggaaagcacccatgctcgctgccattccgaagcagatcgtgttcacatcgggcttgatgaactgaatcgtatcgtagatcccgaggccggcgtaaacgctgcccccggggctatcgatatagagcgagatgtccttatcgggattctcgctctcgaggaacaggagctgcgcaacgacgaggttcgccgattcatcggtcacggggcccgtcaggaaaatcacccgatcccgaagcagtcgggaatagatatcgaacgcgcgctcaccgcgcccgctctgctctaccaccatgggcacgagacccatgctgtttgcgtcaaacttagtcatgctgctccttcttcactaaaacagagaaaccgcggtccttccggatcaggcttcagccttgcggcccatgagaacgtcgaagtcgatcgcttcgtcggaggtcttgcccttgccgagcacgaagtcaacgaggttgttctcaatcacggcagcggagagttcagcgtaacggttctggtccttcaggtaccattccgtcacttcttcaggcttctcgtaggctgaggccatttcagcggcaaacgtcttaacctgttccggttccgccttgatcttattatcagcgatcagcttggaaacgaggaggccgaggcgaacgcggcgttcagcctggggagcgaagacctgcgggtcaaggttcggcatgttcttcacatcgagaccacgggcagcgagctgctcacggtattcgttgccgatacgggcggcttcgtcacggaccatcacgaccggcagagcgaacttggcctgctcgatcagggcgttgaagacaccttccttcgtacgggcggtcaggcgggacttcacttcgcgcttcaggttggtctcgacttccttcttcagctgatcaacgctcttgatgccgagggattcagcgaacttatcgtcgagggcggggagcacgggctcctgaaccttcttcacggtgagggtgaagtcggcgatcttgccggcgaggttcttcgcaccgtagtcaaccgggaacgtgagcttgaattccttcgtctcgccagccttgagaccggtggcggcagcgtcaaactcggggagcatctggccggcgccgacaatgaaggcgtagtccttagcggtgccgccgtcgaaagcgacgccgtcgatcttgccttcgaagtcaaccgtcacttcgtcgtccttctgggaagcgcgttcgacatccttataggtagcgcgctgcttcagcatgacgttcagcgtgtcggtcacttccttatcggtgacttcacagacgaaacgatggagctcgaggttagcgaaatcaggcgtttcgacctcggggatcacttcgaagtgagcctcgaacttgagatcagacttgccgtcagtcggcatgtccttcgcggggaccacttcaggggtgccggcgatgcggaagccgccttcagtgatcgccttctcaacagccttgccgatttcttcgttcagggcttcgctgtaggcttcctgaccgtagaggctgcgcacgatgttcatcgggacgtggccgcggcggaaaccgtcaacgcgggccttcttggcatagcccttcaggcgggattcggtgccggcggagacggcatcctgggagacagtgacctcaacggaacgcgcgagcgggttcacgggggcggtgagggagctatcggtaacctcggaagacttggtggccttaacctcggtttcttcattctttacttcttcagctttttcagtcattttgcttactttaaaaaggggccggctccagaacggatacggcctaaaaattccggcgggagacggcagcaccgcgacacagcactgcccatctcgggactgaccgcggaaacggggaacaaaagggctcacccgcttcaaggcccggtaaactgccgattatatttcaagttgccgggccttgctcccgattccggcgcccggctcacaaaacctcacacctttaggcgtgaagcctcgcctccctcttccccctattaggcatttctgaaacacgggaaaccgctgataattggatcgctttgcgcttcgcgaagtctcttatatcaggagaagaatcgatgcttgctctgcttctcaatccggaagacacggtggccaccgcgctttctgacgcagcggccggagataccgctgaaatcatcctgggccgcgaaaaaaccggccgcctagtcacagccctggacgcggtccccttcggattcaagattgcggtgtcaccgatgaaaaaaggcagcctcgtgatcaagtacggtctgccgattggcgttgcgagccgcgacatcgctccgggttcactcgtccatattcataacattgagggggcccgcggccggggtgacctgaaggagaacgccaaatgactaatgagtttctggggttcatgcgccccgatgggcatgccggcgcgagaaacacgcttctcattcttccgatcaaccggtcgctcaatttcatcgcgaccaatgtctgtcggatgatccggggcgcggttcactttgaaattccggcagaaacgggacgccccgcgaaagaccgagaaacgattgcccgtgtgatggaaggtcttatccggaatccgaatgtcggcgggacactgctcctcgcggtgaaaccgtccggcgaaagcgcctaccgcaatatgagcgacagccgctttgctgccgcggcagagcagtccggtaaacccttccggatcctttacctcacagagtccggcggaagctatggccttctcggtaaagcgcttcaggcagcccgaagccttgcggtcgaagtctccagggcccgaaggtcgccctgcccgctttccgcgctgacactcgccgtaaaatgcggaacgtcagacgccacctcaggcatcgcggggaatcccacggtgggcaacgcttttgaccggctgatcgacgccggcggaaccgcgatgttctcagaaaccacggaaatcatcggcgcggagaagctggtcgcagcccgtgccgtaaatgacaccgtaacagggaaaattctcaccgcagcccgtcgctgggaagaaaaagcgctctccaccggcgaagatatccgggcgatcaatccgataccggcgaatatcgcggcgggtatatcgacccttgaagaaaaatcgctcggcgcgatcgccaaatccggtcatcgcccgattcaggatgtactcacctacggtgaagccccgtcgggtcatgggctctacttcatggacgcctggatgagttcgctttcgcttcccctcgggttcaccgctgccggcgccgcgatcatgatttatcagatgggcggaaacgccatgcctgaaaatcccgcaatgcctgccatcaatccaaccgttgtatcaccgttcctctacgtaacgggcaacgccagagcttttgagcggtctcctgataattttgactttgacgcctctcccgtcatgtcaggcaacgcgtcaatcgaagaaatgggagaagcgcttctcacccatctgagagacatcgcgtccggaaccgttacgaaaatggagacgctcctttatgaggagcagctcgaggtcttcatggaaggcccggtactctgatctattcagactttccgcagggatcccccgatcgggggatcctcggagctttgcgtaactgcgcccggatccaaagcggcgtagagtcaggaaaaattcaaaccggctcctttcatgactgtctttcttaataactttctgatcgcgcttccgcttttcgcgctggtcggtcttggctaccttttcgcctctctcagacttgtcacaccggaaatcggaaaggcgctctcaaaattcgccttcacggtcgcgatcccgacgctcctcttccgtctgatgagtaacatcacgcagcttcccgcgccgaagctcggggtgcccttcgcgtttttcggctcctgcattctggtttactttttcggccggattctcgcgaagaaactctgccacctcacgacagacgaacagacggtgtttggcatggcaacggtgttttccaataacgtccagctcggggtcccgatttcgatcgcgcttctctccccggcttcgatgccggcacttgccgtgatcttcgcgctcaacgcgttcctcatgtggaccttcgcgacggtgcagattgagttcagccggagccgcagtccgtcactctccaggacgatctatcagggtacgatgcgatcccttcggaacccaattgtgatcggcattattctcggtctcctctggagtctcacgggactcgaaatgccggtgccgctgaagaagactgtcgatctgatggcaaacgccgcctcccctgtcgcgcttttcgcggtgggtgtcggtcttactcaatataagcttcggtcccactttgaaacgactggcctcatcacggttctgaagcttggcgtgcagccggttgttgtattccttctcgggcacctgatggggctcacggggccggaacttcaggccgtgtgtctcctcggctgcctcccggtcggtgtgaatgtctacatcatggcgcaggaattcaatgtgcttcaggggccgaccgcgaattcgctccttctcacgacaattcttgccgcggtaacgctgcctgcggtgctgagccttcttgggctcctctaaagaaactgtcctcttatattttatatatagaggaagccagataactcttaacgagagtctgcgctttctctttatggaacactcatcaggaaggcgtcgagctcttcttcaaaccgatgcggacactcttcctcaggggaatgaccgcagggaagagctgtgccccggacatcgagcgccttcccgcgccaggtttccggcacatcgtaaagctgccccacggtgcccttcgcgccccagacaaggaaaagcggacagcggatccgcttcccgctgtcagacgcgtcatcctcgagatcgatcgttgccgctgcccggtaatcctcgcagatcgcgtgcaccgtcctgggatcccggtagcagcgaaggtattcctgcatcaccggttcttctgtcgccccctcggtcttcagctgccccgcgatatgacgcctgaggaaatactccggatccgagaggatcagtttctcaggaaagggctccggctgaatcagaaagaaccaccagaagtatcgggtcgcaaattccttattggttctttcatacattgtcgcggtcggcgcaatatcgataaaggtggcgcttgaaagcatcgcagggtagtcgagcgcgaaacggtgcccgacccgtccccctcggtcatgccccacgagatcaaatggagggagcgataagccacgggcgagttccgcgatatcggacgccatttcgcgctttgagtacgggcggtgatccggcgtgctttcaggctttgaactgtcaccgtacccgcggagatcgggaaggatgaccagacggtccttcgcgaagaacggcgcgaccttccgccagatcacgtgggtatgaggatgcccatgcagcatcacaagcggccgcttcctggaatagcggggaccgccgatcgcagttctgagagtgatgccgttcggaagctcggcatccacaagccggaacccaggaacaaacgcagaattccccgcgtcacggagcgtgaaggttttagccatctgatcgacctttcttattagccagactgaaggatacgttagaccagagagccgaaattttcaaaaggaaacgcaccggatcccctgctgaatgggacttccgtcaaaaaaaatttgttcgggcaatgtacgaaatctctccccggttttatcattagcacaaccgcgagatccccccccgatgaaaaaactctattttgttattgccgctggcctggccgctctttccgcgacactcgcctttgcggctgatcctattactgaatttctgctccactccgaccgggcaacggtgagcgtgccggacgcgcctgctctcacgcagtcgaaacccgcgctgcagcagaagcttcttgatgtcgaagtgaatccgaaggacgacgccttccagctcgaggctcctttcaagggcggcaaagtggcccctgaaaccgtggcagcccgattccgcgacgtccgcggtctgatgctccgggtctgccagcagccctcaaatcaggcttatttcagcaagaccccctgtatcgcatctgaactcactgacgctcaggcctccgactccgccaaagcgtctcccgcggaagtgaaagccgcgaaccgtgtcttccagcagattgccgcgatcaacgacaagacccggcagatgatgattgcctccggcgttgacgcacatgaagccgcggtgaaacaaagcgaagcccagattgaccccaaagtgaaagcgaatcaggatgccctgatatccgggaagatctcctggggcgaatataaccgcacccgcatgacactcacccgccgggcgcggtaaccgatttcctataaaaccatcctcaaactttctcttcggagaggcaccacaagtgaatgagcttctaaaccggtatttcaaaatcgaggctgccggctcgaacgtcaggcgggagattctcgcaggcgtcacgactttcgtgacgatgtgttatctgctcgccgttgtccctggcatgctgtccaacacaggcatcgcgttcggcgacgctttcgtgtcaacggtatggatcaccgtgatcgcgacgctcatcatgggcctctgggctaatttcccggtcgctgtcgccccgggtctcggcatcagcgccttcttctctttcatcgtctgcggaccgatggggttcacctggcaggcaggcttcgccgcggtgctcatctccggcatcatcttctctctcctcaccttcacccgcatccggcagctgattatcaattcggttccgatgtccatgaagtccgcgattccggccggtattggcttcttcatcgcgttcatcggcatgaagaactgcggtctcattgtgggggataagacgtccttcgtgacgcttggcaacctctgggatccgaaggttttcctcaccgtgatctgcgtgatcatcatcggcgctctgattgcccgcgggacgaagggtgccatgattatcggtatggcgatcatcaccgtggtcggtttcgtcttcggcgccactccgctcccggaccttgccgctgaattcgcgaaaccgatcaagcttttcccgaccgcaacggcgttccagctggatttcggcggtctgatgaagcattcggttgtggtcgtactcttcacgctctgctttattgacctctttgataacctcggcacgctgatcggtgtctgttcaaaggcaggctacgtgtccgctgacggcaagatccgcggcatcgaccgcgccctgatgtcggactccatcggtacgctctgttccggtctcctcggctgcaccaccgcgacgacctatctcgaaagcgtttcaggcgttgccgctggcggccgcaccggcctcactgctgtgacggtggctgtgctctttgccctttctctcttcctcgctccgatcctttcgatcgttccggtctacgccacgtcagccgccctcatgatcgtcggcgccatgatgatggggacgctgcgcgccatcaactgggatgacttcacggacgccctccccgctttcctcaccgttatctcgatgccgctcacgttcaacatcgcgaccggcctcggtatcggcttcatctcctatatcgcggtcaaggttctcacccgccgctggaaggatatcaacccgacgatgtgcgttctcgcggtgctcttcggcatcagcttcgcgcttcgttaaccgcggttgactgaaaacgcaatcccccggatgcgctgaatagcggtccgggggatttttttgacagcttcggtgtttacaactttccaaatttgtaatacttaaccggaaaaaagtgtaagcaaatcattagggtactggactattccaaacacacgatgtaatatagtgtgtgtaataagagagaaaacaaaatgcccgaaattcaaaccagaacttatatgccccaaccccttagcggagagaaacggcgccgcggccgcccgctgtcagggcatgcgaaggacatcgtccttcacatccgctgcacccccaagcagaaagagatgtttctgaggcttggcggcgcagactggctgcgctcgttcctcgacactgttggagaggcattcgacaagaagccggaagaagttgagtagcaccggtcttctccacatcccccatgacagcaccccgaagcccggcacttcggggtgtttctgtttctgaggatgacactcacctgaccctgccttccggttccacaggcggtatcagatatcctccgtgaaacccctgaaatactctgtaaacaccgcaccttccccgttacaaagacaatgcggcatttgcacgcctcttctatagacttccagttatgcaattaacctcaggagcaaaaccatgaagaagtcttccaagatcattctcagcgctctcgcctcagccggcgttctcgccgcggcagccaccgcctgggcctacccggctggcggtcagcctcaggcggggtacccctgccctgcaggcggcccgatgctcggaccgggcccggtgatgcctcagggggctcagggtaaagtggatcccgcttatatgaaccagatttccaagcacatcgccgaagggctcaagatcacgagcgcccagcagggggtgtttgacgcctggatgaaagcggtgaccaatatggcgaacactcgctacgaagcccgccaggccatgctcggtgcagaaagccgtcagcaggcgcttgaagcccgcgcgaaggtcatgcgtgaagcgtcggataacctctcggctctcgcctctgcccgcaagaacctgatgaattcgctttccgcggatcagaaggaaatcttcctgcagtatgagttcggccatcacgccggcagcatgatgggcggatacggcccccatatgggcggctttggtcccggcccgatgatgaacggcggacacggctgcggctggtaaaaagcctctctgtgccctcttggcggcacagaaaatttagggagaagcagaaatgcttctcccttattttttatcttgtaattttttcttttttccaaccgctattgatcgatttacaactaaaggttagttaagcgtaggttaacgattcaaccctctgctgtccctcttcctattccagatttgacttttctttcgaattttctggttacagcacaatttatcgttatttagattaaatttttaacaataactagtaggtcaatagtgtgaacttctagatcaaaaaacgtatacggacctcgttaatttgacctatatcaataaaacatcagattcaacttagttgattttcgttgcattgttgtaaacaatgcaatcaacaaaaatacatttcctgtcaaacttatagctttgctatttgtccaatttattgcgcagattctgttcatatatcgctgatatcaaaagttaacagaatgattatttacgtaatttttctgtttttttgattgtttcaatttacgtaacaattttttgctggttttgaaaattatcaagttactctcagcgttagtgattgcatttattgaaattatttacgaagttggtaaatgcaaaaatcacaaatttcaatgggttatctatactgaaattacagaagttaacaataacgtaaacacagaaggaaccagccatgacaagcaaaattactaaaaaagcgttccatgtgcctcccccctcccggcaggaggtcagtatgcagaatcacaccggaaagaacgcattccggttctccctctccattctcgccgcagcaatcctggcgaccacgtcagtaacagcgtttgcggctgatgtcgctgcaggtaccggcccggggctttctgtaggagcaaacagctccacggcaaaagccaatcagatcgcgattggcagcggtgccgcggcgactatgtattcaagtagcaacaatgacgactccagcatcgctatcggcaagaatgctacaacttcatccgaaggcggcactaaggctatcgctgtttcgtttgatttctctggcggttcgggcgggattgcgatcggggaaaattcaagcgcaatcaatggatcaacggttattggccagcatgactacaccggggccttgggggacgtcaatatcaacggaacaggcacaggcaatacgtatggagacctgcagtacgccgtaggcgcaaccagtgttggctataacacctataccgcagggcagttcgcaacctcggtcggtgcctataacgttaattcgacaaattatttcttagccaatacaaataccatcaacggtaaaagcacagtttccaaggattcggcgctactattctcggttcgctgaacagtaatgaatcccggaattcccagtcagttgtttcgggtatggctaacagtattgttggtgttgcaaaccgggtttcaaatgcttccggcgcgcttgtctttggtgccggaaaccagattacaaattctctgcagaatgacgacacgctctcaggagttttgccaactagcaaatgggatcttttaagcatgccttggaatgcctcggattttgctgcaaaacttcgtgaactcgtcaaaaattcggacggcggcggctctacccttgcaattggcggtgccaacacggctgactggactctggaaacggccctgctgggtgtcggaaataccgtaacaggttcggcagaaaacccaagtgctttcaacctgatcaccggttttgcgaacaccgctgacaagatcactcatgtcacagttattggttccggcaataccgtttcgacaggaacatccgacattgttatcggcgacaaccacaccttaacttctacaaccggtgcggtcgtactgggatctgctactgagacgacagaaatttctgacgctgataattttgtatctatcggcactgacagcaatgcgagtgccacagacacaattgcacttggtacctcctccagtgcgaccactgctgatgctgtcgcaattggaaagtccagcaacgcgactgcacaggacagcgtcgcaatcggcacctctgccagcgcaaccgcccaggacagttatgctatcggaacctctgcagtcgccagtgggaagagcggattggcaattggaaacaccgctagcgctcagggcgatggctcaaatgccattggctatcaggtaatatcgaaggggcctttctcttctgcctttggtttccagagtctcgctaacgcatcagactccttggctgttggctacatatccaaagcgtatggtgtggactctttagctattggttcgcaaaatacggctctcgccagtcaatcggttgctcttggctacaaagctgtggctggagctctgggggcggataacaaaatcgctggtctgtccagtgtgtctatcggcagctacacgaaaaccaaaggttcgtactcggtagctatcggttacaacacaacagcatccactatcggtgacattgcattaggtaacaccgcaacagcttctggtggcgggactgtagcgcttggcacacaggctcaaacgaatgggctttatgctgtagccattggcacaaattcggccgctaattcgccatcctctgtggctctgggtacaaactccaccgcttctgtcagcggtagcgttgcaatcggcgctggttcagtcgctaaccgcgcagctggcgtagccggttacgacccctccacgaagactacctcgactaaggtggacgactccacctggacatctactgcagctgcggttgctgttggtgatgccgatgaaggtgtgacgcgtcagattactggcgtagccgccggttccgaggacacggatgcagtcaacgtggctcagctgcgggctgcgacattgacggcgattaatacgtctgctaataccactaccgttactaccgatgaccccaacctctcggttaagtctgaaaccgtaaagcttcctatcacctctgagggtgaagatcccacaccggttgcggaagcctctggcaaggattactccgtaacccttagtcaggatctgacgaacatgcacagcgccaccttcagtaatcctgatgtctcgtccacgacgaccgtcatcaacacgaatggcgtgacgatcactggcggtacttcaggcacggtttctcttacttcgacgggcctcaataacggcggaaataagatcacgaacgtggctcctggcaccatctcagcaacctcgagcgacgcggtcaatggggctcagctccacgaaacgaatgtgaacgtccagaagaacgcgacgaatattgccgctaaccggacggacatcgataacctgatgaacaaatacaacatcgggcagcaggacctgaaagatcgcatcaaccgggcgggcgcaacggccgcggctcttgccggacttcatccgcaggattacgacgaagaccataaggtttccggttctctcggtcttggcttctaccacggaacccaggctctggcggtcggtctcttcgtgcggcccactgaaaacctgatgttcaacatcggcggtgccttcgcgtcgaatgaccacatgctgaacctcggcgtctcctatcgcttcggtgacaacagcatggaaaagaagtctccgcagcagctgcaggaagaggtgacgtctctcaagactgaaaacactgacctcagcgcgcggctcgctaccgcgaatgcccgcattgactctcaggcctcggaactcaaagccctgaaagcccagattgcggacatccagaagcatcttcattaatacagtccatcggactggttccggggaacgccgggttccccgggcaccagaaaacaggatgggggattagcacagagtcctgatttctgatgcccttttatgggaaggtttgaaaaaaccttcccttttttcgtttagcggcacgggacagaaaaccgccccctacagttttcggtttctcccggatcatctttctctttcctacgaatctggagcggcttcgtagttccaaaacacgtttttcagtcccgatcactggcggtttttgacttcaatcaacgttttttgttgttgatatacatgcaactatttgaattattgaactttttgcaatcagaaaaactgccatttcctgcttgctctttatgcatgatggtataccgttatttcaccagtgtttgaataataccccctatgttccctatttaatcccttgtttaaatgcattttttcaatatacgttgaattatccccggatttttggacgtcagttatcgaaaaaacgttggatttatcaaatcctctttcccgttcttattgcatttaatgaatgcataacgaacatgagatgattgctaaatcaacaacttatggctcattcatataattttcctcacaaaacttaacaaaaaacacacagaggaaaatctcatgtcaagcaatgtcattcaccaggctccctccgcccggcgacaggccagcccttctaaacgcaccacgggaaacacttctcattcgtgtttcgcggtgtcacttgtggctgctgcgattgctctcgcagcctgccccgccatggccgcaggaatggttactgcaggcagcggcgccggcgtcgctgtcggcgcgacgagttcaaccactggagccaatcaggtcgctgttggccccaacgccagaacagacagtacttatagcggcaacgctggcgaagccagtatcgcaatcggcgccaacgccaagaccatcaccgaagtcggcagaaaaggcgcagctgtcgtattcatggatcccttgtcctatctctttcatactgggaactttggcgcgggcggtatcgcgatcggtaaaaattccattggctacaacggctcaaccgttcttggtcagcacgattacaccggtcagatcggcgacgtgaatgtcaataagcagggagacgcttccaactcctatgaaaaccttcagtacgggttcggagcgacgagtgtaggctataactcttataccgctggtcagtacgccacgtcgatcggtgcctataacgtcaattccgccaattactatccgggcggaacaaacacggtcaatggaaacagcactgtttcccaggggttcggtgccacgatcattggctcttttaacagcaacgaatcccgaagctctcagtccgcagtctccgggatggcaaacagtctggtcggcgtagcaaaccgggtttccaattcttccggtgcgctggttttcggtgccgcaaaccagattaccaattcgctccagaatgacgacacgctgtcgcggaccccgattctgccctcctccccggttgagttcgccgacacgctccgggaactcgtcagccaatcaaacggcggcggctctacgcttgcaatcggcggtgctaatacggctgactggacaaacgaaaccgcaattatcggtgtcgggaatacggtgaaaggcggtgaaggcgcaccgagcgcctataaccttttcacaggcttcgctaacacgggcgactccgtgcaccatgtcaccgttattgggtccggaaactcggtttcccatgccacaaaaacgattgtgatcggtgataaccgtaatctcgatacggttaccggcgctgtcgtcattggaaacgccacgaccgcaactcctgtcaaagcagcaaacaacagtgtgacgattggttccgacagcctcgcaaccttccagagcggtgtcgctattggcaatacagcgtcttcctctggcagcaacgcgattgccatgggtaccaattccaaggcggctatgctgaatacggttgcgatcggcaataccgcatcagcgtcctacatgggcggcgtcgcactcggcaacgcggcgaactcgactggcactaacgccaccgcaatcggcagcacagcgacagcttctggcagcaacgcgattgccatgggtaccaattccaaggccgctactctgaatacggtcgcgatcggcaatacggcaacggctacctccatgggcggtgtcgctatcggcaacacatcaaccgcgtccagcgccaacgctaccgcggtcggtacgaatacgatcgccaaaggagcgagctcggttgcgatcggcaacaacgccaccgcaaccacgactggcggcgtggcgattggttcaggttctgtcgctgatacctggtacggactgaagggctatgatccgtcaaccaaaacgatctctacagacacatccgcaacctggatgtccaccgcatccgcagtctcggtcggtgacgccgatgaaggaatcacgcgtcagattacgggtgtcgccgctggctggaaagataccgacgcggtcaacgtggctcagctcaaggccattaccgctgcttcttccacaaaagtggacaccaagggaccgaacctctcggttgacaccacgcgtctcccgatcacggctgatccctccacttcgcctcccgcgagcacctacacggtgacgctgagccaggacctgacggatatgcatagcgccacgttctcctcagactcgtcccccacaacgacggtcatcaatacgaacggcgtaacgatcaccggcggctcttccggaacggtttcaatcacttcggccgggctcgataacggcggaaataagatcacaaatgtagctgccggcaccgtttctgcgacgtcgaacgaggcgatcaatggggcccagctccacgaaaccaatgtcaaggttcagaacaatacgacgaacattgcgacgaaccgccgggatattgacaacaatacggcgaacatcgccgctaaccgcacggatatcaataacctgcagaaccagttctctgccggacagcgggatctgaaggaccgtatcaaccgggccggagcgacagcagccgctctcgcgggtctccatccgcaggattatgacgaagaccacaaagtctccgcttccctcggtctcggtgtctatcacggcactcaggctctcgcggtcggactctttgtccgcccgactgaaaacctgatgtttaacgtcggcggtgccttcgcatcgaacgaccacatgctgaacctcggtgtttcttaccggttcggggataacagcatgaagaagaagtcgccccaggaactgcaggccgaagtgacgtcgcttaagaccgaaaacacggacctcagtgcccgcctcgccacagctgacacgaagctttccgccgcgaatacccgcctcgactcccagtcagcggaactccgggcgctgaagcaacagatcgctgatattcagaagcggctgaaataaatcactcccatagcagcttgacatagggggcgccgggcccccttggaatctgcaaagcaggaagggggaatgtgcattgatccctgtttcgcagactcctttaccgggaaggtcctccctgaccttcccgttttttttgccttcagatctgcagcgctctaagactcccggttcagaaaactgctccaaagttcatccctgcaaactctgtgtcaacctccgaaaaccctttctttctgcctgataccggcttaacccgataccccaaggggttatctttttgatacacatcaaaattattgcaagtcaactttttcaaccaaaagtcaatcttttacgtaaccacaggaaaacgaactgccaattcatctcagttagatatcattgctatctttccgcctttacttagacggctaagggtcagatttacagtgcttttcattcaaccatctgtaaaaacatcatttttacagtgaaatcaccgcattgtttcatcccgggaaacagagagggccttttacagaaatttatcagtctgtctcaagcgaaagtaattgcaataattgaattcaccgcccttcatctcaattgcaaaacatacaacattcaatgacttatagaattgatttcacaagaaagaacaacataaacgacacacagaaggaagcagttttgatgactacatcagaaaaaggaggatcgatctgacctcccttgaaaatgcttcaccgacgcaggcagtgccctaagaaaagaagaagaaaggtcattccgccggcgtcactcacagacagaagtgacggattaaagctgtgagtcacgccagttctcccgtaccggacatgcggcaaaggatctccagaatccgcctcattaaccggcatcgcggaaaacacttcggacactgccctcctctcctcaggcgtctgacaaagaacgctgcatccactctctctgggggcgccgggctcccacggaatcaggaaacaggattgggggaaaaagcacgaatcccagtttcctgattctcttaaagggaaggctgatccattcagtcttcccatttttttgctctttttctccccgaactcaatataaaaaaactctctgcctcccggagaagaggcagagagcccggttaacgctttactctgtgtgtcgcgcggatcaggtccgcagtcttttcgcgtcgttaccgaaaactttcagcaatgtgtttcaggttctgagacatacgggcggtgaagctcagtttgtcttcaggactttccatcgtgtagatcgggaccaccttggcgccgcattcgcgggcgagtgtcctggaaaccgcgggacttgcgagttcctcagcgaaaacggtcttcacgtggttcttccggcagaagctcacgagttccgcaagctgcctcgcggagggttctccttccgcgtaaacgttttcaacgctgacctgcttcagaccaaaatcacggcacagatagccaaacgccgcgtgcccggtaacaaacgtgcggtttttggatccggcggccgccttgcggaaggcgtcggacgcggctttgatgcctgaagcgaaagccgcaagattcttcttataaaccgccgctcccgcgggatccgcggcttcaagcgccttcgcgatgttttccgcttcaaggattgcgcctgaaggcgaaatccagaggtggggatcgatcgcggccccgatcttcatcggcgtcacgccctgagacgccacgacgatcttcgcgcggccgttgccggacgctttcagcgccttttcagtccagggttcaagcccgagcccgttcttgatcacgagatccgcgcccgcgagtccccgcatatcacccggacggggcgaatactcatgcggctccacgcccggagggatcagggtcgagactgtgacccggttcccgcccaccgccttcgcgatctccgccatcgcgtcaaaagtggccgcaactttgactttcctctccgcggcaatcgctgcgcccggaaccgccatctggaagacgggaatcagggccatcgccgcaagaagcgatcttctctgcatcactctcactccttaatttggaaagcattttcaatttagaatatccgctatcatacatgcttaccaaaataaatagcaaatccgtttgtcgaacggaatgaatatggttgagatttccaatttaagtttttcttactccgggcacgcgccgtttctcttccagtcggtcacagagaccctcactgacggctcctggacctccattaccggagagagcggaagcggcaagtcgactctgatccgtctgatgctcggtctgctgaagccgtccgccgggtcgatccgcgttcctcggggcacccggatcggttttgtcccccaggcgtctgactacgcgtattccgacttcccgatcacgctgcttgaggcactcaccatttatgagcggctccggacccggaccgagaaaggcattctcgcgtctctcaggatcggaaaaacgaatcttcgggactccgctcttctcgcgctcgaatcagttgacctcggccatcgggcggaggcgcttgtcagtacgctttcagggggcgaaatgaaacgcttctatctctcacgcgccctcatttcatcccccgctcttctgatcctcgatgagccctcttccggactcgatccaaaacgggccgaggaaatctatgaactgatccgtcacgttcatgagaaacatcacctcaccgtcatcgcggtggaacataatctcggtgccgcgcggcgctactcagaccggattctcgaactgaaagacggccgtcttacggaatcggaggcgcttcatgcctgatttttcggttttcagcgatatcttcagtttcagcttcatgcggtacgcgtttttcgcgtccatctgcatcggcattctctgccccacgatcgggatttttattgtgctgcggcggttttcgcttctcggcgacacactcgcccacgcgtcgcttgccggcgcagcgacggggattctctgcagcgggaacccgattctctacgcgatcgggtactccgtcgcggcgggtgccgggatcgaccttctgcagagccgcttcccgagacggtccgacctcacgctcgcgatcgttctcgcgctttctgccggcatcgccgtgaccctcatgagttcggggctccttcacgcgaacgccgaatccttccttttcggaagcatcctgacggttgacaggagcgacgcgatcgcgatccttgtgctcacggcggccgccgtgctcctcacgttcctgcttcgctacgacatgatttatgtcgcttttgatgaagtggcggcaaagtttgccggtgtccggatccgggcggtgtccttcctcttctccgtgatcgccgcggcctcagtcgctgcctcaatcaaaatcctcggcgctcttgtgatcagctcgatggtcgcgatcccggtcgcctcggcgcttcagttccgtaaaggaatccgcgcgacggccgtcatttccatcgcggtttctgtggtttcagcgatcggcgggctcttcgcctcctatgcgctcaatgtcgcgccagggggcgccacagccctgatttcggttttcatcctcttatcggttattcttattctcagaattcgggcgaagatcaccggacagtcatgactgaagaaaacgaaacgaaacagaacccccgcggaagcggttactcaacacgtcagaaagcctcccttatccgctttctcgagtcgcatcctgaggagtttctgacggcgaaggaaattcacgaggggctcgtcgcgagcggtgaaaagatcggctacacgacggtctaccggctcgtcaacgcactttcagaggaagggaagctgaagaaatttctgaccaagaaaggcggcccgattgtgttcgaattcgcgccgggtcacgatgaggcggagtttcacgtgcagtgcaaagtctgccggaagctctttcaccttcattgcggagagattgagcgtaccgctgaggaactgaagcatcacctggatgcagaacacggaatcctgattgactttcagaattccgtgtttcaagggatctgccccgcctgcagacgaaaggcggaacaaaaccatcaggactgatccgcaggtcctcagaggacccgcggaacacggcgtctatcagtagttctcggcgcggacttcgaagaagctctgcggatggaagcagaccgggcagacttccggagccttcgtgccgatcacgatgtgaccgcagttgcggcattcccagaccgtgatgccggccttctcgaacaccttcttctcttccacgttcttcagcagcttgcgatagcgctcttcgtgggtcttttcaatagcagccacgccgcggaactgagcggcgagttccgggaagccttcttcgtcggcttccttcgccatacgatcatacatatccgtccactcataattttcaccggcagcggcagcggcgaggttttcctcggtcgtgccgatctggccgagctgacggaaccaaagcttcgcgtgttcacgctcgttatcagcggtcttctggaaaagagcggcgatctgctcgtaacccgccttcttcgcgacacttgcgaagaacgtgtacttgttgcgggcctgggactcaccggcaaaggcttcccacagattcttttcggtcttcgtaccggcataacgattagcagccattactttctcctagatattagaaatgatccggtctgccacccggggtgattgggggtcccggggacaaatgtgtggcataccagatatgaacattctattcgcttttcataaaaagtgtgagtctttttttatttttttgtattaccttaatttcaatattgtcaatcactgaaagtatcccggcagtgcttttcaatgagaatgaaaatttctcaatcaaaccagtttcataacatcacctggcgctttccatccttcttaactctttaatttatattcctaatataggtaaaccgaccttacgccagccttaagctgaaggtattgagaactgttcttattcagacagtccgagaccgctagtgaggatttttgtactgaaggatttatgtccctgagagccggctgtattttcaattaaatatttattgaaacacaaaattatagttagacgactaatggatttcatccaaaagcaggtcccgattaggaatttttctgtcgtttttcagtatcagaccggatactgatgaactcaaaaatcacagaggaaaccgactgagacgggtatctttcctgaatggaaagctcggctggaaggcgggaacgcaggaaccggggggaacaaccccgcatacataagaaaagagcccgaaatgcctcttagaagcactccgggctctgaaacctggtgcggagagccggacttgaaccggcacgccctcaacgggcgtcaggacctaaacctggtgcgtctaccaatttcgccatccccgcgcacgaaggctctattttacagaaaaactctgaaaagtgccttcaaaaaagctgtgcagatttaaaaaatcagagtcgcagccagggtggcgttacttggctgcgggcttctcggaaccgcagccgcaggtgcagccgccttcctcatgctcgtgatggtgaccaccgcagccgcattcaccctcttcatgctcgtggtgatggccgccgcagcagcactcgccttcttcatgatcgtggtgatgaccgccgcagccgcattcgccctcttcatgctcatggtgatggccgccgcagccgcacccgcactcttcctcttcgtgatcgtggtggtgaccgccgcagccgcagctacactcttcctcttcgtgctcatggtggtgaccgccgcagccgcatccacactcctcttcctcgtggtgatggtgatgaccgccacagccgcagccgcattcatcgtcgtcatcgtgatggtggtgatggccgccgcagccacacccgcagccgcaggaatccataacgatcggggtgaagggttcagtgacttcggtataggtgaggccgatctgcttcagcgcaagccccaggtcttcgtccgccgcaacaccgaaaccatcctcagtctgagacacgcggtagccgcgcatcagaagagcggaacccgcctgctgcatcagattcatatcgcccgtgacatggaacacgacttcaggcgccgcgctcaccgcgtagagctgcccatgatcatccatcaggatgtcatcgatctcaagcggacgcagttcatcaaccggaaccgtcacttcgtacgcttcgccgcccgcctcaaaggtggagggaagctcagcgcggaaggcgctaatcagggggatttgcttcattctcgcgaggagaacaggagcgggcttcgatcccgccggaaggattttggtgagcgtggtcattgtgtaattttcaggcaatatgggttatttgatgcgggaaagtataccgattcagtccggggccggtgaggcgttctttactccatcccctgcaccgcagcgaccgcttccgagagcttatccaccgggatcacctcaagcccctcaatcggttctttcggcttattggcgcgcgggatgatggcgcgtgagaacccgagcttcgcggcctcgcggagccgctcctggccgcgcggcgcgggacgcacctcgcccgcgagaccgatttcaccgaacaccacgagccccttcgggagcgcccggttacggatcgaggaaatgatggcgagcagcaccgcgaggtcagtcgccggttccgagatcttcatgccgcccacggcgttcacaaagacatcctgatcaaagcagctcaccccggcgtgacggtggaggaccgcgaggagcattgaaagacgctgcagatcaaggccgaccgaaagccgcttcggggtcggcgagtgtgagtcatccaccagagcctgaatttcgacgagaagcggccgtgtcccctcctgcgtcacaagaatcacggaacccgggacactctcccggtattcggaaaggaaaatcgcggacgggttcgagacaccgcggaggccgtggtccgtcataccgaagaccccaagttcattcacggcgccgaaacggtttttgaacgcgcggatgaggcggaagttggagtgcgtatcgccttcaaagtaaagcacggtgtcgacgatatgctcgagcacccggggaccggcaagcgacccttctttcgtgacatggccgacaaaaacaagcgtcgtgcccgaggtcttcgcgagacgcgtaagccgggccgcgcattcgcgcacctgggagaccgagcccggcgcggaattgagttcagaggagaaaatcgtctggatcgagtcgatcacgacgaagtccggtttctccgccacgatcacctgttcgatcgtctcaagctgaatttcactcatcagccggatcccgtcaggacggagctcaagacgcttcgcgcgcatcgcgacctgtcccgcgctttcttcaccggatacatagagtgttttcatgccgcgcccgacgagccgcgccgtgacctgaaggagaagcgtggatttcccgatacccggatcaccgccgatcagagatacgcctccgggcacaagtcctccgcccatcacgcggtcaaattcgcggagcccggtcagaatccgcggaaggtcctctgcctgaacgctggagagatccttcacttcagtcgactcaataatcgcctggctgcggtggcggtcagagccatagcgggcgctgacaccctcctccaccttatattcggagagtgtgttccaggcgtggcagttcgggcattgtcccatccattttgggaaactctccccgcattggctgcaaacataaaccgtttttgactttgccatttctgccgctccgtagactgatcagggccgggatccctcggatccacagccctgcggttgaagcttttagtttacagaaaggaggacacctgaatcagagagtcccttctgtctcccggacaggaacgcgcggcagcacgctgcagatcagctcatacccaatcgtgctgaccgaacccgcgatctcgttcaccggaatatgctgtccccagagttccacccagcttccgacatccgcgtccgggaaatcggtgatatcgatcgaaatcatgtccatgcagacacgccccgccatcgggacctttttcccttcaacccagaccggggtgccgttcggagcggatctcgggtagccatccgcgtagccgcaggcgacgatgccgatccggctcggacgcggcgcgatccacttggagccgtaaccgaccgcctcacccttctcaatatgctggaccgcgataatcttcgcgcggagcgtctgcgccggaataatgtcgagtgttttctcggacaccgtcgaatccgggctcacgccgtaaagcgcgatgcctgcgcggaccgcgttccctttcacctcagggtggaagagcatgccggtcgtcgcagcgagacacgccccttcggggtcgttcgcgagatcaccgagccggtccagctgccggccgactgtcgccgggccgttctctttataagaagggtcaccgtttgcgaagtgcgtgagaacgccgtagctcgtcaccccgggaatcgcgtgaagccgggctctgaccgcttccacttcggatggccggaagccgagacggctcatgccggtgttcacgccgatatagcagccgaggcgcagccccttgtgatgctccagaatggaaaggagccgctccgaatgaacgatcacgtcagctcctgcttcctgaataggctcgaggtcctcttcatcaaagaacccttcaatcatcaggatccgtttcttccagccgagacgccgcagcttcagcgcgtcaccgatatcgaggatcgcgagaccgtccgcctcagcgaaccctttcacaatatgctccagtccgtgaccgtagccgtttgccttcaccacagcccagaggaaccggccgcgcgccgcctcccgcattttctggcagttgtggcgcagtgcgtccatatgaatgacaagctctatgggacgaggcattttctaaactttcctgatttattctgattctgtagatgaatgatccctggcggtcgttcccgcttttttccgcatagaggcggagcgccggaaggaaactgtccggaaactttaccactatggcccggcacccgagttaacccccgggatcgtttaacctgaggcctccgtgcgataaagtgtaagtttccgtttttcttttagatttcgggacggaaaaccggtagactccggcacggctttctgggaccgcgtcacaaatcccgcctttccgctatatttacctaggcggttctgctgcgtcatctctgaactgcccacttttcaaggaatataagggagacaaatgaatcgcgggttttacacgatcatggcggcgcagtttttttcaagcctcgccgataacgctctcctcatcgctgccatcgcgctgctctccgagctcgccgcccctgcctggatgactccgctcctgcgactctgcttcacgctgagctacatcatctttgcggcgtatgtaggaatttttgcggacagcatgccgaaaggccgcgtcatgttcctcacgaacacgctgaaagcggtgggctgtctctttatgcttttcgggggccacccgcttctcgcctacgcgatcgtcggtcttggcgccgcggcttactcccccgccaaatacggcatcctcacggaactcctccccccggataaactcgttgtggctaacggctggatcgaaggcctcacggtgatttcgatcattctcggcgtagtgctcggcggtgccctgattcttccggctgtcgcggatccggtgctcgccgcgggcgtcctccagacaatcggcattcatacaagagccggcgccgcgatctcgatcgttttctttatttacctcattgccgcggcctgcaatctctttattccggacaccggcgtgcggtacccgaaagcggatttcgaaccgatcaaaacggtctgcaatttcctcggctcctgcaaagcgctttggaccgataagcttggacagacgtcgcttgccgtcacctcgatgttctggggcgcgggcgctgtgctgcagttcctagtgctctcctgggctgacacgaatttcggcctcaatctctcacaggcctccattcttcaggccgtggtctctgtcggcatcgcaatcggcgcggtcggcgccgcgacctttgtgccgcttaagaagtgcctcaaggtactcccgatgggcgttctgatgggggtcgtcgtggtctttgccgcgcacttcaaccgcgcgatggcgccttccgtcatcacgcttccgggcggttttgaaatctcctgggcgatcatcatcgcgggctgcatcatggtgcttgtcggcgcgcttgccggcttcttcgtagtgccgatgaacgccctccttcagaaccgcggctttgttctgatgagcgcgggccgctcgatcgccgtccagaacttcaacgaaaattcgtcgatgctgatcatgcttggcatctactcgctcatgatcaagggaggcctcacctccacccgcatcatggagatcttcggcgcctttgtcgcgatcgggatgatcattgtgatcctcacgcaccgccgcaacgcgatcggtcaggatctctccagcatgatcggagaagaaagcccgcatctgcagaacgggaaagagaagtagagcggcggatcgctccccaaaagcaaagcccggttgaaaaaccgggcttttttgatgggctctgcgatgtgtgtcaggccgcttccgcttctttcagcgtccgcttcacaaagagcagatcgtgccagcacttttccttatccgcgaggttccggaggaggtacgaggggtgatacgtcacgatcaccggaaccttcttcccagcgacctcgatttcgaaaagctttccgcggagacggctgatcgcctgatcagtgccgagaaccgctgacgccgcggggcggcccatcagcacgagaaccttgggggcgaggagctgaagctgccggtcaaggaaatggcggcagaccgcgacttcctcgggcttcggatcgcggttatgcggcggacggcatttaagcacgttgatgatcgcgatgtccttcccgcgctgcagcccgacagactccagcgccttcgtgagaagctgaccgctcttcccgacaaaaggcttcccctggagatcttcttccgcccccggcgcttcgccgaccatcacgatcgggcagcccggagcgccgtccgcgaacacggtgcgggtccgcgtttcactgagaccgcagccgtggcagtcagggagaagcgccttcagctgatcccaggtaccgtctgtcacctggctgaagaacttcactgaatcccagccgctcgcagcgtgatcagggagaaccgctgccggcatggaagacgacacggtgggagacaccgcctgcgccgcacggcgcggcgcctgagttatcgggctcgcgtgaaccggctgcgacggagctgtcaccgaagcccgggatacacgggacacacggggtgcgggtgccaccgggcgcggctgaggcgtcgcttccgcagccggagccgcgggagcctcaatcgccttcggcacgcctcggaccggcactgacggatcctcttctgcccggagaatccactcagggccaagccccatcgccttccagatcgcggattgccgtgcgtcaagcatgggtgagcattgcctccataaagagcgcgtcttcgcgtgttccgtcgcggttcgcgtagtaatccgaaatcaccccggcctggacaaaccccgcctttttataaatatggatcgcgtgatcgtttgaagaccgcacctgaagcaccacgcggaaagcgccttcacggttcgcctcactcatgagatcagcgagaagcgcggtcccgattcccttcccctgaaattccggggcaaccgcgagcgtgaagatctcggcctcaccccgcagctgatgaaggacggcgtaaccagccacagtcccggcgtcctccgcgactctcgcgtagcacccggagcggaggcacgcggcgtaggaacccataacccagggctccgtaaaaacacgctgttcaatcgtttcaatcgcgggaagatccgcgggcgtcatattccgaatcgcggctgccatcgtcagagcctctttcccgcggcgcgctcttcaatcgtgagcgccacatggttacggacgtaaagcggagcggcgagttccggaatcacggcgagccccaatttaaagagaatcgcgccgagcgccgcgagatcaagcgccgtgactgtcgcatccggattcagcgtcacccggtcacccagcaccgcgaacgactccgggaacgcgcggacaccgcttcccgaggcgagcgccacgccgaaactctcggcaagccccgcgagctcatccggattcacgagttcagccggtacgagttcagagagcctcgcaccctcttccgccttctcgtacaccgcgcagtacgcctgatgcatccgggcgtcgaaagccgcgaggattctcgtcccggcgggtttcccgctgagttccttcatcgcgagtgcttcaaggttactcgccgcgacaatcggcttctcttttgcccaggcgagcccctgcgccacgccgcacgcgacccgaagcccggtaaaggctcccggacccgctccgaacaccacggcgtcacagtctgaaagcgagacacccgcttcccgcagcacggcgtccacctctccgatcagggactccgaatgccccgctccggactcatcaattttctggaccgaaagaccttcacccgtcaccgcggcggaactcaccggcgttgcggtatcaagcgcgaggagcgttgggatttttgccgacattctctgttctcttactgaattccaaatacgaaaaaagcgggaccgcggctatgaatcgcgaatcccgcctgtcaagagcgcattttagcgcctcgccggatcggcttccgggtttttccggcggcttcactcccgaagcccgccagaggcacggcctcttctcagcggcctccgtccagccgggcgttctcacgcgcagaccggacatgcataaattcctgatgcacctgaatgatctgatttctcatatgcattctttccatcggcgacatcaccggacggggatcccccggctccatggcaccgagccccttcgggtcgatgctgcactcaaagtggcgccggaactcttcccggctgatcgggcgaagcttctcgcgaagcgcccgtttttccgcgtcatccatcagcatccagatgtggcggcggttttcctgcgtcatgacaggccagagatcggcgcgctcctgaacggagagactctgccactcagcgggagtgcaggtgcgattgcacataggaccatcctgcgcgaacgcgggggaagccgcagcgcagcaggtcgtcagcaaagccagcagcaaaaattttctcatagcagtccgaataaggaaataagtgaggaggagcttccgcaaggaaggccccgctccagaaaccggccgcggaggctcctcctttcttcaacacctatatcctatttcgatttttcttaaaaagtgctacaaaaagggagtgaaattctttcagggcgggttcttttgttacagcttgttttggagagcacaaaaaaatttgtaacaggccaaaatgtaacaaaccaacccggaagcaaaaaccgggaagcttttttctttagagaaagaattctattacaaggggacagacatgacggctgaacgcaaaccgaaaattctggtggtcgatgatgacccgaggctgcgggatctactgcggcgctatctcggtgagaacgggttcaatgtcttcgtggctgaaaacggccaggcgatgaaccggctctggatgcgtgagcgctttgacgcgctgattctcgacctgatgatgccgggtgaggatggtctcgcgatcctgaagcggatccgcgcgtccaaggacacgacgcctgtcatcatgctcacggcgcgaggtgaagatgtcgaccgtatcgtggggctggagctcggggccgatgactacatcccgaagcccttcaatccgcgcgaactcctcgcccgggtgcacgccgtgctgcgccgccgtccgacgcctgagacgccgggggcgccttcaagcgaaaacgaaatcgtgaagttcgggaactttgaactcgacctcggcacccgggtgctccggaagaacggcgaaccgattccgctcacgacgggcgaattcgcggtgctgaaggcctttgcccgccacccgcgtcagccgctctcgcgtgacaagctgatggaaatggcccgcggccgcgagtacgaggcctttgaccggagtcttgacgtccaggtctcgcgtctccgcaagctgattgaacccgaaccgagcaagccccgctacctgcagacggtctggggtctcggctacgtcttcatcccggacggacatacggtgtaaggatcaggtgcgtcaccggattctcacctgaagcgcggcagaggtttctcagaaagaagccagccgcgcttttcccttttttcctcttatccccaggctgcaatcatggctaaaaaagaggcgccggcccccgaaggcgaacgtaattcaagcaacagcatcttctggcgcacgttcctgatgctgatggtcctcatcgtggtgtcggtgctgggcggccttcagacgtactggacatttaatgaagagtcgatcgcgcggagcatttcccagcagatcgtctcgatgacgaatctcacgcgctacgcgctgatttccgcggacccggtctaccggccggacctcctcaatattctcgcgagcgaagaaggactgcgcatcgtgccgaaggaggacagcgatcacacgacgccgcttcccgacacgtcaaccgtgagtctcatcgagcagatggtgcatgaggggcttgggccgcacacggtgctcgcctccgaagtgaacggagaaaaaggcctctgggtgtcgctctcgattgacggcgatcagtactggctgatgacgcggaaaaagctctttgaccgcccgagcggcacgtcctggctctggtggggcatcatcgcctttatgctctcgacgctcggcgccacgctcctcacgcgtcacacggtggagccgctcgcgaatctctcgcgcgccgcgaaggcgctgggccgcgggcagacgcctgaagagctcccggacaccggcccgaccgaaatccgtgaggtgaacaaatccttcaacatcatggtgaaggacctctcccgcatggaggaggaccgggaactgctgctcgccggcgtgagccacgaccttcgcaccccgatcacgcggctccggctggaggtcgaactcgcggatctccccgaagactcccggaacgccatggtccaggatatggagcagatggaaaacatcgtgaaccagttcctcggctacgcgcggcgctcgaatacgccgctcgaactcgtgaatctcggtgaagtggtggcttccgcgatcggcgcgagccgcatgcaggaagacccctcggtgtcgcttgacagcgtgatccggaaggatgtctacatcatggcgcacccggctgaaatcgcgcgtgtcgtgcagaatctcctcgtcaacgcgagcaagtacgggcgcgaccctgatgggaaacttgagatcttcgtgaataccgggatgcagggcggacgggcaattctctccgtcgcggaccgcggcgaagggattccggaagcggagatggaacgcgtgctccggccgtttgagcggggcgaacgggcccgaaccgggtctaccggctcaggcctcggtctcgcgattgtggaccgcatcgcgcgtcgcagcgatggtcaggtgaagcttcacacaaataacccgaagggtcttgtcgtggaaatccgcttccccctcgcctcgcctccgaaagcgccgaagggacgggatgaagcggacctgtcagcaaaaggcgatcagaagatttccgcctgaaggctcggctcaagaaggacagcggcggtcgcttcgatcgcctgtccttcgcccacttcgcccatgccttccttcgtcttcgccttgacgttcacgtcctgctcggcgacaccgagaatccgcgcgagctgagtgcggatctttttcttccactcgccgagcttcggttcttcagcgtaaatcgtcgtatccacgttcacgatttcccagcccgcgtcgcggacttcgcccaccacgatctgaaggagacggaggctgtccgcgtccttccagcgttcgtctgacggcgggaaacgctctccgatatcgccgcggcccgcggcgccaaggatcgcatccgtaatggcgtgcagcagcacatcggcgtccgagtgcccgagaagtcccttttcgtaagggatcagaatgccgccgagataaagcttccggccgggcaccaggcggtgaatgtcgtagccttccccaatatgaaatgccatctgtatctttctccagtctcccctattggggcgttacgggtgtttgcggagccggctttcggcgatcgcttccgcgatcagcgcgtcatccggcgtcgtgattttaaagtttagcgtgctgcccggaacaacggaaaccgggtgtccggtgcgctccatcgcggaggattcgtccgtcaccccttcggtcccgcgtctgagcgcggaaaggagctccgagagcctgaacgcctgaggtgttgccgcgcgccagagcgatttgcggtcacgggtcgcgagaatccggcggtcgggtgacgcttccttcacggtgtccgccatcggcatcgcgaggatcgcgccgtgccctgctgacagcacctcatcccggagtttccggatatccgcgggatccacaaagggacgcgccgcgtcatgcaccatgacccagtccgagccggacgccgggaaaacggcgccgcctgagagtgtttcgaggccgttcactacggtgtccgcgcgggtttcgccgccgcgtcggacaacgctcacgccctcagggaacgtttcctcatcgatccacgcgtccgtctctgacaccacaacgaggatcccggaaaagatgcctgaatcgtgaagcgcccggaccgtgagagaaaggaccgtttcacccgcgagcctcagatactgcttcggaacggcgagccccatgcggcgcccgacgccggaggccggcaccagagcataaaaacggctttcttcctctttcactccactcttcctttcagtcacgctggcgtttggcccgggcgacgcgcttcccctcgaaacacagggatcgaaccgcagcccgagtctttctataatcttcaggaattgtagcgatccggcaccgttcgcccagaccgtaatttcccgtccttcagaatttttcttcatgacgaaaacacgtttccccggcctccttggcgacagtctctttgataaacacccgacgctcagccgcacgatgacgctccccgcgggggcgcctgacagtgtcgcgatcgcggaggccgcgcgggaatgcgcggaacagggctcaatcctcgtcgtgatcgcggcgaacgcctctgacgtgatccggctggagcaggaagtggcatgggtcgatccctcgctctccgtccggacgttccccgactgggaaacgctcccttacgacctcctctccccgcatgaggatctgatatcggagcggctggaaacgctttaccggctttcatcccgcgtccccggcagacggtctgactccgggaccgcgattgacctgctgcttctttccgcctcaaccgccgcgctccggatcgcgccgacctccttcatttccgcgaccacgttcttcttccgccggggcgacatcctttccaccacggatctgaagcaccggctgattctcgccggctactcaaacgtttcccaggtgatgggcccgggcgaattctgtgtccgcggcgaaatcgtcgatatctacccgatgggcgctccgaacccctaccggatcggactcttcgatgacgagatcgaaacgatccgggtgtttgacgaaaacacgcagcatacgacgggggacgcggaaagcatccgtatcctccccgggcgcgagttcccgatcgatgaggcgggcgccctcacgttccgcaaaaactggcagaccgccttcccgaaggccggcacccggtcgtctgtctataaggacatcgcgaaccacgtcccgagcccggggagcgaatactatctgccgcttttctttgatgagacggcaacgatttttgattacgtgggagaggacgcccggtttttcctcacgggagacgtgaacgcggagcttgagcggttctatcacgagaccgaggggcggtacgaattcctctcgcacgacgccgagcatccggcgctgcctcctgagcagctcttcctgtcgcctgaagcgttcttcaaggcactcagcccctttgcccgctggaaactcgtgacatcgggagacggcacccccgtgttccccgatctctcggttgaccggagagcgaaggatccgcttgagcatctgaaggcgtaccgcgcgaggacgcagaccgagaagcggaggctcctcatttcggcgtcatccgccggccgcgaagagacgattctcgaactcttccgcgagtatgggctcgccccggaccggacctcggggttcagcgcgtttattgactccgactccccgttctcgatcacccacgggccgctttatgacggcttcgtgatggatcagccgaagatcgcggtggtgacagagaccgagctctataaggcgaacccgcgccgcaacgtcaggcggcgcgaccggaagacaaacgtcgactccatgatccgggatctctcggaactccggatcggggaccccgtggtccacgtggagcatggcatcgggcgctatcaggggctgattacgctggatacccaggacggacccgccgagtgccttcagattgattacgcggacagcgcgaaactctatgttccggtgtcgcagctccatctgatttcccgctactccgggtctgaccgtgaccacgcgccgcttcaccacctcgggaagggcgagtgggaaaaggcgaaacggaaagcctcccagcaggtgcgggacaccgcggcggagcttcttcacctctacgcgctccgggaaaaccgccccggaatggtcttcaaggtgtcaccgaccgactacgaagcgttcgcggaaggcttcccctttgaagaaacccccgatcagcaggcggcgattgacgcggtgctcgacgacatgcagaaagggaaaccgatggatcgcctcgtctgcggcgacgtcgggttcgggaaaaccgaagtcgcgctccgggccgccttcatcgcggtgatggggggacgccaggtcgcggtgctctgccccacgacgctgctcgcggagcagcatgcgcagacgttccgtgaccggttcgcagcgtggcctgtccgtatcgcggagctctcccgcttccgaagcgggaaggaaaccgcggcggctctcgccggactcgaagcgggttcggtcgatatcgtgatcggcacgcataagctcctctcagacaccgtgaaattcaagaacctcgggctcgtcatcattgatgaggagcaccggttcggcgtgcggcagaaagagaaactgaagtcgcttcgtgccgaggtcgacgttctcacgctcaccgcgaccccgattccccgcacgatgtcgatgtcgcttgaaggcgtgcgggacttctccgtgatcgcgacggcgcccgagcggcggctggccgtgaagacctttgtgcggccggaaagcaacgcgctgatccgggaagccattctccgagagctgaagcgcgggggccaggtctacttcctccataacgatgtcgacacgatccagacgcgctacgagcggctgcttgagcttgtccccgaggcccgcatcgcggtcgcccacggtcagatgccggaacacgcgctggagcgcgtgatgcgcgagttctatcagcagcactacaacgtccttctctgtacgacgattattgagaccgggatcgatattccgaccgcgaacacgatcatcattcaccgggcggataagttcggtctcgcgcagcttcatcagctgcggggccgcgttggccgcagccaccaccaggcctacgcctacctcctcacgccgcccgaggcctccatcacgaagaacgccgagaagcggcttgaagcgctccagaatctcgaggatctcggaagcggcttctacctcgcgatgcatgacctggagatccgcggcgcgggtgaagtgctcggcgaacggcagtcgggcgagatcgcgaacgtgggcttcgacctctataaccaaatgctgaaggaagcggtccgggcgctgaagcgcggtgaaaccccggatgtcgagcatccgttcgcatccgtcgcggaaatcaatctccacgcgccggcgctccttccgtccgactacgtgccggacgtgaaccagaggctcgggttctataaggaactcgccgcggccgaaaccccggacgcgatcgacgccgtggtcgagaacctcgctgaccgctatggcgagattccgcctcaggcaaagaccctgatcgatgagcaccggatccggctcctctgcgagaagctcggaatccgcaaagtggacgcgtctgaaaaggtgatctatctcacagtcgccgataagccgaaatttgagccgcttaaattcatcgacctcatgcagagccggcgcgatatgcggatgacgggcccgaaccgggtccagatcgcgcagtcaacagggaatgttgagtcacggattgcggcggtcaagggaattctgggtaaacttgagtaaatttacctaatcccaaaaaccttaaggcacccccgtgcgaaggagtctagcgtgacgatgacgccgctttcttacgatctcgtgattcagggaaaggatctttcccgcagcaatcttccggctgatgcggcgggtctcgccggcttcatcgctgaaatcgcaccgggggccgtgaggctggagtccgtgaacccgctcaccgctgaacccgtgatcggaaggctgcaggaagcggggctcgacgccgcgatggtgcggcacggcctgaaactcacggaattccgcctcctcgcgagtgacctcgacagcacgctggtcgcgattgaaacgctcgacacggtggcgaaaaacgcgggttacggtgacacagtcgcacaggtgaccgaagccgccatgcggggcgatatcaaggattacgccgagagcctcagactccggatcgcagcggtgaaggggtgccccgtgaaggcgttcacagatttcgcggaaacgatgccctacagcctcggcgcggaacgctgggtaaagagctgccgcgcggcggggctcgagtgccacatcgtgacgggtggttttgatgaagtcgcggccgcggccgcagtgaagctcggcgcgaacggcttccactgcaataagctcgggatccgggacggagtgctggacggcaccgtgacgggccctgaagaaaacggcgggaagattgtggattcggacggcaagcgtcacattgtggagcagctcgcggcggagcgcggcatcccggcctgtgacgtgatcacgatgggcgacggctggaacgacgtgaagatgctggaatacgcgggactcggcatcgcgtaccacgcgaagccccgggtccgcgccctcattccgcatcagatcaacagcctcggacttgactcggcacttaactggtttgcggacggtccgtattgggccgagcgcgccggggtctaaaatcctatccaaacgcagcccgaacgcgtccctgacagaagaagaggcagaacacctatgaagcgcttcacgatttcgcttgatgacgatcttgcggtccagctcgaccgcctgatgaaggaacggaattacagcaaccgctctgaagtcttccgggatattctccgcgacatcatcgcgaaagaggatctgacgcggggggatgccgaggcgctcgccgtggtgagctacagcttcaaccaccataagcggcagctcaccgagcggatgaatgaaatccagcacgcgaatatcggacttgttgtcaccgcgatgcatgtccacgtgtcgcacgaggtgtgctccgaaaccatcattctccggggaccggtgtccgagattcagagtctcgcgctctcgattgtctcagcgcccggtgtccactacggcaagatcaatctgattccggtagtgccggatgaaggggatcatgaccatccgcatgaacatgagcatgaccacgggcacagccatgatcacacggacgaacacgcccacgcgctcccgcacacacatccccatacgcacgaagactgagcgtcatcccgatccggcggcaccgcgctccccccgtgccgcccggccacaatcatttaccgatcttccggctctgcatcacacttccgccgttccgccgatgcaaagagtgatgtttcatccctacaatagggaaagacagccgtcagtggtttctgaagcgctgggttcagaggtttccttctgacagactgtccatcctttcccgcggaaccggaattccgatccgcgatctgtcgcttatggctgaagaaaaaaaagaagatcagggcagcaacacgcttgtcatcgtcctctccgtgctcctcgcgatcctcgtgatcggattcgcgggctggggggcgtggctctggacgcacccgaggctcccgccgcttgaaggcaaaatcaccgcggcgtcgatcgacatcggaagcaaaattcccggccgcatccgtcagatcctcgtgaaggaaggtgaccgtgtggggcttggagaccggatcgctatcgtaacgatcccggacgccgaagtccgggcccgcgccgaaacggcctctccgatgcggcatgaaaggggaagcctcaaagacgaaacgatcctcggcacaagcgatatgtcagacgcccgcacggcgtacgaagccgcgatcgccgcggaacgcgctgaggaaaagaattttgcccgggtgtccggtctttaccgccaggggctcgtccccgagcagcggctggaagaggaacgcgcggctctcgactccgcgcgcgaagcggagcgcgccgcgaaagaagcattcatcctcgggaatcagggagcaacccctgccgcagcgtcacccgcagcgggcaataagggaaagagcacggcttcaaaaaacgacgccgtgatccggagcccgatgaatggggaaatctcccacattttccttggaacaggcgacgccgcgccgagcggcttcccgatcgctacgatcgcggatctctcctccccctgggccgcgttttcggctcccgcgagcgaagcggccggccttaaagagggggacgtgattcatatccggattccggcgatcggaggccccgcgcacgaattccggattgagacgatccgcgagcggcgaaacgcgaagggcggtgacgcggaaccgattgaggaaatccgggcgcggcccctgaaaccgatcccggggcttcagcccgggatgtccgcacttttcgagcgccgctcctcataaaacaaaaccgcttcagtgagtcaatctgaagcggtttttctatccggcggtgagaaaatccggccggttattcttccacctggagcgccacaaggtcatgctcctcggtacggacaatcttcgcccgcacgaattcgccaggcttcaccgggcgggtcaccgtgacgtaaacaacaccatccacctcgggagcttcgtgagccgtgcggccgaccgcgacgccgtcctcatcctcaggttcgtcaatcagaaccgtctcaacgttcccgatgcggcgcttcagcttcgccgcggacacctcggcctgcacttccatgaagcggcggcgacggtcttccttcacgtcatccggcacagcgtccgggaagtcgtttgccttcgcgccgtcaaccggcgaatacgtgaagcagccgacacggtcaagctccgcctcgcggataaagtcgaggaggtgctggaactcctcctcggtctcccccgggaaaccgaccacgaaggacgaacggatcgtgagatccgggcagatctcgcgccacttgcggatccgctcaagcgtcttctcggcgtgcgccgggcgcgccatgcggcggagcacgtcaggatccgcgtgctggagcggaatatcgaggtacgggaggatcttcccctcagccatcagcggaataatgcggtccaccatcgggtacgggtacacgtagtggaggcggatccagagaccgagacggccaagctcaacgcagaggtcctcaagacgcgtatgcacggggcggccgcccgcgaacgcgagcttatagccgaggtcggaaccgtaggccgacgtgtcctccgcgatcaccatgatttccttcacgccgtcttccttcaggctccaggcttcgcgcatgatggagtccatcgagcgggagtgaagcttgccgcggagctgcggaatgatgcagaacgtgcagtgattgttgcagccctctgaaatcttgaggtaggcgtagtgctgcggggtcagacggacaccgccgcccggaacgagatcgaggtacggggcgtgaggagccgggaggtgctgatgcacgagcttcaccacgtccttctcttcctccggtcccagaacgccgagcactgccgggttccgcttcatcacgaaattcgtgccgtccgcgtcctttttcccgccgaggcaccccatcacgatcacgcggccgttttcacgggtcgcttcggcgatcgcgccgagactctcctcaatcgcctcgttgatgaacccgcaggtattcacgatcacgagatccgaatcccggtagttatcgacgatcgaatagccttcgctccggagctccgtaatgacgcgctcagagtcgacgagcgccttggcgcagccgagggacacaaaaccgatcgtcggaatccgacggggcgtttcgttcagcatggaagaagatttccttttgatttcagtctttaagtagtggggaggcgattataagggatcagagcgctttcggttcaatccggacaagcgccgcgtggcgccccgtctcaccgtgatcgcggcggtaactgaagaagtgaaccggatccgcgtaggtcgagaacccgcagtccgcgatatcctcacgcttcacgccttccgacacaagagcgtctgacgcgagccccgcgaggtcgcagagccacttcccggcttccgctttcggtttaaagcgggacgcggcgtcagggagccgcgctttcatcgcgtcgaggacatcagtccccacctcaaagtcatccgcgccaatccggggcgcaagccaggcgaggatccgggtatccggatccgacagtttttccctcaccagcttcacaccgtcctgcaggatcccggccgcgagtccccgccatccggcgtggagcgcgaccgcgattcttccttccggatccgtgagaatcacggggaggcagtccgcggtctgaatcgcgagaaccacacccggggtcatcgtccagctgccatccgcctccgcttcaggcgctgcttcatccgcgtgcacgattgccgttccatgcacctgatgcagccacttcgggtcagaccccgcataggctgagagaaaaccgcggttcgtccggacgcagaccttcgcgtctccgcagtagagaccgacattcatgccgcagataccgtcctcattcccgaagggtcctgaagacaccccgccctcgcgaagcgtgaaacaggcgtgaacagaagccggtgcctgccactgaggagtcagaacagcaagctccggtttttcaagattggaagccatgagattagtcgctgcagaaaagagttaaggattgggggctattgtagtcagcgcgccgcgcccggccgaggctctgagaccccaggccgggagaaatcgggttttattcccagtcaggcgctgcgccaagcggcgcctcttcatcaaacaccgtgaccggctgatcaagcggaccgaagtcaagcgcctgcatcacttccgcgagatccgcgggaggcgcagcgaaccactccatccgctttcccgtcaccgggtgcgtgagcccgaggcggctcgcgtgaaggcactgacgcttgatcgagaaaaccgtgccgtcatcaatcggctgaaggccgccgcggtacacggggtctccgagaagcgggagcccgagactctcgcagtggacgcggatctgatgcgtgcggccggtttcgagacggcaggcgacccagctgatcacgcgcttccctgcgttcccgagcgccacacgggcgatatgggtgcgggcggagcgcatcgagcccggaacgtcgacggcaaaccgcatcgggtgccgggggtcacggccgatcggacggtcgaccagcgtccgctccggggcttcgccccgaagcagcgcccagtactcacgcttcaccgtgcgttcctgaagctgacggacaagggaggtttccgcttcaagcgtcttcgcgaccaccatgagaccggtcgtgtcgcggtccagacgatgaacaatgccggcgcggggcagcacccgaagctccgggtaacggaaaagaagaccattcagcagcgtatcgtcccagtgacccgccgccggatgtacaacaaggccggaaggcttattcacaacgatgatcgcgtcatcctcatacgccacgtcaaacgggacatccgcgggcgtgaaggcgagctcctcgggagacggctgcgcagtgaccgcgaccacatctccctcatagaccggatcccgcaccttatcgaccggctttccatttaccgtgaccgcgccctgcttgatccacgtctgaagacgggagcgcgaaactttgggcatcagggcggcgagtgccttatcgagccgctccccggagttttccgctgagacaaggtactcggtaaagttttcttcctgttccgtttcgcccttggtctcaaggctataattgaccacacttttcaatttctggtttcctagtaaatgaagaaagcattgcgccgcaccgccctcggcatttcgatggctgccgtcatcacgctcaccgcctcctgctcctggctctcgactgtgaacgatgataaaacgatcaactggtccgctgacaagctttacaccgaggcccgtgactcgctggataacagcaactggtcgcaggccgaagagtactataccaagcttgaatcccggtatccgttcggacgctatgcccagcaggctcagatcgaaatggcgtacgcctactggaaggacggtgatcccgcccaggccattcaggcatgcgaccggttcctgcgttcgtatccgaatcaccccgcgagcgactatgtgctctatatgaaggcgcttgccacgctgaatgaggatgatgggttctttgcccgcctcacgcgtcaggacatctcggaccgcgacgcgcaggccgcgcgtgacgcctgggatacgttccgcgaactcgtgcagaagtacccggattcccgttacgctcctgaggcccgccgccgtctgaatgaactcattctggcgcaggcgaatcacgaagtgaaggtggcgagattctactttatccgccacgcttatgtggccgcggttgcccgcgcccagcgtgtgattacggattactcccgtacgccgtaccgtgatgaagcccttcagatcatggcggacagctacggctacctcggcatgaaggataacgagaaggacgtccgccgcgtgatcgctctgaataaggagcaccccgaaacgcaggtgaagatgccgaagattgagaagccgacgatcgaggccccgaagaacgtgccttcgacccaggtgcgtcagcaggcgaagtaaaccgttgctgaagttcaaagcgcatcattcaagcccccgcttcctcaacggaacgcgggggcttttcctgaccgcgggaggaagaatccgcgaggcggattaagctcgggcaagtgagaactgttttttcccgcagcggaatgaagcccccctcaccgcctccttcattcccaattccgtctgttcccggaacgcgaaagccggtaccccggctgccgcgctctttctcctttcctctatatctttcccacagccaaaagaaaacctccggaagaaggaatcttctttccggaggtcgggatcccgatctcccgagagcgcatcccgggagagtctgaggagcgttacagcatttcgtcttcgctcagaggatcggtaccgagttcaccttcgaggcgggagacaaccagagccgaagccgcgtcacccacgacgttaatggacgtacggatcatatcgagaatacggtcaataccggcgatcagagccacagcctcaagcggaataccgacctgcgtgaagacaagggtcgtcataatgaggccggcacccgggacgccagccgtgccgatagcagccatcacgcccatcagaacgatcgtgaccatgtcggtcggggacaggttcatgccgaagatttcagcagcgaacacagcgcagacgcccatgtaaatggccgtaccgttcatgttgatcgtgttgccgagcggaatggagaacgtcgcgatagccttcgaagcgccgagctgacgggaagcgcggaggttcagagcaagagcagcggcggacgagcaggtcgtgaaagcgacgagccacggctcaaagatgcccttcaggaaggtcttgatcggcatacggatcacgaacttcacgaggaagccgtaaacgatgatgcagaagagagccgtcgcgatgaaggaggcgaggatcagcttgccgagcggcagaagaaccgcgaggccgtgcttcgaaacggtgtaagaaatgaggccgaagacgccgatcggagcgtagtacatgacaacgttcgtgaggcggatcatcacgtcgcccgtgagctcaaagatcttgagcaggggcttgccgcgttcaccgaggccggcaaggcagcagccaaagaagatggcgaacacaatgatctggagcatgctgcccttcgccatggcttcaaccgggttgatcgggacgaagttgaggaacgtctcaacaatgctcggggccttcacaaccttagcgacagcaccggaggtggaaaggtcaaggccgaggcccgggttgatgatctcagcaataccgagaccgaaggccacagcgatagcggtcgtgatcaagtagcagagaagaatcttcacagctacgcggccgagcttggaaatatcggtgatgccggcagcgccagcgacgagggtcgcgaagacgagcggaacaaccaccattcggatcagtcgaataaacaggtcaccaagcggcttgaaccaagtggtgcctacgtcagccgaaacaaacgcgcccacgatgacaccgaccacgaggccgatacacatctggaccggcagacttagcagcaagctctttttcttttctgccatacatcctcccacataccggcggatttcccgccgccgttagtttgcgccctgccccgttctccgccggaaaacttacctccgaagggaaaagaaccaacatacaaacggatagggcttagttatcagattctccgtcaatattacactttgaaagaaatctgcaaaataatgtttctgtttccttagcgtctaggtactatccggtacgccttttatattcaataagttatgaagcggattattccctttttcctacggcgtttaccgtagtccggagcaaggcccttaaccggacatataaaataaggttttgattattattaattaaatagactgattaagcataaatccttattcgcgtcacctcagatttgactcatatcaagacaaaaacagttgaaaaacaaggaatcccctgtttctgggtgtctctgaagagcattttccgcggatgcccgaacggcgggacctgaggcacggtcacaggccggtcatttttgttcacgattgtcacgctccgtaaaacggtttcccggcagtttttgtcctacactcaagtgaaaaattgcgtttcctctgaagcggagccgcgcagacggctccttcgggaactcttccaataagggaattacggatgaaataccgtctgatcttcctcgccgtggcttccgcgtcgctcgccctttcgggcgccgccgcatatgccgcactccccgcagccagcgctgcggtttccgctcccgcgtcacacagcgcggcagctgaattctcctggtacaaggcagctttcccctgggatcactccgacctgaagccggatcccgcgatgacgtacggcgttctcccgaacggcgtccgctatgtgatcctgccgcatcagacgccgaaaggccgtgtgtcgctctacctcgacgttcaggcgggatcgtactttgagaccccggagcagctgggctacgcacactatattgaacacatggcgtttaacggcacgaagcacttcgcgcccggctccctaattcctttcttccagaagaacggcatgagtttcgggggggacacaaacgcgtcaacggaccccgtggaaacgatctatacactggatctctcctccgggtcatcggatcagctgcagaaagggctctcgatccttcgcgactacgccgacggccagctcttcattccgaacgaagtgaaggaagagatggggatcatcctctctgaaaagcgggcccgggactctgaatcccagcaggccgaggacgcgttccggaactggttctaccggggtagcaaattcacggacgcgacgatcggaaaaacggaaaccatcaaggccgcgaattccgataatctccggccgttctacgacacctggtaccgctcggaccgcatggtcgtgatcgcggtgggtgacgtgaatccggagaaaacgaaggctgagattgaggcagctttcggttccatgaagaaagccaccgcgtcggaccctggcgccgtgatcccgtcgctcgggaatccgaccgcggccggcgtccgcgcctgggtgagcacccggaaggaatccaccacccggatcatggtctacgtcatgcatccgcgccgccacgaggcgccgtcccgcgcggcctccgaacaggatgtggcggacggaatcgcctcctcgatcttcgagcggcgtctgcagcagcgtgaagagaagtctcccggcatctggcgcggcgcgggattcagttccgatatccggagcagcctgaccccggaagccgtcatggtcgctgtgacgtctaacgacggctggaaaaaggctctgacggggcttgaggaagaatccgcctccgcgatcaggtacggcttcacgaaggaagagcttgatctcgcgctgaagcgctacgaggagaagctccgggccgccgtgcagaactataacggctatcagagctccgatatcgcgggagcgatcgcctggaccatcaattcggatcaggtggtgacgagccccgagcaggatcttgaatttttcaattccattaagaaagacatgacgctcgaacgcgtcaacgccgctttccgcgacgcgtttaagcccgaaaaccgcacgattcagctctctggcggcgcgaaagcgacaaccgctgaagtggtcaaagtctggcaggaggctgcctctcagcccgcgaagccgctcgccgagcagtcaaccgtgaagttcccctacctcacccttcccgccatgccgacggggacttctgccgccgcgtggcagccgattctctccggcaaggcgttccagacccgggtcgcggcaaaggacctgaatcttcagattgaggaggcgacgcttccgaacgggatccgcctctacctgcagccgctcacgatggaaaagggcaccgtgcaggcaagcctcatcttcggctccggcacccagacctacgaggatatcgacgcctggaaaccgaaactcgcgcagtccgttcttcagcagcatggcgtcgggaagctcactcagacgcagaccgcggataccctcggaacgaaggggatcgcggtcgcggaaagctattcgccagaccacttctcgatcagcggcaccgcccagaagggcgacgtgaagacgctgcttgaggcactctggacccagtatcagcagccgaccgtggacgccgcggatctcacgcgggtgaaggaatcgctcgcgcagaaccgccatctgctctacgaaaccaccgcgggcgccgcgagctggatgccgctcgcctggttcacaggagatcttgaacgggtgcggccgctctcccccacgaatctcgaccgctacacgctccctgctgtgcgtgaagtgatcgccgcgtcccgcacagtttccccgatcgcgatcgtgatttcgggtgactttgataagaaggccgcggtggacgctgtggcgcagctcttcaacgccgagaagaccggcacggaatccggcgtcaagcgtgagtcgccgctcagcttcccctcgggccgggaaaaccgcgtggtgatcgcggataccgctccgaaagcgttcctgaatgaggcgtggcgcctcccgaacaccgacggtgctgaccggaagaccgtgatgacgtatcgcatggcggcctctgtcctctccgataagctccgtgaggtgatccgcgagaagctcggcgcggcctacagcccctggagcttctactatcaatcaccgcggaacgacggtttcggcttcatctgggcctcggttcagacgtcccctgaccagctcgcgctcgtccggaagacgcttggccaggtgatgggagacctcgcctccaaaggcattacggaggatgagcttgagaaactgaagaaaccgatgatcaccgcgcttcagacgcagcggaaactgaacgtccggtgggaagcgcttctcaggcttgaagtgacggagaagcagccctggatcaagtggaatgaagaggatattccggcgctgcaggccgtgaccgcggatgatgtgacttcggctctcaggctcgccttcaagagccagcccgcgattcatatcatcacgacggaagataaggcggaataagccgcagcgcttccttccaataaaaacaatgccccggcgggtttcagaaccgccggggcattttgctggattcgaaagcgttcagccgctgatcaggcttcagacgccttgatcagcgtttcgagcgcggtcttcgcggcttcaagctcaggcgcccggaattcaggcgcgagctgcaccgcggcgacgagattccggacaaaacggccggcttcttcgccgaaaagctgatccttctgattcgcgagatccgtgaggaaatcggcgagcacgggctcgagcccctcactcttcaggaacccggattccgggtgatcggaaaagtaattgaggtaccagtgagccttctggagatcctccgtcggacggcctttgaagcggcagcggagcacgtacttcagggcgtttcccgtcgtgaagtcgaagtgcgaggtgagctcgatcacttcgcggcggtaatgcgcggcgtagtgggaaggatggttcacggcctctttggacgcaccggcgacttctgaaatcggcatgttttgggttcctttcgtttttattctgtgaaagctgaccgcctatcgtaacgcagagccccggatccgggcggcgcagctcggtgtgaatggagggaggaagatcagttcccttcccccttcgtctttttcttacggcctgcaggtttcttaggcgcctccgcccgctcagggagataagcaagcgcccgcatcgggtcctgcgtccggcagaagtccggaagactctccaccacagttctcccgtaggagttccacttcgtgataatccgggagtcacagagaataaagaccccgtgatccgtttcacttctgatcagacggcccgcaccctgacggagcagcgtcaccgcttccggcacctgatactcaaaaaacggttttccgccctgatcccggatccacttgcagcgggccgcgaccaccggatcatccgggggcgagaacggaatacggtcaatcacgacgaccgagagcgtctcgcccttgatatcgataccttcccagaaactcatcgagccgacgagaaccgaggccggatcctttcggaattcctcgataaggccgcgccttgtgccgtctccctgacggagaacgcgaagcggcatcccgtcttcattcgcgagctgcttcaccatgtccgcaatgatgtccacggcgcggagactcgtgcagaggaagaaagtgcggccgcccgcctttttgacaaagggccaggcgctccgtgcgacagactccgggaacgccggagaattcggttccgggagtcccttcgggagataaagcgacgcgaggctgaagtaatcgaagggtgagggccagctcgcggttttcgcgtccggaagcccgatttccgtgaggaaatgactgaagtctccagcgactgaaagggtcgcggacgtaaacacccaggcttcgcccttctcgcgcctcagccggttcagatcctccgcgaacgagagcggcgtgttatagaaccgcgtcccggtccttccctgctgcacccagcggactcttggagattcgccatccgacaccgcatccgcttccgcttcgagccccgggagcctgagcggcttccggtctatcccttcagggaccacatccgctgccgccgcgtcctcctcctgccccgccgcgaacatcagccagtcattcacctgttcgataaagttttcgcagcgcgggagaagaagatcgatatccgcgttccggcccttattcgccttgaggacctcactcagatcggagagcgcccgcccgagctgctcaagatccggaatcagaagcccgaggtccggaatatcatcaaccgacttccggtctccctccaggaagtcgagctttgtcgacacggaaagcgccacttctttcgcggacctgtcgacctcgctcgtcacggcgtcccagttcgcgccgtccttcgcgtttgttttcccgagctgcagcgtgtcgcgcgcaagttccagcaccgcgttcgttgaaaagagatcgccgaagaagtctgtcgcgatcccaggaagctgatgcgcctcatcaatcacggtgagcggcatcgaggggaggatttcgtctgcaccctcatccgcgatcgcgagtgagctgaggaacaggtgatgattcacgacgagaatatcggcttccttcgcctcgcgccgtgctttcgtgaggaagcagtcatcgtagagcgggcacttggtgccaaggcaattctctttggtcgacgtgacaagcggccagatcattgcgttttccgggatgtggccgagttccgagcgatcccctgtctggctcgtgcggctgaaaatctgaatatctcggaggtagccgacatcttccttggacggcacccagtccacttcttccagccgcttcttgcagatgtagttcgagcgccccttaaggagcaccgtgttcgcgtgaaggtccagcgcttcgagaatgagcggcaggtcctttgagtacagctgatcctgaagcggtttcccggcggtcgacacgagaacccggataccggaaaaaagcgccggaacgaggtacgcgaacgttttgccggtgccggtgccggcttcagcgacaagcgtccccttctcttcgattgtccgcgcgacagcctccgcgaactcccgctggctctcgcgcggcacaaaggacgggagcttctgcgtgagaagaccatgcgggctgaaggcctcgcgcacgtgctgcacgagccgcgaaggcttcccagcctcccccgccggccccggcgctaatttctcttcacccgctttcatgtttcctgacctgttcctattttgaggaagctctgagcgcctggacttccgtccgctctgatctcctgaatccgtgagcgggtttatccccgcacgccggccgcttccgcggcagtattctcgcattctaatagttcaggtaccgctctttgacacatgcgttcgtcaaatggcggatatcgggaaaaagctgtaccctaactgagtatatttatgtatccggaaatcaaaaacaggcgggatcgatgaaccgcggttctgaaggccgcgcgccccgcatttccggataactgaccctacgacggacgcgctgcgcccgcggtttttgagagagaagagaaaggactatgaagacttacgaaaagtcccataagctcgaccacgtctgttatgacatccgcggtccgattatggatgaagcgaaccggatgatccgggcgggcgaagatgtgatgaaactgaacatcggaaaccccgcccatttcggattcaagaccccggaaccgcttctcaaggcaatggcggaaaatctcccgaacaccgagggctacaccgattcccatggcctcatgagcgcccgccgcgcgatcgtcgactactgcaaggaaaagggcatcccgaatgtcggcgtggatgatgtcttcaccggaaacggcgtgagcgaactgatcacgctttccatgcaggggcttcttgataacggagacgaggtgctcgtccccgcgcctgactatccgctctggaccgcctccgtgacgctcgccggcggcaccgccgtgcactatatctgtgacgaaaagagcggctggctccctgacctcgacgatatgcgtaaaaaggtgacgccccgcacgaaggcgatcgtcgtgatcaatccgaataaccccacgggcgttgtttatccgcgtgaaatcctcgaagggatcgtgaagatcgcacgagaatttgatctcattctctacgcggatgaaatctatgaccgcctcgtgatggacgggatcgagcacgtggcgctcgcctccctcgcccccgatctcctcaccgtgagcttcaacggcctctcgaagtcccacctgatggcaggttaccgcgtgggctggatgtgcctcgcgggcgacaagcgccgctataaaggctatatcgaaggcatcaatcttctctccgccatgcgtctctgctcgaacgccccgggtcagtctctgatcgctccggcgctcgctcagcgcgagagcacgaaagagatgctcgttcccggcggccgcgtttacgaacagcgtgaatgcatttaccggatgctgaatgacattccgggcatctccgccgtgcgcccccaggccgcgttctacatcttcccgaagatcgacgtgaagcgcttcaatatccatgatgatgagcttttcgcgcttgacctcctgaagcaggaaaagatcctgatcacgcatggccgcggcttccactggatcaacccggaccacttccgcatcgtctacctcccgcaggttgacgtgctgacagcggcctgcgaaaagatgaagcacttctttgagcactaccagcaggcctgatcaggcatagcgtcagagcttatgaaaaaagcttccggttcatcaccggaagcttttttgtctcccccgaaagaaaatcctccgggactcggacgcttttactggaacgggttaatggattcgctccgctctttccgctcagcctcatacttcttctgaagctcgatacggttctggcggtcctgctcattccgggccgcgcgttcagcgcgtttctgagcgaggtcagcccccttctgctcagccttcgccttgcggtcagcggcgtccgccgcgcgcttattgtaggccgcgacattttcgggttccttcgcagccttcgcggcgtcagaggcgcggcgctcagcgacgcgctccactgtcttatcgtgctgctcaacacgcttcgcggcagccgcggcgtcttcaaccgccttggcctggcgctccacaatgttcgcctggcgccgggcataggtttcttcgttctgaagttcctttgcctgcttctcgagcgcgtcactctgagccttcgcgacccgttcctcagcccggatccgggcttccatacgggattcggcacccatcatgcgcttcgtcggagcgttgtcatcgaggaccgcaccgatttcacccgcgctcgcttcttttccttcctcaatctttgcctggagctgacgctctttttccttctgagcgttttcggcccggagccaatccttcgcctcaagctccacacggcggaattccttttcacggtcataggaattcacgcggttcttttcccagcaggcgctcacgaaaaaccggtcaatacaggcatcgtgttcaatcgcttcctgcttcttcagcgccgcgcggttgcggtcaacgtccgcgagcgcggcttccgcctcgtcatgcgtcttgatggagccggcgcgccagcgctggagaatgctcgagtctgttagtctctcagccccggtcttcggagcgggcgtgagacgcgcgggatccacatcagcgcctggcgcggcattcgccttcggtgcccggatcgtggagccagaggtcatcacggaaccggatttcccagcaatgccggtgccggccgcgaagacagaacctgaaatcagcgtaagcgtgaaaagacaaactgcagaccgggcgaaatgcatggaaataaaacctctgtactggggacaagccggagtcatgaccgggattctcaagtttaccgcaggacgcctgaaaaatcggagctcctcccgtaaggaatcggcctgaatcgcatccggctgtaaaaaagggagagaagcaatggttctcccccctctcttcagactgtcacgcggccggtcagctattcatcgggcgcccgagaaccgtgagcgccgcttcccggatcgcctcagcaaacgtcgggtgggcaatcgtcgtgagcgccacatcctcgcacgtcgcttcggtcgcaaggataaaggacgccgcggcgatcagctctcccgcctcagaccccagaatatggattccgagcacccggtcattctcagcgtccgccacgatcttcacgaacccgtctgtctgaccctgagcccgggcgcggccgttcgcggagaaaaacgccttcccggccttcgccgtgtagccctcgttccgggcctcggcttccgtgagccctacccaggcgatttcaggatgcgtgtaaatcacggaggggacaagccggtgattgatcaccggatgctcacccgcgatctcttcggcgaccgctacgccttcgtcactcgccttatgcgcgagcatcggtccacgcacgaggtctccgatcgcgtagaccccggggagattcgtgcggcacccctcatccacttcgacaaacccccgggcgtccgccttcagccccacggcttccggattcacggactgcagcgccgggacccgcccgatcgacaccatcagccggtcaaacaccgcttccttctcttcatccccggtgcggtaacgaaccacgacaccgtccgcccgcttttcaacggactccacacggcacccgaagtggaacgtaaagccggtcttcttataaacctgaagcgcggcgcgcgaaatctcctcatccgcgattccgaggaaaccgggaagcgcttcaagcatcgtcacttcggcccccagccgctgccacacagcgccgatctcaagcccgatcacgccggccccgatgataccgaggcgcttcggaaccgaggtctgctccagacctccggtcgaggtgagaatcgtcttttcatccggcgtaaccccgggaagcaggcggggaacagaacccgccgccaccacaacgttcgccgccgtgatttcggtgccgtccgaaagcccgatcttccaggcaccgggctttccgcccggaaggaagtgcgcggattccgggaagaattcgaccccgtttttcttaaagagccagagaatgccgtcgttcgacttccggaccactttggcgcggcgcgcctgaatcacatcgagatcaaaggacgccggtccgacattgataccgagttcgcggaatgtctcacccgcggactcgtaggcgagagaggacgcaagcatcgccttggacgggatgcagccgacattcgtgcaggtgccgcccggggccgcctttccatccgcgtccttccagggatccgccgccgcggttttaaaccccagctgggctgcgcggatcgcgcattcataaccgcccggccccgctccgatcacaaagacatcaaaatcaattccatctgccatcaggcgccccccttaaagaaagatccggacaggattctcaatgagtgaacggaagaagagcagcgcgtctgacgccgtttcccgctctaccatgcggctatcgaaggaaagcgccgccaccgccacacggcggggttcccaggtgccgttcttccaaaccgctgtttcctcagcccggtgcaccgcaagcgtcgcggcctgaggcggcgtcacagcgggggtcgatgaaatcgtaccggcgccgcgccccgtgatcagcgtgatgtcgccaagcgacagttcctgcggcgtgaggctacccgcctcagcccggctcttcaggtctgacaagcggcggaggagccccgcgatcccttcgcggcgggacgcgacaacagccgggtaaatggtgccaagcgccgtatccacggcgagattcacgagagccgctccggatgccgcggccggcgcgatcgcggggaaggcttcggccgtacgggaaagcgcggcggcaaacaccgcggacgcttcaagcggcacgccttcacgcgcttcaaaggacgccgactcgctttcgatcaggtcaaaaagggatgtgacatccaccttctcgaaaagcgtcactgcggccgtgccgaggctcgaattcagccggactgaggccgccgctgacgcgacgcgcgaagtgtcccgcgacaccgcgtgcggcgcggggaagaaaacagaaaccggggactctgccggcgcggcagcctgcggcgcgggagccgctgccggtgccgcgggcgcaggaaccggcgcgggcgtcggaagagcggcggcctttgcttccacgtctgccttcgtcacgcggccgccgaccccggtgccctgaagcgcgcgggcatcgattccggcttcagccgcggccctgagggcggacggcatcacgcgggactcagcgggtttcgcagccggagccggggcggctgccggagctgcagcctcaggagccggcgcgggctcgggggcaggaaccgaagccacggcggctgcggctgggacattctcggccttcgccgcgccctcttccaccttcgccacgacatcaccggtcttcatcgtatccccttccttcacgaggatctcggttaccacaccgtcgcacggcgcgctcacttcgaggaccaccttatccgtctcaagctcaacgagaacctgatcctcttccaccgggtcacccggcttcaccttccagccaagcacctcggcgctcgacaccgattcggatagttccgggactttgatttcaatttcactcatgcttatctctccggggcggcgaaatcttccgccgccctccgatcaggttgtcgttattcgcccttcacaccacgccaggacttcacaggcgtaccgaacgcggcttccagcagcgccgcctcctcgcgcttgaatcgcgcggcgtagcccgtcgcaggcgccggattctcatcacgcccggcgtgggagagcctcacgctgctcgggatcagatcaaggagctgcgggaagagcgagttccacgggccctgattgcgcggctcatcctggcaccatacgacttcgtcgagccccggatagcgggcaagctcggtcgtgagaagacccgcggggaacggataaagctcttccacccggataagcgccacgtcgttccgcgaaagttcctcacgcttcttcaggaggtcgtagtacacgcggccgctcgcgagcacggcgcgcgtgacgcgggccggatcgaccgccgcgtcaccaatcaccggctggaagccgcccgacgtgaggtcacttaaggggctcgcgacattcggattacggagcaggctcttcggcgtaaagagaatcagaggtttacggtacggacgcagcacctgacgccgcagcacgtggaaaatctgagctgcggtggtcggctgcacgacagagaagttgtcgccagccgcgagctgcagatagcgttcaacacgcgcggaactgtgttccgggccctgcccttcgtagccatgcggaagcatgagaacgagaccattctgacggccccacttcgcttccgctgacgaaatgaactgatcgatgattacctgagcggtgttcgcaaagtcgccgaactgcgcttcccagatcaccagggcgttcggcgatgcggacgcgtagccgtactcaaaccccatgacggagtattcagaaagcggcgaatcctctacggtaaacggcgcctgatagcgggaaacatgctgcagcggaatatattcacccacatcacgcttcgcgcggtcctgatcatgcagcaccgcgtggcggtgagagaacgtgccgcggcccgagtcctcgcccgaaatccggacggggtggccttcagagagaagcgacgcgaaggcgaggtgctcagccatgccccagtccaccggagccgcgccttccgccatctggcggcggctgtcgagcacgcggatcacgagcggatgcagccggaacgccgcaggcaccgcggtaatcgcgcgccccagctcagtcagcttcgcgaccggaacgctcgtcgcgggttccgtcctcgccttcccgatccaggggctccagtccaccacgtgcttcgcgcggagtgactccgggatgacgcgcggattttcactcttcttcagacggtcgcggacatagcggtccatttcctgcgcacggccttcggggatcgtgccgttttcttccagcgccttgccgtaaagctcacgcaccgtggggtgcacgtcgatcttcttatacatcagaggctgcgtgactgccggcgtgtcctgctcattgtggccaaggcggcggtagcagacgatatcgagcaccacgtcgcggtggaaacggaggcggcactccatcgcgatctgcgtcgcgagcgccacggattccggctcatcgccgttcacatgcagcaccggggtttccgtcaccttcgcggggtccgtgcagtagagcatggagcccttgtcgcggggatcagacgtcgtaaaaccgatctggttattgatcacgatgtgaaccgtgccgccggtcccaaagcctcgggtggaggcgaggttcagcgtttcctgcacgatgccctggcccgagaacgcggcgtcgccgtgaacgagaatgccaagcacctggttcccttcgcggtcaccgagctgatcctcacgcgcccggaccgagccgagcgccaccggatccgcggcttcgaggtgcgaggggttgaactccatcgacacccagatcgggcccgaggcggtcgggaccgagttctcaaaaccgttgtgatacttcacgtcgcctgacgggaggctctccgcagactcctttccgtcaaattcgtcgtaaagcgcctgcagatccttattctgaatattcacgagaacattcagtcggccgcggtgcgccatgccgatcacgatttccttcattccgcgggacgcggcgtcttccacgatccggtccatcgcgacgataaaggactcaccgccctcgagcgaaaaacgcttctgacccgtgtagcgcttatgtaggaagtgctccagcccttcgctcgcggtcagccgctcaagaatgtgcaccttcgcttccggcgtgaaggacggggcggagcgaatggattcaagcctctgctgccaccaccgcttctcttccggatccgtgatgtacatgaattccgcgccaatctttccgcagtacgtttcgcggagcgcttcaatcagttcacggagcgtcatcgaggcgcggccgaaatacgtgttcgcggttgagaaaacctgatcgagatccgcatcggtaagcccgtagtacgagggatcaagctccgggatcacacgggcaggctgatttttcagaggatccaggtccgagatctcggcgccgagattccggtacgcggcgacgagctgctgcaccgcgacctggcgctgcgcgaaagcgagcacctcattctccggaatgcagcttgggcgggcttcggctccggcccgggcgatgacgccggaatccgggaccgcgccggtctcaagctgcgtgaagtatgtctgccaggcttctgccaccgcgcccggggattccttccaccgtgcgtatagcttctcgatataggaggcgttgctcccgagcgccggccctgcggcggccagattcatctgatccatcttctagagactcccttcgcccgcacaaaaacgcgcgcggctcttttacgtgtctctattttgtcccgaaaacggaatgaatgacaggacacaggaaactcctgatttacggtactgcttttcactgtaaaagccgtttttctgcgtgtagaatcgcagaagaaccctgccggaaacacacaaaatcagtaccggccggacgtttctgaacacctggcgaagatcgtcccccgcgttcccgccgggcgatcccaaaatccaaggaaggagatagattcaaatggcttgtcctgcaaatcatccgaagctaaataagactgtccgcgtcgccgttacgggtgccgccggcaacatcggttacgctctgctcttccgcctcgcgagcggtgccgtgttcggacccaatacgccggttcagctgcagctgctcgaacgcgataacgaacagagcaaggctgccctgcagggcgtctgcatggagctcttcgactgcgccttcccgctgctcacgaaggttgtgacgacgagcgacccgcgcgttgcctttgacggcgccaatgccgccttcctgatcggctcgatgccgcgcggcgccggcatggaccgctcggacctgctgctcgcgaacggcccgatcttccaggaacagggccgcgcgcttgacgaagcggctgaccggaacgtcaaggtgctcgtggtcggcaacccctgcaacacgaacgcctacatcgcctatcaccacgccccgaatcttgatccgaagtgcttcagcgccatgatgcgtcttgacgcgaaccgcgctgtcgctcagcttgccgagaagacccagaagccggtctgctcgatccagggtgtccgcgtctggggcaaccattcgaactcgatgtacccggatatcaccgctgccacgatcgccggcaccgcggcgaccgagctcgtcgatgaagcctggtataacgactacttcctcccgaccgtcgcgacgcgcggcggcgcgatcatcaaggcccgcggcaagtcctctgccgcctccgccgcctccgccgcgatcgaccatatgcgcgactggtggaatggctccgacggccgtgtggtcacgatggcggttccctctgacggctcctacggcattccggaaggcatcgtctgcggcatgcccgtgatctgcaccggaaacggcaactacgaaatcgtgaaggatattgaattcacggctgccggccgcgcccgcctcgataagacggtggctgaactcgtgaaggaaagcgaaaccgttgctcccctgatcgcggagtaaccggaccgcgtgaagccgcgccggccctcacgcccgtgaggtgccttgcggcttccccttctgcaccggccgggcttcgcccggccgattctttttgtttagtgaccgaaaaaccgaaccccgatgccaattgcttctgaaatccagtctctccttgatcagctccggtccgcccccgcggcaaatgatcccccggacagcagcgccctcaccgtgattgtcgacacgaacgtgctcctcgacttctgggcgtttcatgatccgaagaccgaggcgctgctccgactgattgaggacggcacctgcacgatgctgcgggatgaggcaacggaaaacgaattcgcggaagtgattcaccggccggggttcagactgtcacctgaagagcagaccgcgattctcactcactggttccgaatcgcgcgccgccccgcgtccccggcgaaagacgcgcttgcccggtgccgcgatccgcttgatcagaagttctttgacctcgcctcaggctccggctgcccgctgatcgtgagcaaggataagctcgtgatgaaggccggccgccgttccagaaaagaaggcaccgcggtgatgcttccgggggacgccgcgcgctggattgaggcgcagcggaaagcctgagaactcagcccctcgggggttccgcctctgaagcctgaatagccccggcactcgactccgatttatcgccaaacgcgtcatccgatgggagcgtctcgatatcggcgagactccggtccacgcgctccgtccgtttctgaacccgttccaccgcttcctgcgcctggcggagccgcttatccaccgcgtccatcgcggccgcgaacgcctggaactcactcttcacacggccaagcagcttccacacatccgcgctccgctcctgaatcgcgagcgtccggaaccccatccggagagaattaaggagtgaggagatcaccgtggggccggcaggcgtcacgcgccacttctgctgcagctcgtcaaagaggcccggaatccgaagcacctcagcgtacagactctcggtcggcaggtacatgatcccgaattccgtcgtatacggggccttgagatacttttccgcgatatctttcgcgaaagcgagaacgctcgtccggagagacgcctgcgcggacgattccgcgtcccggtcccccgcttcacgcgccgcttcaagccgctcccagtcctctcgcgggaacttcgagtcaatcggaagccacactggcgtcgaagcatccgggcccggcatccggaccgcgaattcaacccgctttccggtcccgggaacggtttcgacattggtgccgaactgatccggcgtgaggatctcggaaaggatcgcgccgagctgcgcctcaccccaggtgccgcgggtcttcacgttcgacatcaggcgtcggaggctgtccacgttttcagaaagccccttcacttccccgagcccctcttcaagcgcctgaagctgggtcgccacgaggcggaaattttccgagagccgtgtctgaagcgttgtctgaagcttctcctcgaccgttgagcgcatctgctcaagcttcgcatcgttctgcgcctgaagcgcggtgagtttctggaacaccgtttcgttcaccgcgttgatcccggcggcaagcgacgactccatcgaggtgaggcgcgccgcctggctttccgaccccttccggatcaggtcaagcgactcccgcctcaccgcttccattccctcgcggttcaggctgttcgcctgggtaagcctcatctcaagccggttctggcgcgcctccgcggcgtccgaattccgatccagcgcgtcccggatcgcggcttcaagcgccgccgtatccgtctcctcacgcttttccccgaacgcgatcttcagaagcagcaccgtgcagagcgctccgagcgcgactgacagcatgagaagaaaagaatccatgaggagtgactcctaaaacacgagaaaaacaaaaccgttccgtgattgtagaaaaccggagaggaaaatgaaaaaaccggcagaggaaaatcccctgccggccgaggttccgagcgattgaatcgcgtcagagcacgtgcttcaggaaggcgcgggtccgctcttcacgcggattcacgaccacctcttccggcgttccctcttcgacgatcacgccgccatccataaagatcacgtgatccgcgacctcacgggcgaagccgatctcatgcgtcacaaccaccatcgtcatgccttcacgggcgagctgcgtcatcacggcaagcacttcgccgacgagctccgggtcgagcgctgaggtcggttcgtcaaagagaatcgctttcggatccatcgcgagcgctcgggcaatgccgacacgctgctgctggccgcctgaaagccgcaccgggtattcatcggcgcggtctttaagccccacgcggtccagcatggcaagcgccttctcccgggcttcggccttcgatttgtgaccgacaaccacctgaccgatcatcacgttttcgatcaccgtgagatgaggccagaggttgaagcgctggaacaccatgccgagatgctcacgcaggtgattgaggttcgtgcggcggctcgtcacttcgatgccgtccacgaggatgcttcccgagtccgcttcctcgagcgcgttgatacagcgaaggagggttgatttcccggagccagacggcccgagaatcaccactttttcgccgcgcttcacatcgaggtcgatcccgcgcagcacctgaagctttccgtagctcttcttcagcccccggatctgaatcatgacgtcggaagacatgtttttctcttcagccattatttgtcgtctcccttacccatatgtttttcgagcgcgtggatgccgcaggcaagcgcaagcgtcatcacccagtaaatcgcggaaatcgtgagatacggctcccagtagcgggcggaggcgccagccaccgtacgggcggcgtaggcgagctccgtgagaccgatcgcggagacgagtgacgagtccttcagaatcgcgatcgcgttgttcccgagcgcggggagcatacggcggaaggcctgaggaagaatgatgtggcgcatgcactgccagtacgtcatgccgaccgagcgcgcagcctcagcctgccccttatcgagcgactgaatgccggcacggaacacttcactcatataagcgccggcgttcagcgaaatcgcgaggaaaccggcgatcagcgcgccgtagttgcttcggaggtcgcgcgcgagctcaccgctcacgaggagcccgtccaccgggtgcacaaacaccgggaggaccgcgaagtacatcaggaaaatctgaacgaagagcggtgtgccgcggaagaagctcacccagatcgtcacgggccaccggacaccgaagtacagcagtgccttgagaggctgatggcgggcctgcgccatgcgggccatgccgagaatcatgccaaggaacacgccgcagataacgcatgcgagcgtgagcttgaccgtcatctccgcgccttcaataaagagcggccaatagtcggaaaggacgtcgaaacggaacatttgaagtcagtcagtgcgggaaccggagggaatcagtgaggctctcaggtttccggataatgaaaagccccggctccggcggaagtgccgcgggaaccggggcggaaagcctggcggattacttgatcgggagcttcgggaccggcgtgttgccgaaccacttgtgatagaccttcgcgtaggtgccgttcttatagaccttgcggagaccatcattaatctgggcgagcagcttcgtgttgcccttgcggaccgcgataccgaagtactgttcctcgaaattcgggtcgcgcgtcatgttgaagtgcttgccggggttctgctgcgcgtagtacgcgaagacaccgacgtcaccgatcgcggcgtcgacaccgcccgcattcagctcttcaagcgcgagaggggtgttgtcgaaacgcttgatgttggggctcgccttgccgaaagccttcgagcagacgatatcgcccgcggagttcgcgacgacagcaactttcttccccttcaggtcattgatcgacttcacgcggaggttacgctgcgtgaggatcagctgatgcgcggcaaagtacggaagcgagaaatccaccgtctgctgacgctgcggggtgatcgtgatgccgctcataatgatgtcacggtcgccgttcttcacggattcgaagatcacgccccagagcgtgttctggaacttcacctggaagcccgctgccttcgcgatttccttcatgaggtcgatatcaaagccgacgatctctttggaaggagcctggaattcaaacggacggtaggtcgcgccggtgccgacggagtaaaccggggcggcgatggccggagctgcagtgaacaccgcggcggcagcggccgcagcgagcagggaacgcctcttcatgagcgaatctccatttttctggataagggacccacagggagcgcggccgaaataggggtgagcggcagcgcggcctcaagcgggaacttaaaaatcgagaggtaatcttagtacggaatccagacgggcgtcgagaattttttagtaaattcaagcgtaagcccgcgcgaagcccagatacgacaatgccctggtccgacgaatcagatcagggcattactgctaactgtcagctgccacctgggcagcggaacaattacttggcagcggcggaagaagccggagcggaagcagcagcagagtcagccggagcggaggcagcggcagaagccggagcggaagcagcgacggaagcggcagcagcgtcagcagcggcggaagaagcgggcatagaagcagcagcggacggagcagcgtcagcagcggaagaggcaggagcagaagcctgcttggagcaagcaacagccatcatggcgatagaagcggcggcaacaatcttcagagcggtattcatttttgagacaatcctctaaaacaaacgtccatctaggatggaatctataaactataaactgttccccccagaagtggagtgcgtaaatgtcgctgcatttctggtgaacggagccattctatctactttcgcgtgtgagtgccaacggaattaggataaacgccaaccggatataacccggtaatgtaaaccctaataccgccggcccgacgccgagacagcggggctcttgggaaacgtgattaaaaaagccccggaaaatccgaagcttgctttctcatcctgggttctgcccaggaatcaaaacacaggggagattgtattccgcccccacccccttggctatcacgcaaattaggatggtttggcaccgtaagcacataccctgataggccgcttttttcctattttatcggggtctcctttttccacaggtcgtttttcccccgtagcgggaataagaactcggtacccgaaattgtccacaaaaccgggctcaaagccccggtttcagcgtgctgagaagcggtatcctccgcttcctaatctttttcataaccccgggcagccgcgccgggtttctagaaccaaggtctcaagggggtacggggctcctcccctctcctatctcgtcaatacgggatcccaggagtttccggaaatcgtctgaaaggcccggtggaggaatcaaaacactgagggggttctttcccctctctatatatattagaggggatcgttttttccttccggaaaccccatccgaatccggcttccggccccgaaaaaagaggcccttcccgatataagaagagcctcgtcaagaattcattccactgcggtaccggcattgctaagcaagccagtgatggatgaactaaaacacccgtcagtatagcttcgctcccacgccttcgcagaaaacattacgtaattttactttccgggtaatgtcgctatttgggccctgaattcacccggagagcggaggaccggcttcccgtccgacaccgtcggccgccggctcagcgcggatataaagaaaaatcccagaacacagagtgttctgggatttaggaattttgtggtgcgcccggtaggattcgaacccgcgaccccctggttcgtagccaggtgctctatccaactgagctacgggcgcaactcaggatgagaatcttatatgcgggaattccatttgtcaaatttttttcttcacttttttcttccggatcgtccccggaatttccagcagcaggaaaaacagagagttccaggcatctttatcttttcggcttcctgtcactcacgcccatcctccggcattttctccctgaaccacggccgcccggtatatcccagccggcagaatccgataattttgcgttttacgcaatcagagtttgcggattctgcttttacttctacgtcttccggactacataatgtagccatcagttcaggataaaagccttgggagcagaagcatggcacggatggatgaatttgactggctcacggaaatcaaccgcgcgagcattgtgacgaatctccggtcgggacttatcaatcacagcaccgccgtgatggcggctgacgccctgaggggggtcgtgtccgatgtggaaagcggaaagtctccccgcgcgaagcgcgtgattctctacgaaccccttctcatcgcgaaggccggtcccgaagtcaccgtgattcatgcgggacgttcttcccaggacatgcattccaccttcaggctcgcgatgctgcggagcgcgacacttgacctgatggagacgcttgacgggacgctcgatgacctcgcgctcttcgcccggaaaaacgaatccacgctcctcccggcctatacgaacggggtcgcggcgcagcccaccacgctcgcccatctcctttccggctacatcgcgggctttgcccgggaccgtgagcggctgagcgaattctatatccgcatgaatgagtgcccgatgggatgcaccgtgctgaacggcaccgggtggccgctcgaccggaacgggatgtcagacttcctcgggtttgaccggccgcggcgtaacgcttttgacgcgacccagatttcgcaggttgatctcccggtggaactcgccggcatcgtagccgcgatcggtctccatgtcggggaaatgatcggcggcatcatgacgcagtacgcgcagccccgcccctggctccttctttctgaaggaggcgacaacacttatgtttcttccgccatgcctcagaagcggaacccgggactcctcaataacacccgcgcggaagcctctgacgccgtcgcagcggccgaaggtgtcttcctccgggcgcataacgtggtctccggcatgatggacggaaagagcgccggaaaaaacaccgggatggcggacaccgcgtcctccgctctcacgaagctccggcgcgtgatcgcggggattgtcgtgaaccgcgaccgggcgctcgaggaactgaatctcgactggaccgcgagccaggaaatcgcggatcagctcatgctgaagcacggactccccttccgtatcggccaccacatggcaagcgccatggtgagctgggcccgcgcgcatgacgtccgcccgagtgacttcccgtatgacgaaatgaaggctctctaccggaaagagatcgagtccgaattccctgacgcgtcgcctgaccttccgatgaccgaggccgaattccactcctgcctcgacccgaagtcgattcttgagaagcgtcagaccgcgggaagcgcgaatccgaaggaaacttccgcgatgctctccgaacaggaagcccgcatcgcctggtaccgggagaacaccgcgatggcccgccgccgggtcgcgtccgcgcatcaggctcttgcggacgcctttgacgcgatccgctgaagcctcagacctgcgccgctcacttttactgcttcctcaaaggaggattgatcatgagcatatttctgcccatgctaggggttgttgtcactattctggccggctgggccatgatccgtcgttaccagacgcatatcgtgctgctcttctcagggcttattctggtcgctgccgccgcgtttctcgccggtgtcgatatcctgccgaaaggcgtgaaaccctccggtttcgcggggtttgatatcttcaatctcctcgtctcaatcggtaagaagcaggcctcagggatcggattcctcatcatggcggccggcggcttcgcggcttatatggaacggatcggtgccgcgaacgcgcttgtccgcatcacggtgtctccgcttcggaaactgaacagcccgtacatcgtgcttgtgctcgggtacctcatcggtcagcttctcgtgatggtgatcccgagcgccgccggtctcgcgatgctgctccttgtcgcgctttacccgattctgaagggcgttggggtgtcccctgccgcggctgtcgccgtgatcggcacgtcggccggcatgacgctcgggccctcctccggcactgcgaacctcgcggcgaaagtcgcgggactcgacccgatcatctacttcgtgcagtatcagcttcctgtcgcgatcccgacgctcatcgcggtcgctgtctgccactactttgtgcagcgctactacgaccggaagggggacgatgtctaccaggacgccgatcaggtccaggcgaaagaggtgccgtcggtgcctgtctggtacgcggtcttcccgcttcttccgatcgcgctgatgatcatcttctcgaaactcgtcatttcgaccgtgaagctcgatacgatcgccgcgctcttccttgtctgggtgctcgtgatcctcgttgagcttatccggctccgcagcccgaaaaagatcttcaaggacgccatggcgatgttccagtcgatgggaaagatgttcggcggcattgtcgccctgattatctgcgctgagttcttcgcgaacggcctcaaggtttcgggtgttatcacggcgctcatcaattccgcccagggaatcggcgccgggatgctcgagatggcggtgatccttgctctgatcgtgggtcttgtcacgttcctcaccgggtccggtgtcggcgcgtactcaagcttcgccgcactcgctcctgatgtggcgcatggcctcggcggcacggtggcttcgcttgtgacgccaatgcagttcgcgtccggcatgttccgcgcgatgtccccggtggctggtgtcatcattgctgttgccggcgccgcgggtgtcaccccgatcgcggttgtccgccgcacctggctcccgatgacggtcggcatgatcgtgactttcgccgcgaacgcgatctttatcggctgacagatacactcttttttctctgccccggatgaatcccatccggggcgagactatagatgaagcaccccattcctttctctgaatcgttctccgttaaacggaaccacgctttcagaaggagctgaaatgaaatctctgattacgcttaccgcggttctcgccgcgatgctctcggtgtccgctgccgcgaacgccctgccgcttgatacctccgtaaagcccgcggtgacgagcctctcgaacccggccccgaaaaccggtctctatgtcggcaactccttcacgtactacaactgcgggcttgtcggctatgtgcgggggttcgcgaaagccacaggcatcccgtggcgcgcccgtcagatcacgatcagctcaggccgcctctcctatcacccgatggcacagtatctcgcgccgcatgagctcgacccctacgcgaaaggcaaggtgaaggacggaaagctcactgccccgatgtttgacgtggtcttcattcaggcgctcagcacggagccgatcgacgcgaaaagcattccaacctggaaaaagtatctgaagtctgaagtcgccgaagtgaaagccgcggggtctgaacccgtggtggttgtcacctgggcgaagaaggatcacccggaagacacgaagaagcttgctgactcgattatttcagccgcaaatgagaatggggccgcagcgctccccgtgggcctcgccttcgcggaagcccacgcaggccgtccggatatcaatttctacgcgccggataaacggcatccgtctgccgcgggttcctatctctatggctccgtggcttacagcttcctcttccaccggtcacctgaaggcctgaagttcctcgggggctgcgataagccgctctccgaagcggacgccgcgtaccttcagtcggtcgcctggaaaaccgtcagggctttctacggctggtagtcatccggaatacatttccgttctacaataattcaacaaagaggagcggcttcccttatcgcctctcctctttgccatatccactaaaggagaaacatacatgcagagacgcgtattgctcagttccgcggccgcggccgcccttgccgccgcgctgaccgcctgcggtaagaaggaaccggcagcttccgctgccgccgcttcgagcgccgcttccggtgaacttcgcccgatcacgatcggcgttacggccggcacgagtgaggaagtcgctgaagtggtgacgaaggaagccgaaaaggccggccttaaggtcacggtgaaggtgttcggtgactatcagacgccggacgccgcgctcgcgagcggtgaaatcgacgcgaacagctaccagcatgagcccttccttcaggcctacaacgcgaataacaagactgacctcgttgtggccggaaagacctatctcgctccgctcgccctctactcgaagaagatcaagagcgcctctgaaatcaaggacggcgcgacgatcgccattccgaatgatccgtcgaacggcggccgcgcgcttcagctcctcgcgaagcagggctggattgaactaaagcccgatgtccccgccaccaaggtgacgaaggctgatatcacgaagtacgtgaagaagatcaagatcgtcgaaatcgaggctccgcagctgccccgctctcttgacgacacgaccgcttccgtgatcaacgcgggctacgcctttgccgcgaatctcacgaagaaggatcagatcgtcgccgaagacaatacgtctccgtacgtgaacatcatcgccgtgaagaagggccgtgagaccgatccgtcgatcgtgaagtacatcgaaatcttccacacggagcccgtgaagaagttcatcgaggataagtacaagggccaggtggttcccgcctggtaatctctgttctttcccgcagggaaaccggtttggtatagcgcccggaggggatcctccgggcgcttttttgtccagtcggcggctttggctatatagtaaaaggcattacgtatacgaaaaagcccgataagagataaagcgcgatgaataagaaccgcccagattcctcagatccaaatcccaagagcgggattatcgggcggattctgtcgtcatttgagtcgctttccgcgatcggcgcagtccccggaccccggaccgcggccgcgtttgcccgtctccaccgcgcggactttatcgccggtctctccgtgatcgggcttttgctcccggaagcggtcgcctatgccggcattgccggaatgccgcccgcctccggcctcatcgcgcttttctgcggtctcgcctgttatctgctcatcggccgcagccgcttcgcgattgtgtccgccacgagttcctccgctctcgtgctcgccgtcggtgtcgcgacactctccgcggtccaggcggacgcggatcctgagacgctcgccgccgtgcttgtcatgatgacaggcttctggttcctgctcgcgaggctccttggcttcgggcgcgcctcaaactttgtcgcgaaaccggtgctccggggcgtcacgatgggactctcgctcaccatcacgctgatgcagcttccaaagctcttcacgctgacacctgacaccatgtcgccgtttggacggctgttccacacggttcaggcgcttccgacactcagccccgcgccgcttctcttcggtgccgcggcgctcgtcattctccttttctggcggtggccgaagcagcccgcgagtctctgggtgatcgcggtgtcggtagccgcgacctacgtgatcccattccccgagtacggcattccgctcgtcgggaatatcgacctgcatcggaacgctctgtcgctcgaaagtctcgcgaacgctgactggatcggcgctattcagatgagcgcggcgctctgcctcatggtgtacgccgagtcttactcaagtatccacggggcggcagcccgccacggtgactcccctgacacgaaccgggacctgatcgcgctcggcaccgcgaacgttgtctcagggttcttcggcgggctcgcggtgggcgcgggctactcagcgacaagcctgaatgaggagtccggcgcgaaaagccggctctccgccgcaacggctctcgcggtctgcgttctggcgatcatcttcctccttcctctggtcgagcggattccggaaccgatcctcgccgccattgtgatcaatgcggtgtcgcacggtctttccccgaagcccctgctcccctacttccgctggaagcgggaccggctgctcgtcatctcgtccttcctcgcggtcgcgattctcggcgtgctgaatggccttctcgtttctgttgtcctctccgtggtgttcattctcttcaacgccgcggagccgcatgtctcggaactccgccatctcccggggtctcacagctacgtgaaccggctgatcttctccaccgcgacgccggtgcctgggatcctgatcctgcggcttgatcagccgatgttcttcgcgaacgccgaaccgatgatgaaaaagacaaaagcgatgtacgaggcgcggcgtcaggcagaaaagatctccatcctgattctgagtcttgaggaatgcgcggaccttgacggcaccggtattgaagcgcttcagatgttcgcgcgagacctcgcgcgctcgaactgccgcctcttcatctgccgtctccaccgccgggcccgtgaggcgctctctcacgccgtgattccggagcttccgctcacctcgctctcgttcctctcggttgaccgcgcggtaaaggccgcggttgagcagaataagacagaactcgaactcctcacgcgctaccggaaagccgcggccttccgcaccgagaacgactagacccgcacgggctttccttgagcgcttaaaatggcgcagcctcttttcttctcctgaaacggactctctccgcttcaggtgacgggcgcctctccccttcttatctcactgattttcaaagcgacatgccacataatcctcaagcactggaactcctctcgcccgcgaagaacgcggacatcggtatcgaggctttccgccacggcgcggacgctgtctatatcggcgggccgtccttcggcgcgcggtccgcggccgggaacagccttgaggatatttcgcggctctgtgaaacggcgcaccgcttccgcggccgcgtcatgatgactctcaacaccattctccgggatgaagagattgaacccgcggcgaagctcgcctgggacgcctggaacgcgggcgttgacgcgctgatcgttcaggatatggggcttctcgaagccgatctcccgccgatccagcttcacgcctcaacgcagtgcgatatccggacgcctgaaaaagcgaagtttcttgaagaaaccgggttctcgcagatcgtgccggcgcgcgaactgaagcttccagaaatccgcgcgatcgcggatgtcctcacttcagcccgaattgagttctttgtgcacggggcgctctgcgtgagttacagcggccagtgctacgcgagcgaagccgtgaagtgccggagcgcgaaccgcggtgcctgcgcccagatctgcaggctgccctttgatgccgcgcttgaggacggcacggttcttgcgcgccatcagtacctgctctccctcaaagacaacaatcagagcggaaaccttgcagaactcgtcgcggccggtgtccggagcttcaagattgaggggcggctgaaggatatggactacgtgaagaacatcacggcgttctatcggaagaaactggacgcttttctcaatactcaccccgaatacgcgaaggaaagcgtgggagatgtccgtttctccttcacgccggaccccgcaaagacctttaaccgcggcgcgacggaatattttgttcacggccggattcctcatattgcgaccatcacgacgccgaaaaacgccggtgaaccgatcggcaccgtgaagaaaatcaatgcccgctccatcgtgatccgcgcgaacgaaccgcttcataacggcgacggtctcacgttctacgatcagaagggggaactctccgggctcctcgcgaaccgcgtcgaaccgcttgaagggcggacaacggaaatcttcacgcgtgagtcccccgccaagctcgcgaacctccgccccggaacacagatcctccggaaccacgatcaggcctggacccgggagcttgagggtgacacctcagtccgaaagatcccggtgaggattgaggcttccgttgatccgaagggcatttcgctttcgatcgaggacgccgaagggtgccgcgcggcgatccgcgaaacgatggcgctcgatcccgcgaaaaacggcgcgaagtcgcttgagcagcagaaaaacgcgctttcaaagcttggcgacactgactaccgggccgatacgatcgagcttcacgaggaaacgccgctcttcgttccggtttcagtcctgaataaccttcgtcggtcgctcgtcgaaaagtttgaggaagcgaggcgcggcgcctttacgcgctgggagcgggctcccgtgaaggtggttcccttccccgtgaagacgcttgactaccgggcgaacgtctataacagccgcgcgaaggcgttctatgaagagcgcggcgcgaccgtcacccagatggcgtttgaaaccggcgaagtccggggtgaagctgaactcatgcactgccgtcactgcatccgatatacgctcggtatctgtccgaaggaagcgatcaagcggggtgaaaagatccgcccgaccccgatcgttctcacctccggcccgatgaaattcatcgcccgcttccactgcggcccgtgcgaaatgacactccacggtaaacggacccgcgggtgacattccggtctccggcgaaagagccggcagcgcttcatccatcctgctgccggtttcatttaggacttcagccgtaaagactacctcttagagcatttaccgtaaatgcggtattaacaaaatccatttgtagcagataatggcttttacctgttatttaattaaaagaagattcaaatggattatgcgttcaaaggcggagtgctcttcgtcaacgtaagcgccattcaggcgctcgcgctcgcggtgctcacgtactatttcggcgtctgggtgaagaagcacgtcagcattctcgagaagtactcgattccgagcccggtggtcggcggcattctgttctccatcgtgctttcgattctcgacggcatgaacatcatgaaggtgcattttgattcgtcgctgcagacgcttctgatgcttgccttctatacgacgatcggccttatggcgagcctgaagctgatcaagaagggcggcacactcctcgtctccttcttcatcgcggtttctgtcctcgtggtgctgcagaacctcgtcggcatgacgatcgctcaggcgatggggcttgataagcattacggcattctcgccggttccgtttccatgatgggcggtctcggcacggccgcggccttcggtccgttctttgaacacacctacggcgtcacgggcggcacggcggtcggcatcacggctgccacgttcggcatggtcgcggcgctcgtccttggcggcccgttcggcgaatgggtgattcaccgctacaagattcagaccccgaagcagccgcatgagcccgaggaaaagctgatgctgccctctgacaccgaagtgtccatcacatccgagcagcgcgcgaacacccccacgttcacggacgaactgatgaaggccggctccatcgtcgcgctctgcatggcgctcggcactgtggtttcgagctacctcggtcagtacatcacgctccccgcctatatcggctccatgatcgtggccgctatcgtccgcaacatcggtgacttcacccactccttctctgttgaaggcaagggactcaacgctgtcgctgacatcagcctgatcctcttcgtcacgatggcgatcaactcgctgaagctctacgaactcgtgaatctcgcgattccgatgatcgtgattctcgcggcccagactgtgctgatgcttgcctttgcctggctcgtcttcatcaagctcttcggcaaggagtacgacaacgtgatgctcgctgtgggcggcatcggtttcggcatgggcgctacggtgaacggcctcgcgaacatgcaggcgatcggcgaaaagtatggttcttcggcccgcgcctggctcatcgtgtcgattgtcggcgccttcctgattgaccttgtgaacgcgctcgtgatcacctacatgggtacgctctgagtgtgatgtcttccgggcggctgcggcctcccggaaaccacactccaaaaaaacgctctggaccggatagatccagagcgttttcatttgtttgaaagacagcgcgcggctttacgccttaggcgccgtctgatcgatgatatcgagtgaggcctcaatctgcaggccgtcaaacttattcgcgacatccttattcgcgagaatcatttcgtacaccgcgtccatcgcggactgcgtggattcacggatcgggaatccggccatcgtgcggccgatgaagaccgaggagaagatgtcgccggttccggagaaactgagcggaatgagcttatagggaaggatgaaatggtgatccgccttcgcgtcgtacccgcaaacaacggagccttccccttccacctgcatgctcgtcaccacgacagacctcgcgccctgatcgcgcagcttcgcgatcagcgccttcgcgtcatccatcgaaatcggttccttcgaataaggaataccggcgagcaggcaggcttccgtgtaattcggaagcaggaagtccgagaccgggatcagttcccgcaggaagccgaccgtctcctcaggaagcccctgatagagcgaaccttcatcgcccatgatcgggtccgtgaaaatcagagctccggcggcgcgctgcgcctggcagaaggcacggacgagcgaagcctgttcagcggacgtcatgaaacctgtcgacaccgcatcaaagtggaaccccagatgctgccagatgcggagcgtatcccgcatgtagtccgtcgtatcgaggaaagcgtattcaccgtacgcgaagttattcgacaccagcgcggtcggaaggttatagaggtcgtagcccaggtgcgtgagcaccggaagcatggcggaaagcgccactttgctgtagcccgccacgtctgtgatcagaagcacctgcttcccttttccgtttttctgcatcagttctttcctcttttttcactctgctccgcggccgcttttccggccgccttcggacttttaccccgacggctgtgtttagcctcccgctgcgcggcagattctctttccgtcgttcggatcagcctctcgcgttcgagtttcgccttttcatccatcatgcacttaccgtaggcgaacatcagcgccagcacgccgacacccccgatggtgagagggctgtctgacaggtgagcggcaatccaggccgccgcgagtcccacaaaaacactgacggccgccggggcgaatcggattttcggcatttcggtaaacctttacgcgtaaacagctgatcggtccattctatagggagagcgaagagcctgtgccgaaccgcgcgtaagcggataaatcgtggcgctcttccccctccctcccaatctaccggatattagcggcagatctgtcaaaaactcttcaaaattcaatcactcagaaaacggctccccggaaaactgaaaggcccggcatctctgccgggccatcccccatccggaagccgcctcagatgaagcagcaccagaaactcatcagcggatgatcagaatcgggcactccgcttcggccgcgacacgggtcgcgacggagccaagcaccgcgctcttgaagttcgtgaagccgtgagaccccatcaccacgaggtcaagcttttccttattcgcgtaacgcgcgatcgcgtcacccggattcccaacgagccgcacggcgcggggctggaccccgatatcctgcagcgcgggaatcgcgcgggccgtggcgtattcaaactcctgctgctcgtacttctccgcgtcttccatcgagaccgtcggcgcgtcacagtcgttcgccgcggtcatcagatccgcgtagaagtcttccaccgcgctcagcacttcaaaatccgccttgttgccgaaaagctcacggttcttgccgatccattcaatggccttcaggctgtattcggaaccatcgaccgcgatgccgacgcgaagcgcgtcctgggcgggagcgggtttctcacggaccagcagcaccggggtatcgcagcccgcgagcacagcgttcgtgacagaccccatgaagagcttcttcacgttggtcttaccctgtgcccccatcacgacgaggtcaggcttataggcgccgatctctttcacgatttcttcggcaggcgcgccgaccacacatttctcttcgaccttgatgcccttgatgccaagcggcgagcggaccatcacaaacgccttttcggcacctgccttgatccagctgtcatacacatctgtgttccagatctccgtcaccacacggcctcggggagccgccacataaaacgcctcaaccgcgggcttcttcccgatcatcgacgtacgggacgcaataaattcagccgcatagcggctgtaggagctgccgtcaacagggagcagtattctcatatccatctccttccattcagttggccggcgtgctcattctgactacaggcactaccgtcctgataattgtcttttttgcaacctttccttcactctcaagtatacgcttgtaaaaataagctgttaataattcgaggtaaatgttagtttttatcctataaggggtagatcggctctttaaggctttgtcaggcgatgctgaggagatcttcccatcgcgtcgtgtagcagggagagagcatcccgcggcacatctcccagcggtctgaggcgatcgaactcccggtcacgatcgcggattttccgaatcgtcccgtcaggtcgtccagcgtccgcataaggcggcggctccggtcgtcctcttcttccgtaaaaagatccggctgcggcgagatcccgggctcaagccctgtcagcatgacgcccgccttcttgaaggcgaagccgtcccgccacttcgcgcggaccacccggaccgcggcgtcggtgattttcagcgtatccgcggttgcccgcgggaacgccgccacaccggccgcgaagtactggggaacgttcgggttgaaaatatttgtctgaaaaaagacttcaaccagtgaagctgccattttctgggagcgcatcttccgggcggcctccgcggcgtgcgtcgcgacactcgcctcgaccgccgcccggtccgcgaccggttccgcaaaggaccgcgaccgcatgatctgctgcttcgggggcgacgcggcttcaagcgcgaggcacgggtgtccgaggagctcctcatgcgttctcgcgagcgtcacgccgaactgcttccggacgagtgaattcggaagccgcgtgaagtcataggcagttctgacccccatcccgttaagcctcgacccgatccggcgtccgattccccagatttcctccaccggaacgagcttcatcgcgcgctcctggcgcgagggcgtgaggctctcccagtcgagcacgccgccaagccccttataggtcttcgcgagatgattcgcgagtttcgtaagtgtcttcgtacgggcggaactgacgcaggtcggaatcccgaccccccgcagcacccggctccggatcgcagtgagaagctccgggatctccttctccaccccggtgaggtcaataaaacattcatcaatcgaatacggctcaatcgccggcacgagccgcgacaccgttttcatcatgcgggcggagagatcgccgtagagttcatagtttgatgaaaacgcgaccactttccccgatcggatcagatccccgatcttgaaagccggcgtgccgtttttgatgccgagcgcctttgcttcggcgctccgcgtgaccacgcagccatcattattcgagagcaccacgatcggtgtcttcagcagatccggccggaatacccgctcgcagctcgcgtagaacgagttcgcgtcgaccagcgcaaaacgaggctccagcatcttccgcccccttcctcactcctcttttcccgcgccggtctttcagcggcgcgaggccgcggagaagctctggatcacattcgtcacaacgccgatgaaggaccactcatcgcactcgcccggaatgatcgtccggtagagaccgctgctgttctcggggtgcagctccattttcccgtcccgcttcacaagacgcttcacggtgaaatccgtgttgatccgggcgatcacaatgtcgccgtcccggggctcaagaaggcgcgagacaacgagaagacagccgggcgtgatgccggcatccaccatggagtcgccggtcacgtgaacgacaaacgtgttctcggggttcggtgcgagaaggtcattgaagtcgagcggctcatgcgcgtagtcatctgccggggacgggaaaccggcctggacgcttgaaacctcatactcaatctcggcgtgggagagctccgtcttcatcaccatggcgccaggcggaagctccgccgcgctttcgacatcaagcacgtgacgcatccacatattgccgcccgctctcctgaaggtctctttctgaagcggtgtcactgagacctgaagatgctccgtgagccccttcccctgacctttcttccggccggtgccgggtcttctgccgccccacccggagcgcggcttcgcgccgtctgctttcttttccgccattttcggaatcctcttactgacgaccgtccccgcaggtttttcgactcccggactgtcatcatgattaattcagtatttttttcaagataactttacctcacttcccgcccggcggaaagcggaggaggagaaaagcgtcagagctggcagcgggagagatgggagaagttcgaggcgcgcatccggcacggatggcaaaaaaa

SEQ ID NO: 1372 - DNA, 56930 bp, Unknown
  gut microbiota DNA sequence
gctcctatattacggattctcttaagaaaaaacgatagatcgctagacccagcagggatcctccaccggtagtagatcgtcttaggtctcaggtcctagaggaaaagcattgaagaacacggcggaacaccgccgctccccagagtttatattttcaggatttcatataaaaacaattttttattatttttcatctgtttaatatatttgataccaaatatacgctatccgaaagtatctaggaaaatgtctcacttgtttcacaaataatatttttgaacctaagatgaataaagtctatacattcaggatgtgaccggtttcatagcctgcctgaatcaatttttaccaggacaataaaaatgtataactttctccttgcctttacggtgtgcggcgctgccgtgatcatcggcgagctggtgtcttcctggacaaaagcctgggtgccctccgtcttcgtgacggcctgccttttcctgctcggctactggacggtcctcccccacgacctcatcaaagactcctacctcatcccgttcggcggcacaatctgcgtgatggtgatgattgttcacctcggaacgattatttccatgaagcggctgctggagcagtggaagaccgtggtgacgtgtcttctcggactcctcggcatgtgccttgctgccttctttatctgcccgttcttcatggaccggacgctcgtgatcgccggtctccccccgctcacgggcggcatcgtggcagccaccatgatgcagaaagccgctatggaggccggtctcacggttgccgcgcttttcgcgatttcgatgtactgcattcagggtttcgcgggctacccgctcaccgctttcgcgctgaagaaggaaagccgccggcttcttgaaggctatcggaacggcactctgaaggcgtcagaagcggaccgcgaagcgatgcagaacgcgattgagctcgcggcgggcggcgacaacgtgaagcgccttccgcttcaggtgccggagaagtacaacagctcgatcgtaattctcacgaagctcggcctcgtcgcctgggttgcctcagtgatcggcaagtacaccggcgtgtccggcgccatctgggccctgatcctcggtgtcatcttctgcacgctcgggttccttgaccgcgattcgctccacaaggcgaactccttcaacatcatgatgctcggcctcatctgcttcgtttttgatgggcttaaggacatgaccccggagctgcttttcggcatgatcggcccgatgatcggcttcattatcgtcggtgtcgccggcatgacgctctttgccttcgtcgcgtcgaagatcctgcaccgcagcttcttcctctgcttcgcgaactgcctcaccgcgctctacggtttcccgttcgatcagatcatcacggataacacctgcaagaccgtcgcgaagacccgtgaagagtacgatttcctcatggggaaactcttcccctcgatgatcgtcggcggtttcgtcacggtgacgatcacctctgtcttcatcgcgggcatcttcgtgaagatgttctgatgaaggccgcagccctcacttgattttgctttgctcgaggccctcccgtcagaccgcggagggccttatcacattggatttctcaggttccggcgtcacgcgccgggcctctgtgtcagtcagaaaggaattgaaaatggatctgaaagctttggcagaaaaattcaacccgtaccagatcgagatgcgccgctatttccacgcgcaccctgagccgagcacaaaagaagtggagaccgcgaagaagatccgcgaagaactgacccgagccgggatcgaatggcgtccctgcggcaagaacctgacgaccggcacgctggccactattcacggcgggaagcccggcaagaccttcctgctccgcggtgatatcgacggcctctccgtgaaggaaaagaccggactccccttcgcgagccagaacgacggcttcatgcatgcctgcgggcacgactgccatatttcgatgcttctcaccgcggtaatgatcgcgaacagcatcagggacgaaatccccggcacgatcaagttcatcttccagccggctgaagaagtggcactcggtgctctcgacatgatggcggacggtgttctggacggcgtcgacggaatgtttggcatgcatgtgtggtccgaactccccgcgggacaggtgtcgcttgaagcgggcggccggatggcggccaccgatcagtttgaaatcacgatcaccggaaagtcgggccacgcggcactccctcataagtgcgttgacgccacgccctgcatggctgccaccatcatggatctgcagaccgtcgtgagccgccaggtgaacccggtgagcccgctcgttctcacggtcggcaaggtcacgtccggcacccgctggaacgtgatctcgggttccgcgaagatcgaaggcacggtgcggtcgcttgactccgagtcccgcgatatggcggaagagtctgtcaagcggatcgccgcgaacaccgcggcttcctaccgctgcacggccgaggtgaagtacgaccgcctctgcgacaacgtctataacgatccggaaatcaccgcgttcggacgcgaagccgcgaagacaatcctcgggcctgacgctcttcccaatacgccccccacaatgggcggcgaagacttcggcttctactgcagcaaggtgaaggccgcgttcgcgctcttcggtgtcggaaacgccgcctgcaacgcctgctatccgcagcattcggaccactacacggtggacgagtcaacgctcgtgaagggtgccctgctctccgttcagacggcgcttaatttcctgaacgccaataagtaaagcggtcatcctgaccatctgccgctcagatttcctgacctgagtgacacagaacctcctccggggcctccgccccctgaggaagttttttatgaggtattgccggccgccgcctcatccgtccggttccctcccggttaatatggatagaacacaaaaattccgagggagggcatcgagatgaacttcaattcgcttcgcgacgcgtatcgcgaggaagtgatcaggacgcgccgcgctttccacgcggcccctgagctcagcgggcacgagtggaacacggctgaacggatccgcgccattctcaccggcgccggcatcccctgggaaccctgcggcaaggagcttccggggactcttgtcacgatcgacggggtcggggccggaaagaccattcttctccgcgcggatatcgacgcgctcccgattgaggaaaagaatgatgttccctataagagcggcacgaagggcgtcatgcatgcctgcgggcacgactgtcacatcgcgatgctgctcgccgccgcgaaaattctctatgaacaccggaccgtattcccgggccgcgtgaaatgcatcttccagccggctgaggaaaactcccggggcgcgctcgacatgatcgcgggcggggtgctggaaggcgtcgacgcggcgttcgggattcacgtcgcctcctcggtcccctccggaaaggtctctcttcgcagcggtccctccaccgccgcgaccgatttcttcagaatcacgcttcatggcagaagcggtcacgccgcgcggcctaacgaatgcatcgatgtcgcgcccgcgatcgcggccctcattcttgaacttcagaccatcaggagccgggaagcgaatccgctttccactctcgttctcacgatcggcaccattcattcaggctcccgctggaacgtgatttccggcgaagcctcgatcgaaggcacagtccggagctacgaccccgcggtccgggatctcgcggaaacgtccctcaggcggatttcagaggatgtcgcggccgcctatgggtgtacggctgatgtgacttacgaccggctctgcgacgcgctggtgaatgatgaggcgatgaccggcatcgcccgcgaggcgtccgaagctgtgctcggcgccggaagcaccgtgatcaacccgcctggcaccggaggcgaggatttcagcttctacgcgaacctcgtgccgtcatctttcgcgcacctcggtgtccggaatgcggcctgcggcgctgataaaccgcagcattcggactgttacatggtggatgagaacgcgcttgtcgatggagccctgattcacgtagccaccgcgcttcgcttcctcaccgggtccactggacagaattagcttaagggacgacacaaatatgctggatattgaaaagctgaaaaccgagtacgaaccgtacgtgatccgcatgcggcgctactttcacgcgcatcctgagctgagcggaaaagaactgaagacctccgccgcgatccgcgcggagctcgacgctgacggaatcgagtggcggagctgcggaaagagcctcccccaggggacgcttggcacgatcaagggcgatctgcccggaaaaacgatcctcctccggtccgatatcgacgcgctcccgatcacggaggcgacgggacttcccttcgcgagcgagaacccgggcgtcatgcacgcctgcgggcacgataaccacatcgcgatgctgctcaccgcggcgaagatcctcgccgcgaaccggcatgagctccggggcacggtgaaggtcctcttccagccctccgaggaggtcggaatcggcgctctcgacatgattgaggacggagcgctcgaaggcgttgacgcggcgttcggcatgcacgtgtggcctgaactcgcgtccggccgcgtatcactggagcccggtccccgcatggcgtccacggatcgcttccgtattgatatccaagggaaaggagggcacgccgcggcgcctcacctctgcgtcgacgcgacaccggccgccgcgttcctcgccgtgaatcttcagacgctcgtctcccggtcgatcagcccggcctcctccgctgtgctcacgatcggaagcctccactcaggctcccgctggaacgtcacctcgggcagcgcctaccttgaaggcaccgtgcggtgctttgatgaggaaacgcggaagacaatccgcgaaggcatgaagcggatggcggaccgtgtcgccgcggctcatggctgcaccgcggaaaccacgtatacctggctctcggacgccgtcattaatgacccggccatcacggcggtcgcggcgggagccgcagccgaagtgctcggaccagacggactcgcctctgtccccccgacactggtcggtgaggatttcgcggtcatcatgcatcgggtcccgtccgccttcggattcttcggtatccggaatgaggccgtgaaagccgctttcccgcttcacaccgatcgctgcacgtcagacgaatccggtctgatcggcggggcattgattttcgtgaaaaccgcgtataactttcttaatcggtaaacgtttaagagaggcggaatatgggtgccatgaatggatataacaccgggcttcgggcccgcgaggctctcgagcggctgaagctcggaaacgccgcctatgtgaacgggcagcatttcggagatctttcagacgcccgaaggctcgacaccgcggagcatggccagaacccctacgcggttgtcgtctgctgctcagactcccgctcgatccccgaagtcgccttttcctgcggaatcggcgatatcttcgtgatccgggtcgccgggaacgtgatcgataaccatcagctcgggtctatcgaatacgccgcctcccacctcggaatccgcctcatcgtggtgctcggccacacgcactgcggcgcagtgggagccgcgatccaccacgcacccgaggggtacgtgaagacgatcacggatgaagtgctgaaagcgatcggggacgaaaaggacgagtacaaggccgcctgcctcaacgccgagggcagcgtgaaacggattgagacgtcgcttgagattcagcgggaagagtctgagcacgggctcgccgtcctccccgcgatcctcgatattgagaccggcaaagtcagattcctccgggaactctaaaattcacctcctgtcccgcgaaccccgatccatccggaccggggtttcggttttttccgcctgaattccctctttcttcatgaccgctgtccttatcttcatcgcaacactcctcctcgtgatcacacagccccggggccttgggatcggctggagcgcggcagccggcgccatcgcgtctctccttctcggaaccgtgacgctctcagatatcccgaccgtctggtccattgtctggaacgcttccggaacgctcatcgggctcatcattatcacgcttgtgcttgatgaggcggggttcttccggtggtgcgcgctgaaggtcgctcgggcttcagggggaagcggcgcgaagcttttcactctcattattctgctcggcgctgtcatgtccgcgtttctcgcgaatgacggcgcggtgctgattctcacccccgtggtgctcgcgcttctcacgccgctcggtgtttcaaaagcgcagcagctcgcctttgtaatggcagcggggttcatcgtggataccgcgagtctcccgctcgtgagctcaaatctcgtcaacattatttcggcggacttcttccgcttcacgttcacggattacgccctcgtgatgatcccggtcgatatcgcgtccgttgccgcgagtctcgcggtgctctggatcgtcttccggcgaagcgtcccgaagcgggttgatctctcaaggctccccgctccggactccgtgatccgggattcccttctcttccgcgcgggatgggtggtgctcacgcttcagctcgtcttctgcttcgcgtcatccttcctccggattccgatctcagccgtgacgctcgcgtccgccgccatccttctcctcctctcacggaagaaccgcgtggtgcccgctgggaaagtactgaaagacgctccctggtcgatcgtgatcttttcgctcggcatgtatctcgtggtgtacgggctgcagaatgacggcgcgacctctctcctctccgccgcgctcagccggatcggcgactcggggaccggcgccgcggcgttcggcgcgggcttcatcgcggccgcgctttcaagcgtcatgaataacctcccctccaccatgatcggcgcgctctcgatcgacgcggcatccgtttctgacgcggtccggaccgcgatggcgtacgcgaatgtgatcggatgcgacctcggaccgaaaatcaccccgatcgggagcctggccacgctgctctggctctcgcttctctcgcataaggggatccgtgtcacctggggctactacttcaggctcggcctcattctcacgatcccggtgctcgcggcgtcgcttgccgctctcgcgctcgtgatctgacggcaaagaaaccggaagaacgggggccttgccgccccgctccttccggccttcagaccctgtcactccggatcagccaagcttcacgagtttccagatctgggagatcgtctcaggatccggagcctttgcccggtccgtaaagtacgtgtgaagcaggtgatgcgcgagttcgctgttcggtttcccgaggaactcgtcataaagcctgatcacatccggattcgcgtgactctgacggtaaacgcgggcgcggtcgatctgatacacggtcttcgcgcgggccgcggcgtgtgagaggtacgaattcttgattcgcgccgtgccgccgccatcgatacagccgcccgggcaggccatcacttcgatgaactggtaatccgcctttccggacttcacgcgctggatcagctcctcggcgttccgaaggccgttcgcgaccgcgatcttcacgctgccgccaggcccgagatcaaccgtcgcttccttgatcccttccatgccgcggaccggaagatactcaatcccatcgagattctttcccgtcaccacgtgatgcaccgtgcggagcgcggcttccatcacgccgcccgtcacgccgaaaatcatgccggcaccggtattctccgccatgaagggcgaatcgtatttcgagggttcgagcgtcggaaggctgatgccgtagcggcggagaatgcgcgcgaattcccggatcgtgatcacgagatccgtgtccggcatgccgttacgcgcgagctgcggtctcgccgcttcctctttctttgccgtgcagggcatgatcgaaataaagcggagcttcttcggatcgatattgtgggtcttcgcgaaccacgtcttcgcgagcgccccgaaaatcccctgcggcgagcgggtcgtggagaggttccccatcatctcggggtgatgcttttccacgtaggtcacccagcccgggcagcagcttgtcatcatcgggagagtcccgcccgtacggaggcggctgaggaactcgttcccctcctccatgatcgtgacatccgcgccccagttcacgtcgcagacaaaatcagccccaagcatcttgatcgcggtgatcagctgcccctcggtgttctttccaggctcaagcccgaattcatcaccgatcgtcacacgggcggacggcgcgaaggcgacgatcgttttgatatccggatcgtcaaaccagtcgatcgcggtgtcgcactgatccttttcgccaagcgcccccgtggggcagacaagcgtgcactggccgcactcaacgcagcccggggaatcgatccagcggtccgcgccgacgatcccgacgccgcgcttcgtcccgatgtcatcgagcgtcagagcgctgattccctgcaccttgcggcagacctctacgcagcgcccgcagcggatgcacttattcacgtcgcgcagcagaccgtgcgcgctcgtatccaccgggcgcttcgcgatgaagcggccgttgcagctgttattctgcagccccacgtaaagcgccacgtcctgcagttcgcagttgccgtgacggacgcaggacgcgcagtcctgatcgtggtctgagaagatccacgcggcctgctgacgctgacggtgacggacttcaggcgtatgcgtgaaaaccgccatgccttcgagcatcggcgtcgtgcagctggtcacgagctcccgcttcccgggcgtttccttccgctcaatttccgtaatgcacatgcggcaggtgccgggcgtgtgatccagcggcagcagcgcgcagagcgtcggaatgaaaatcccgaggcgcttcgcgacctgcagaatcgtttccccttcctcaaacgtgacggggcggttattgatccaggcgttcatcagttcgtccccctcgcggatgcggtcaggttttcggtgtcagggctgcgatgcagcgcttcgttcccgggaatcgggcgcggtgtcgcgacggccatcatgcggtagcagcgcatgcagcggtccgcttcgtagcgcgcgacgtcatccgaaaacgtctgatccacctcacggaaattgcattcacgggattccacaggaatcgtcggaacgcggtggcggggcatcttttccatcgggaccgtcgggccgccgtcttcaagaagctcacagtcgcggatgatttctcccatccgggagcggggcgtaaagccgactgaaccgcgggagaggtattcgtcaatcgaattcgcggcctgctgaccctgcgcgagaccgccgatcagcgtagtcggtcctgtcgcgcagtcgccgcccgcgaaaacgccgggccgcgtcgtggcaagcgccggattcacgctgatgttgccatagcggtccagaatcacgccgtccgcgtctgaaaacacgtcacgctcaagtttctgcccgatcgcggcgatcaccatggcgcacggcacatcgaattcgcttccttccaccgcgcggaccgcggggcggccccgggaatccgtgccgcggatttccatcttcgtgagtttcacgccggtgacgtgcccgttttcagagagaatgccaacggggttcgtgaggaagtggaattccacgccttcatcccgcgcggcctcgatttcctcgcggtcagcggaggcctgggcctcggtgcggcggtaaacgatatgcactttcccggtcgcgatacgctttgccgtgcggcagcagtccatcgcgacatttccgcagcccaccacaacgacgtccccatgaatctggggcggaaggccgtccgcgaccgatttctcgatttcaagaaggaagtcgatgccgttctgatagcccgcgagcgaccggtcctcagcgggaagcccgaggtacgcgccttccgcgcagccgattccgaggaacacggcgccgtacccgtcgtcaaagagactcgacacggtgaagtctcgcccgagccgctgcccgaagtgccactcaccgccaagctctccgatcgcgtccgtttctttctgaagcagccccttcgggagccggtacggaggaatgccgcggagcgccatgccgcccgccttctcgtccttatcgaagatatcaaccgggtagcccttcatgagaaggtgatacgcgcagttaagacccgcgggacccgcgccgaccacggccacccgggcctttgaatagtcgatcaccggatccatgccgtggaagaggtctgagatcgccgctccggcgttatccgacacgtagcgcttgatatccttgatcgcgacggaacggtcaacataattccggcggcacgccgcttcgcaggggcgtacgcacacgcggccgcaggtggcgacaagcggatagtgatgcaggagcacaccggccgcgaggtccggatgtccgtccttcacgtagtcgatatagcggggaatattcacgtgcgaaggacaggcttcgatgcacttcgccgtgattgtcatatacatatcgcctttcagcggcgccgcggtgctgatcagacggtctctgaagtatttcagcgccccgatcatcgcttccggagtcgtgcggccgatgccgcagagactcgtgtacttcatctgctcggcggagtcgagcatatggtcccagtcaaccgtatcgccccggccttccaccgcgtcgcggaggcactccgcgagcagaattgacccggtgcggcagggcgtacaggcgccgcacgaattctcacgcgcgagcgcgtagtagcgaagcagcacacccgcgagcgacacattggggtcgaagacgaggaagccgaaattacagaccaccgcgtccaccgggttccccgggttaaaggtctcgatcttatcgagcggcagatcgaggggcgcggcgcgtcccccttccgtgttgtcgtacttaacgcctttccagacgccgtataggatctttcgcataggttctctttaagtcggagggctcgctgcgggatctcgcgccccggcatcagccttcctttccgcggcagacataggaagttccctccccggtccgtctgccgtgcgtgcgtctcctctttggcacgaattgctggttttccagtctgcttcttgcttcgggcggtacccggagtcctcacgggggaaaattcaaagttttctccccgccggctcttcttttatccgccgtctgacttcaccatcatagtaagaagcccgcgttttttgaccggctttggcagtacccggaagtactccgaaagcagtgccgggaaagcatatcctcagagtcagagttccgccactgcctcgatttcaacgaggcacccaaagtggagctccggcaccgtcaccacgatccgggccgggcgatgatcgccgaaatacgcggcgtactcctcgttcaccgggccccagtattcccccttcgtggtatagacgcggcactgcaccactttcgtgcggtcgcttccggcagccttcagcacgcggtcgacgttctcaagcgcctgcctcgcgtgtgcccggatgtcgtccttgcagacttcgcgtgtatccggatcaagcgacagctgcccggacacatagaccatgccgtttgagataacacctggcgcgtagtggcctgaattcaccccgttgaaatgaggatccacgattttcattctgacgctcctaattctttttaattatgtccaacgggtatggattgtaatgattaaggagaagatgatcgagctttcgcggcaggaatctgactcggagtttcccgggaaatggctttccctcactctgaaacccggagcctgaacatgggatcccggtgtcatccaaaaagcctagaatttcccgttcgggtttcgcgccgcggctttctcccgtccgttatgttccgcagacaagagggaaccgcggtctggcaccgaaaagatttgaaacagttggaaaaacaggaattcagacggctttttcaccatctgttaaagtgcagcattgaatttttcgttttttaatttttatcagggatcctctaacctcagattcttcatcatgcgatacgctattttcgcggccgccgctgccgcacttctcacgatttccctcggggcctctgcggcgcccggagtctcagtcctcgaagtgtcgaagcctgtcgggctctcatacctgatcggagaagcgaagaatctggaaatcgtgaaggtagaaggccggatcgtgaagcagctggaaaagaaccgctacctactcactgatcgctcggggcacgcggttgaagtcgtgctggacccgaaattcgggctcccgaaggtcggggcactctgccagcttttcgcccgggtgcataagggcgataacggcgtggtgcttcacgcctggtcacccaaggtgcttgcggataacgccggctgaccgtccttccgggtccttcgcctcattcgcaaaagcggcccccttataatgagggtcgcttttttgtttttactttttctccattcaggaattccattcccactgttgccgccatgtttaccgttacgcgttaccacgacatctcctgcggccatcgggtgtgcgggcacgaaaacaagtgctcccacctccatggccataactaccgcatcacgttctgctgcgcgggagaactggattcgctcgggcgcgtgatcgacttctcggtcatcaaggagaagctctgcgtgtggctggaggagcattttgaccaccggttcctcatctggaccgaggatccgctcgcggatgccctcctttcgcttgacccgaaggtggttcaggtgccgtttaatccgaccgcggaaaatatcgccgagtatctcgtcactgtggtgggccctgagcagctccgcggcacgggtgtcaagctgatccgctgcgacgtggaagaaacgcggaagtgcaccgcgacctttacgctttgatccgggaaagataggaactgctgccagaatggaagaaatccgttattccatcaacgaaatattcgcgtcggtccagggtgaagggctgctcgccggaacgcccgcggtttttgtgcggcttcagggctgccccgtgcactgcccgtggtgcgacaccaagtattcctggaaagaggatggctccggaaccgcgaagattcccctttccgaagttctcgtgaaagacagccgtccgagatccgcggacgcgaccctggatgaactcgtgaatctcattctggaacgctggccccggatcccgctcgtcgtcatcacagggggagaacccgctgagcagccgatccggccgcttaccgagcgcctgatcgcagccggaaaacgcgtgtcgcttgaaacctccgggttccttgaaatcgatgtggcgccagagactttcgtcacggtgtccccgaagatcacggtcccgggcggccgggtgctcgactcggcgctcgagcgcgcggacgaagtgaagatggtgatcggggatgaatcagacctcgcggcgcttgacgcgatcacggataagatccccgagtcgaccccgatttcccttcagccgctttccatggaagaatccgcggcgtcactctgcttccggaccgcggtggagcgcggcggccgctaccgcgtctcggttcagctccataaggtgctccgcgttcgctgaaacacggtatcagagggagtagttcccctccctcaccggtgtttcccctccccccttttgacgcgaatttgaaatcagcgcattactctcctgagagatttttttaactacggcgaagaccctgttttcttcgccttttctctcaggatgtcatgacgacactcaacgaaacccgcacgggctccgcacttacggacgacgaaatccgtgcgaagtatgaagcgcctttccggcacggcgcgggattagctgacagccgggcaaaacgcctggccgcggcccacttcattgaatcgctccgggaggatggcatcccgatcagccgggcctgccgcattttcggaatgccgcgaagctccttctactaccggaaggaaaacgcgctcgtgtccgtcaggaagcgccttgagtcgaatcttgaactcgcgcagcggatccgggcggctcaggaagcggccgggtggacactcgggagccgccgcgtggccgaagccctgaagcatgacggttacccgagaaagcctggtcacaaccaggtcgcggaagtcatgcggtccgcggggctcggtccccggaagccgaaagagaaagcctgaacagaattcttctctccggaagaaactgagcgccgcggcgagtccccccgtccgcggcgctcattttatcttccggccgccttactctcaggcgatcgcaccccagacaaagagcagcacgagctgccccgacagaatccgaaggaacatcgagaccgggtacaccgttgagtaggcgaccgccgcgatgtttctcccggaaagcgtcccgatataggcgagcgccggggtatccgtcattgcgcccgcgatgaggcccgcggccgaatggaaattcaggtgatagacgcggagcgcgataatcccggcgatcagcgccggcaccaccgtgatcactgcgccgagcgccgcgtacagaaacacgcggccattcatcagagcctcagcaaaaccatcccctgccgcaagcccgatgctcgcgaggaaaaacaccatcccgaactcccgcagcatcagattcgcggacggcgtcatataggtgatcaggcggagcctcggcccccaggagccgagaagaatcgcgatcacgagcggacctcccgcgacaccgagcttcaccggaaccggcatcccgggaaaggtaatcggaacggccccgacgagaatcccgagcgcgatgccgataaagagtgaaagcatattcgggtgattaagcttctgctcctcgtcgcccaggcgttccgcgagacgcttcacggaattttcggggcccacgcagtaaacacggtcaccgagctgcagcgtgagattgtgatagggaaaaagctggaggcctgagcggaacacccgcgtgatattcactccatcaagccggctgaggtggagatccgccatctgaagcccgttcaccgagggacgggtcacgcggatgatgcggctggtcaccggggaatgctcgatatccgaggcgaaatcctccgcctcggaaccaaaaaacgcgatgatcgtctggcggtgatccgggttggacacaatgcggagcgtgtctcccgcctccaccacggtgtccgctccggggctcagcagagtgccgtcatgaagaatccggctgcagataaaaggcttcccgatgatttccgcgatctcccggatcgtgcggccggagagtgccttattggtcagctcaacgtgaaagaagaccggcttatccttcgccccttccgtcgcgtcccacgccgcttcttccttcgcgagatcaatcctgaaaaggcgcctcaggaaccgcacggtgagcactgcgccgatcacaccgagcggatacgcggaggcgtagccgatcgtgatgtcttcgcccgaataaccgagttcagaaagcatatcccgcgcggcgcccagccctggggtgttcgtcaccgcgccgaagtggataccgagcatctgaggaagtgacacaagcccgggaagaaccgcggcgaagagcagcgtgaggaagagccccgcgaggatgattccgatcgtgaggagattgagtgtccggccgttatgcgtgcggaatgaattgaagaaggacggtccgacctgaagcccgataaagaaaacgaagagcacgagaccgaagtcccggataaaagcgagcaccgccggatccacccgggcgccgagcgccgatgccacaaggcccgtgaagagaacaaacgtcaccccgagtgacacgccccggatccggatccgcccaagcgccatgccggccgcgatgaccagcgagtagatcaaagccgcgtgcgcgggtgactgcgtatcggtgaagagcgctgtgagccaggacatcagaaaaacctctcccttcttcttttttatgtgcgcgcggttccgcgaatgaaaccgaccagagggagcggaaccggctgagtcccgattgtaaaacgaagaggaagcggtctcctttaagggaaagaaaaaccgggcggcggggctgcagccccgagccgtccggtctggtgtcagtgctttctacgcgcttcagagcttcgtatcgaaaagcgccttctgctgcgtaaattcgatcatgccgtagacaccgccctcgcgcccgatgccggactctttatagccgccaaacggcgccgccgtgtcgcgcgggctcgaattcacgtaaacattcccggcttcgatccggtgcgccacagcaagcgcctcatccttcggcccgaagacaccggcgttaagaccatagcgcgtgtcattcgcgatcgcgaccgcctcatccaccgtgcggtaggtgagaacgcagagcaccggcccgaagatctcatcctgcgcgatcgtcatgctgttcttcacattcgtgaagatcgtcggatggatgtagaggcccttcccttccgtcggcacttcgccgatcaggagcttcgcgccttcctcgacgcccttcgcgatatagcccgagatcttcttaaactgggcttcggaagcgacggggccgagcttcaccttcttatcctgcggattcccgaccgtgtactcgcgggcgatttccttcagcttcgcttcgatcgccggcgcttcagcctccggaatcaggaggcggctgaacgcggtgcaggtctgtccggaattgaggaagatcgagttgaagaggatatgaatcggctcatcgtaatccgcgattcccgggagcatgacgtacggggacttcccgccgagctcgagactcacgcgcttcacggattccagcgcgtgctgcgccacggtgacgccgcccttggtcgacccggtgaaggacaccatattgacgagcggatgcgtggagagggaatttccgatttcgccgccgcggcccgtaatgaggttaaagacgcccttcgggaaaccggccgcctcgatcgcttccgtgaggtaataggcggagagcggcgtatgctggctcggcttcagaattacggtgttccccatgaggagcgccgggacgatcttctgaatcacctgtccgagcggatagttccagggggtgatgcagccaaccacaccgaccggctcgcggtacgtggtggaggcgcccatcttttcaacgagcggcaccgtaggagcgagatcgatataggaacgggttcttgtgtactggtactcgacctggcttgagcgcgtaaacccaaccgggctcccgagctcctccacggtgatccggacgagatcctcttcacgggcgcggaattcagtgaggaatttctccatcagcgcgatgcggtccgcgagcggcgtatcacgccacgcggggaacgctgcggaggcggctttcgccgcccgatcgacatcctcagcgtttccggccggcacccgggcgatcacgctgcggcttgccggattctccacttcgatccatttatcggacgccgacggcacccaggctccgtcgatatatagcttctcgaaatccatctttcctcctttcatcggaaagttcctatggatttattgtgaacccctaaggaactctcctgattaataacgagggtaaacccttcatctatcgtaatccagttgcagaccgcaggtttaacaggtctaattaacccgattccctaatttttagagaaaacaacaatccgatgccctgagtcactttgcgggcacggaaaaacctaaattcaaaggaaggtcatcgtggtcaacgttaaccgtcgcgccctattcggcgccgccgcttccgcggcactgctgtcatccattccccaggctgctctcgctttcggcgagcgcccgattacgatcgtggtgccgtggcccgcgggcggtcccctggatgtctctgcccgcattctcgcggacgcggttaagggcgacctcggcaccgtgatcgtcgagaaccggccgggtgccggcggcacgcgcggcgtgagttccgttgcccgtgagaaaccggatggccgtacgctcgtcgttggcgccgtcgcgactcacgcgatcaacccctcgctcttccgccaccttccttatgacccggtgaaggacttcaccccggtcaccctgatcgctcacgtgccgaacgtgcttgtgatcacgcccgccttccagaagaagaccggtatccgcaccgtgaaggatctgatcgcctacgcgaagaagaaccccggaaagctgaattacgcctcgggcggcaatggctccgcgggccacctcgccggtgagctcttcaaggctgacaccggtgtcaacatcgtccacgtcccgttccagggcgcaggccccgcgaagctctccgtgatgagcggccagacgcagctcattttcgataacctcgcctccgccaccgcgaatattgaggccggaaaattcattccgctcgccgtgacgaccgcgaagcgcgcgaaggcgctcccgaaggtcccgacgcttgaggaatgcggtctgaaaggcttcaacatttccacctggtacggtctcttcgttccggcgaagactccgaaggccaccgtggataagctgaacgccgccttcacgaaggcgctccggtcgaaggaagtggacgcgcgtcttgataagctcggcggcgaagccgctccgaccacgtccgctcagttcgcggctctcatccgcgaggaaatcccgaagtacgcgaagatcgtgaagatctccggcgctcacgtcgactgataacccggaaaagccggggtgattcccgtcaccccgctcttctccggacggtttctttttcgcttcaatctgccggaaatggatctgggcagagctggtttccggctctgcccgttcttgccttcaagtgcgggaccttctgatcctttcggcagtcactgactgattggctttctcttaaaaagcgagttttattttgcgcatcaaaaacgagagagatttctgggcgggcatactcttcgccgcctgcggtctcttcttcatcatcacggcccaggagaacgagcttgggtccgcggcccgtatgggccccgcctatttcccgacgctcctcgccggctgtctcacggcgctcggcctcttctgttccgtgaagggacttttctccacgggcggcgcccaggatggcggccgtgtcgggcgcttccacttcggcctcatgatcctcattctcggggcgatcgcgcttttctgcgtgctgcttccgtttgcgggctttgtcgccgccatggcggtgatgatcgccgtctgctcgctcgcaagcggtgaattccgggcgaaggaagtgatcgcgcttatcgtggtgctctgcgggctctgctgggtgatcttcgtttacctcctcggcatgacgatcccggtgtttcctgagtttatggtgggggaataagcgatggatctcgtttcgaatctgcttctggggtttgagaacgcgctgtctctcacgaacctcatctactgctttatcggcgtgacggtcggtacgctgatcggcgtgctgccgggcatcggcccggtcgcgacgatcgcgatgctgctcccgatcacctatacgcttgatccctccgctgccctcatcatgcttgccggtatttactacggcgctcagtacggcggctccaccaccgcgattctcgtgaatattccgggtgacgcgtcagccgtgatcacgtgtctcgatggccacaagatggcgacaaaggggcgcgccggcgcggcgctcggtatcgcggcgctcggctccttcttcgcgggctgcgtcgcgaccctcgtgatcgccgccttcgcgccgccgctgattcaggtcgcgttcaagttccagccggccgagtacttcagcctcatggtgctcggcctcgtcggcgcgatcgttctcgcgaatggttcgctcatcaaggcgttctgcatgacgctcctcgggcttctcgtcggcctcatcggcaccgacatcaattctggggcgctccgctttacgtttggtcttgaggatctccaggacgggcttaacttcgtcgcgatctcaatgggtatcttcgggtacgccgagatcatgaataacctcgaagcgcgccagacccggaacttcaatacgggttccgtcggcaaggttctcccctcctgggccgatatcaagaactgcttcggcccgattgtccgcggcaccgcgatcggttcgatcctcggcgtgctgccgggcggcggcgccctgctctcttcctttgcctcctacacggttgaaaagaagatcgccggaaagaacgcggaccccgcgttcggcgaaggcaatatccgcggcgtcgcgggaccggaaaccgcgaataacgccggtgcccagacctccttcatcccgatgctgacgcttggtattccgagcaacgccgtgatggcgctcatgatcggcgccatgatgattcacgatatccagccggggccgcttgtgatgagctcagacccgggcctcttctgggggctcattgtctccatgtggatcggcaacctgatgctgatcatcctgaatcttccgatgatcaatatctgggtgaagctcctcaaggtgccgtaccgctggctcttccccgcgatcatcgcgttctgcgtgatcggcacgtattcgatcaataacaacgtcttcgatatctgggtgtcgattgtcttcgggcttctcggctacctctttatcaagcttggatgcgaggcagcgcctttcattctcggcttcattctcgggccgatgatggaagagaatctgagacgcgcgctgctgctctcgcgcggcgacccctcggtcttcgtcacgcgccctatctcctgcggtctcctcattgccgcggcgatccttctcatcctcgttctcgcgccttccatccggaagaaacgcgaagtggcgttccaggatgatgactaggcttcagatctcctgttaaggcctgacaaaccggcccgggatacctccccgggccggttttttcttcccggttgtgaatttctgtatataaacagaaatcagtctcaactagatatttcggattatcagctatttaccggaatttcgctttttttacccggtataccattgtcaaagcccattttcacgggtaaactcttcggtggattcagatacctcttttggcttagacgtcacctgtcaactccggcaaagatcggaagaaaaacgtcttttttgtattacatataaaaataattactcctgaatcccggcggtctctgagaagcctttgcctgaatgaaccgagagacgggggagcgattccccgggtgttccgcttcaggcgtgtgtacggcttctctgagaccagaagcaaataggagaagcaagatgatttttcaccccgtatcccggaggtccctcttaaaggcttttatggctgccggactcccgatgatgcctgttgcccgcgcggttgccgaagcggtgaacagcaaggacgcgtgcacctggtgcgcgtgcgtgatcaactgcggacagcgctgcgcgctccgcgtcttttcgcataacggacaggtgatccggattgaaacggataacacgcagcccgatacgctcggtccccgtcagctccgggcctgccagcgcggccgctccatgcgcgaacggatttattcgcctgaccgactccgcttcccgatgaagcgtgtgggggaacgcggcgaaggtaagtttgagcgcatctcgtgggacgaggcgctcgacacgatcgcgaaggaatggacccggatcaaaaaccagtatgggaacgattcgatctattggcagtactgctcggggcagcagtcgctcgtcagctcgcgccgcgcctggcagcgcctgatgaacctgatgggcgggtacctgcagtactacggctcctactcaaacgctcaaggggccgcggccttcccgaagacctacggcggccgcccgagttccctcccgagtgaaatcgcgaacgccgagctctacgtgcttttcggcaacaatccgtctgtcacgcggccgtccggcggcggcaagggcttccagattgacgccgcgcttacgcgtcaccgcccgaagaaaatcatcgtgatcgacccggcgttcacggatacctgcacggcacgcgccgatcagtggatcccgatccgcccggggacagacgctgccctcatctcggctctcgcctacgaattcattacgaatggctggatcgatcaggcgttccttgaccgctactgcgtggggttcgatgagaagacgcttccgaaatccgcccccgcgaagtcggactacaagtcctatatcctcggcgcgggtcccgacggtacggcaaagaccccggaatgggcggcccccatcaccggcattccggtggatgtgatccggagcctcgcgcgcgaaatggcgatgacaaagcccctctttgtttcccagggctggggcccgcagcgtcaggctaacggcgaagccacctgccgcgcgatcgccatggtgccgattctgctcggccaggtcggtctccccggcacgaacaccggcgctcacgaaggaaacacctccttccccgcggtctatctcccgattggaaagaacccggtaaaggccacgatcccggtctacatgtggacggacgcgattctccgcggacctgaaatgacacgccgcaactcagcgcttcacggcgcagagaaactccgcaccggaatcaagatgatcgtgaattcgggcggcaacacgatgatcaatcagcacggcgactgcaactggacggataaggtgctccgcgacacgtcgaagtgcgaatttatcctcgtctgcgacaacatgatgacgccgtccgcccgctacgcggatatcctgctccccgatacgctcggccccgaaacgaacgacgcggcgtgccagggcggctcgcacggcgacgtggcctgcatgctcgcgatccaggaagccgtgaagccgatgtatgaccagaagtcgtcctttgagatctgcaggcttctcgccgcgaagctcgggctcgaggagaaattcaccgaaggccgctctcagatgggctgggtgaagtggtgctacgaggaaacgcggaagaaggtcccgcagctccctgacttcgcgaccttctggaaggacggtatggcgaaggtctggggctaccgcaaggacccgatcgcgcttgaagcgttccggaaggacccgatgaagcacccgctgaagactccgagcggcaagatcgagatctattccgaacagctcgcgcgtgaaaccgcggactgggagatccccgaaggggatgtcatttccccgatcccgatcttctaccggacctgggatatgccgggtgaccccgaaggaaaggctttcccgctgcagtgcttcggcttccacgggcccggcaggattcactccacgttccataacctcccgaaactccgctacctccaccccgatatggtggtgatgaatccgatcgacgcggaggcgcgcggcatcaaggatggtgaaaaggtggtggtcttcaaccgccgcggcggcgtgatgctgcccgcccgggtaacgccccgcatcatgccgggcgtgatcacgatcccgcagggcgcctggtataagcccacgatggtgaacgggatgcggattgacgtcggcggctgcatcaatacgctcgccggacaccgtccgagcgcgtacgcgaaaggcaacgcgcagcacaacatcctcgttgaagtgagaaaggcctgaggccggaatatcaggagcagaaacatgggacagaaaggattttattttgatcagacccgctgcaccggctgtcggacttgctccgtcgcctgcagtgacctgcataactacgcgccggatatcgtgctgcgccgcgtgattgagtttgagggcggcacgtggaaagtgaacaccaacggaacctgcactcagaatgttttcgcgtactacacgtcgatcggctgcaacgagtgcgagaacccggtatgcgtgaaagcgtgcccgacgggagctcaccacaagcggaccgaggacggcctcgtcgtgatcgatacggaaaaatgcatcggctgcggcatgtgcgcgaaagcatgcccgtacggctcccccgtgctcgacaaggcggccatgaagattcggaagtgtgacggctgtgtcgcaaggacatcaaagggcggcatgccggtctgcgtcgaggcgtgccctgagcgggcgctcgaattcggggatattgaggaacttcggaagaagcacgggaataacgccgcgatcgcgccgctcccggatcccgcggaaacgaagccctgcctcacgatcaggccctgcgcgtcagcaaaaccctctggcttcaaaggcggcaccgcgcatcggttctgatttctgaatcggaatatttacctcttgatcccgtcctccctcaccggcaggatgggattttttatcagccccttgaaatttttatcccctgcccccatttaattacgtattgaagttttacttggggacggcgtgtgccgtccgctagtcaggagatgcaatagaaaatggctgcacaggttcacggcttccagaccgaagtaacgaagctactcaagctgctcgcgaattccctttattccaataaggagatctttctccgcgagctgatttcaaacgcctctgacgcggttgataagcttcgcttcctttcgattcaggatccgctcctcacgaaggacgatccgcttttccatatccgcgtgaaggcggacgaagcagccggcaccctgacgatttccgataacggtatcggcatgacgctggatgaagcgaacgagcatctcggcacgatcgcgaagtcgggcactgaagagttcttccgcaatctctcgcaggatcaggcaaaggcctcccagctgatcggccagttcggcgtcggtttctacagcgcctttatcgtcgcggaccgcgtgaccgtggtgtcccgatccgcgaaagcggccgcgaacgaagccgtccgctggacctctgacgggaacggcacctacgagtccgaactcacgacaaaggacacccgcggcaccgatgtgatcctgacactcaaggattccgaaaaggaattcctgaacgaatggacgctccgcggcatcatcacgaagtactccgaccacatttcgaccccggtctggctctgggaaaaagagacgcccgcggacgaaaagaaggaacccacctggaagtgggttcaggtgaatgacgcgaaggcgctctggacgctgcccccgaaggacgtgaaggacgagcagtacaaagagttctataagcatctgactcacgactacgacgatccgctcacctgggcgcataaccgcgttgaaggcgacctcgagtacacgagccttctctatattccgaagaccgctccgtgggatctctataaccgcgagcagaagaacgggctgaagctctacgtgcagcgtgttttcatcatggataacgccgaagagttcctcccgaactacctccgcttcgtgaagggactcgtcgacacggctgaccttccgcttaacgtgtcacgcgaaattcttcaggacagcgcggtgacccggaaactccgccgcgcgctcacgaagcgcgccctcacgatgatcgggaagctcgccgaggataagacgaagtacgctgaattctggagccagttcggccgcgtgctgaaggaaggcccggttgaggaccgcacgaaccaggaagaaatcctgaggctcctccgcttcgcgtcgacgaagtccggtacgaacgccgaagacgtgtcgctcaccgactatgtcgcccggatgcccgagaagcagaagcacatctactacatcacggccggcagctacgaagccgccgcgaactcgccttacctcgagacgctgaagaagaaggggatcgaagtgctccttctctgggaccgtgtggacgagtggctcatggggaacgtcgaagcgttcgacggcaagaccttcatctccgccaccgcgaaggatctcgaccttggggaactcgaggacaaggaagaagagaagcagaaggaagagtccgagaagcagcataagggactcgttgaacgtctgaagaaggcgctcggcggcaaggttcaggatgtgaaggtgacggcccgtctcgttgactccccggcctgcgtggtcggagcccaggatcagatgctgacgcagcagatgcgccgcatgctcgaagccgcgggtcaggccgtgccggaagagaactacacgcttgaaatcaaccccgatcacccgctgatcggccgcatggccactgaaaccgacgaagcgaagttcacgcagtgggcaaacttcatcttcgctgaggcgcagctcgctgaccagggcacgctgaaggatccgagctctttcattaagagcctgaatgagctccttctgaagtaattcgcagtacctccggaactgcaccagaaacagttccggagcgctttgcttagtctctctcttgactgccggaaagccgaaaaatcagctttccggccttttttaccctgaacggccaaaaattaaccccttttccagtcaaaaagaggcggtttcgcaaaaaaaccgcctcttttcttttgttctcagacagcgattacttcgcagcctttttcacgacaccgtcagcccagtcaaacatcgagtcaaggtcataatcacccgcgtggcccttcccccacttcacggcaaaatcaacatccgaccctttttccgcaagcttcagtgcgacagaagccggcaccgcgagcacggtgtcgcgatcctcaaagccgtgccggatccggaagtgaggcgcgacagtcacatctttccttgaaatcgaggtgaagggatcgagaagcgcgatttcctttgcgggcgccatcgcgtgatgcttcggatcacgcgcggaagaaaacgcggtgaaatgacggggggtgtttttcacagtcccgaattcatcgttttcacccgacccggcatcaaaccagtcaaaagccggcacgggtttcagccggttcacttccttcgcgtaggccttcatatcgatcgcggtgacgtgtccatccttcacggtgaggcacttgaaccggctgatatcggctcccgacttcagcgcgccctcagcgctcgcgatatagagcgaccggatatagtccgcgaagctcccggtgccatccgccttcagtgtcaaagattttccatccgcgtccttaagtccgaaacggttaagcgtcgcggggaacgcccgtgcgagcaccttggacgccgcgatctgcttcccgctgagcggaagcccggcagcggcttctgtcggcgcgttatcgggacgggccgccggcgcggcgccgtttccgacagccttcgggggctgcatcatgccgcccggaatcttcccctggtgatacaccgtctcgtccttgaagacccattcgtaggcttcatccgcatggctgaggagcgtgatcgggcagaagacgatcgcagcaaaaatatcatcgcgggctttcgcggccccgattttcttcaggtacggcagataccgtggatcatttccggtcgaccccaggagaacggatagcgcgccgcccgcgctcgtgccgtcagaaataatccgatcggtgtttccggcggggagttcatttttcacagcgcggagataacggaccgcagccttgtaatccacgatcagcgccggggcctttccgacatagcggccagcagcattctttgttgtgcggccgcggatcgcgggggacacaacaacgtatccgcgggcaagcgccgcaagaagcgcgctttcgccgccatcaaaattcggtttcttgggatccgcgatgtcgcctggcatgtacccgccgaccgagttcgggaggaaaatcggcgcggtttctttcgtataaccgttcactgtgccgcccttcagatacgcttccggcacatacaccgtaaggcgctgacaggagccgcagctcgggcgtttcacgtacgggatctttgcgtaagtctgccaggaaaccgtcttcccgttcagcgaagcggattccgcaataccggttttcggaaactgaaaaccggcggaagcaaaagcgggagccgcgctgacggcgagtgaaagccccatcgcgagggcaaatttcttcaacttcaattgaacgtccttcctggaaaaaagatgcggaaagaaaaagcttagcggggccgaaaaacctgagcgactcatcgctgcaatccgcactgagcctggcacaaattctcaaattattgattaaaaatcatttaatcaccaattctgtgctttttccgcttcctgaaacgagtgttcttataaaataaaagacactcgtatttttcatatgaccgcaaatcatgacctctcgtcctaccgacccccggctttcgcgctttgaaaggaaacggaaagacggcactcgctatgtctatgagcgggagacccgctacaacccggagaaaggctacacggagacgctgaggacctcgcttctctataagatcacggcgtccggcgaccgtattgcgacaaacggcgtggggagaggaatgcgacctgcggctgccgatgctgcccgggcggggataatcaggctcgcgctccgaagcacgttcggggacgaaaccggccgggccgtattcgacgaggcccgggactttcttaaaacccggcttgaaccgtcggacaggggagaagccccccagatcgccgcgctttaccgcgaagtggggctgaatcctgacgcccagtctgaattcctccggcggttatcgcctgaccaagggacgaggatcgggatggaattcgccccccgtcctcccttcccgctctccgttcccaataccgatcggctgccgggactcatggatgtccggctgatgcctccgcttcagcttctcgtcagtaccgcttcagggtttcctgcggcgttttcaagaaaaagcgctttctttcttactcctgatcagtccccggatcttctcctcgcgggagaaaatccccggcctgaaatactgaaccgcaccccgcactttctgctgaaactctcagcagggaacccggcaatcctgactgtcattaattcccgtctcccggaactcgactggaagagcgatgtgctacccggaaatccggacctgaagtccgcggaaacctcagcagatctcccctttctcccgggaaaacgccctgcccggctctttatccttcggtcaaaaaaccggcagaacaacttcgcctccgccctttccgccgcggttcacgatgcggcggacgctatcacatcggggcttatgccttttgacgctcgcaattcccttcatagccgctatctcaaattgattcccgggcgcgggccttccccctctctccgggtgcttgacgcccggatcgcggatgacgcgaagcgcttcggtatctttgtcattgcgaccgatctgaagatctccgcccggaccgcgctcagtttcatccaggctcgggaccggatggcggaatttttcagtgaccttacgcggcacccggatcgggaagccttctgcgtctggaccccggagcgtctcgccgggcgggacttcgtgaggatcgtgtcactcatgatcgaaggccccgcggtgtcaccagacctcgcctcttccctcccctcttcgcgctaaaccggaaacggctttccagccatattttcaaaacccggccgctatactcgaaaaacttatgaggtcccgccggtcatcggcctcatcctctacctatctgcggagacgcccgacgcggacgctccggtgttttccaggttttattttggaatcatgcggaaactcacttacaaagaaaaatttatccagatggaccgcgaggcggcagcgaccgccatctgcgcggtggtcatcatggctgccttctgggccgcgcttcttctcctgaaggattcaccggaaaccttattcgagatgccgctctggttctcggtctcatgcctcgggggctacgtgctttccgtggtcgccgtgattttcctcgtgaagcgatacttccgggatttcgatctcgatcaggacgcgcccgaagaatccgaaacgacaaagggagacgccgcatgacgaaccccgtgatgacactcgtgcccgtgatggcattcctcgcgctgctcctcgccgtggggtttatcgcgaaccggtcgctccggaagtcagaagactttgagcgcgattacttcatcgcgaaccgcagcctcgggggcgtcgttctcgcgatgacgcttgtcgcgacctacggctccgtgagttctttcgtctcgggtccgggcgttgcctggaatctcggtttcggctgggtcgcgtttgccgcgccgcagatcatcaccgggttcctgcttctcggcgtcgtcgggaagaaactcgcggtgctcgcgcgccgcacggattccctcacgatcatcgatatcctccgtgagcgttacggttcaaacacgctctccatcatcttttccgccgtgcttctcattttcttcaccgcgatggtggtggggcagtttatgggcggagcgcagattttcgccgcgatcacagggctcgactataagctcgggctcgtactcttcgccgcggtcacggtgatctatacgtcatccgggttccgcgccgtggtctggaccgacgcggtctgcgcggttctgatgctgacagggatggtgacgcttggctacaccattctcgaggacggcggcggactctcgtccatcatgcagacgctttcagccgcggacctgaccgcaaatggcgtcagccgtcatctgctccctgacgcgggcgggctccttccgtggtcgcttctcttctcctcctggctcctcgtcggcttctgcacggtggggctcccgcagtctctcgtccggtgcctcagctataaaagcacccgggacctcagccgcgcgatggtggtggcgaccgtgatctgcggcgcgctgatgatcgggatgacgcttctcggcgttctcgcgcgcggcgtgattcttgagaaaccggcttcagggacagacgccgtgattccgcttctcatcgtgaatcacatgcatccgctgctcgccggcatcacgatcatcgggccgcttgccgccaccatgagcaccgtgagctctcttctcatcgcggcctcttccaccgtggtccgcgatctctatgagaagagcttcggaaagaaccccgccgatatttcgcatgacgcgagtaagaaaatcagcgtcacgatcacgctgctccttggcgcggtgtcgattcttcttgccatgtacccgcaaagcatcgtggtctgggtgaacctcttcgcgttcggaggactcgaaagcgcgttcctatggcccgtggtgctcgggctcttttggcctcggatgaacgcctgcggtgcgatggcgggcgtgttcggcggccttggcctctataccctcgcgatggcgaccggctttcacttctatcacttccataacatcgtgatcggaacagcggctgggctccttttctcggtgatcggaagctacttcggaacccccacgccgcgatccgtgaaggcggtcttcttcccgcataagatctgacacggcggttaccgcccatcaaaaacgcagaaggtttttcaggccttctgcgttttttgttttccccgggagagactcagaacgacagctccgcgagctcgttgatcttcgtgcgaagtctccggaagcggttaatcagcgcaatatgaagggcgctcgtctcgatcgccttgaagtccccgcgggacacccggtccatgtgggactgaacaagagcgagttcgttatcgttcagcgtcttccgggtcgcgagcagcttcttatgcgccgcctcgcgcttcaccgggtcatcagccgacaggtaatcgagtgcggtcttcaggtcgtccgcgattctcgcgtgcgcttcgagaagctccttctcgccctgttcatcaaaaaaccgttccttcttcactttatgttcgcccagcccggcgattaccttatcgatttcgtgaccgatactctgaaggtccgcattcttcgcgtgaagctcttcccagcgggcaatttcagacggcgtgagactcgtctgcacgattcgggagagatagctgttcaccgcgtgacagcgctgacggatcatcgggtaatcctgccgcaggagcatcacggcgcccacagcggggttctttgtgatgaggtccccggccttccgccagaattcactcacgaaccagcaggttttctcaatctccccttcagcgagatggaacgcggtctcggggtcggagagcgagtcttccgtcagtgactcagtccctgtgctcaccatcggagcggccggcagcagccgatcaacgagcgccgcgaccgggttcaggatgatgaggcccaggacaccggaaaccgcgttgaagaccacatggaaccaaatcacctgatcggacgccatcgattcaaacgcgcggctcacctccggaatgaggatcagcgccgccgcgccgatcacgaagcagagcacccggaaaatggtgttccccattggcgcgcggcgcgtcatcgcgtcactccccatcgtggtcacggaggcgaggaatgcggtgccgaggttcgcgccgagcacaatccagaggccagaggacaccgcgagcacccctgccgcgacgagccccgcgtcaataatcacaaccgcgagcgacgagaagcagagaaaggcgagcccgataccgagcaccgtgcagaagaaggcatttccttcaatcgagtgaaagagcgccatcatggcagcactgtctttgatcggggtcgtgatgtggccgatcagcgtgagcgcgagcatcaccacaccgagccccatcaggacccgcccgaactgaccgagtgcggtatccgacttcttcatgaagaggtaaacaccgaccgcgatgagaaggggcgacaccgcgtcgatattgagtgacaggacgcgcaccatgacggccgaaccaaagttcgcgccgatcaccgcggcgagcgcgatagcggtagagacgaggcccttcttctgaagccccgagacgagaagggtcgcggcggtggaactctgaaggagtgaggaaaggacgaacccggccccgaaccccgaaaaccggttcgtgagccaccgcccgagaaacgaccggagcttcgcgccgaaggtccgcatcatgccggtgcggatcacgtacgtgccccacatgaggagcgccacagcgcccgcgatattgatgagaatgacgatttctgccacggcttctcctcaagaaaaagtttccgggccgtcccggactgaagacaggcggaattttatgcctgaaaactatttttgatgcacaaaattatgtttttattcagcctcgtttaagacttctgttgataacaaaaaacaactgaatctatatgtaacaaggtattgcagacccacccacaatatgcaccccatatgttgatttttgagacacataataatttccggcaagtccagcatttaccggatctgcgggcatttcggggcattttacataacactatagatagtatgtgtggtttgtcatcaaaggtacatattggcataccgagtgaaaaaagccttacttactgaacgaacgattggtatactgaagtcctcaggagaacgtttataaaaggaagaaaaatatgaaatatcgttgcacagtttgcggacacatctatgatgaagaacgcgaaggcgtgaagttcgctgacctgcccgacacctggacctgcccgacctgcggcgcaccgaaatccaagtttgttcctgttgttgagggccagacctgggcttccgagcacgttcttggcgttgccaaggatgttcccgaagacatcaagaacgacctccgtgccaacttcaacggcgaatgctccgaagtcggtatgtatctcgcgatgtcccgcgttgctttccgtgaaggttatccggaaatcggcctgtactatgaaaaggccgctatggaagaagccaatcacgcttcccgctttgccgaactgcttggcgaagttctgaccgactccaccaagaagaacctcgaaatgcgcgttgaagctgaatacggcgctaccgaaggcaagaccgatctcgcgaagcgcgcgaagcaggcgaacctcgacgccattcatgacaccgttcatgaaatggcccgcgacgaagcccgtcacggcaaggccttcaagggtctgcttgaacgctacttcggcgaaggcaagtgctgcaagtaatctgctgactgtccgcagcagttcagagctcccgctctgacataagcactgaaagaggcgtttcgaaagaagcgcctcttttcgtttgcccgaaaaaattccggaggacgcccttgctcctgcacctgaggcaaaagaaaacccgccaggcgctgacaccgggcggggctgctcaaatcaatcaatgaggttactgaaagctaaaaaaggagaaactcattttccgggtttctcctttttctctctaggagcacttcgcgagcttcttccagaggacttttgccgtatcgtattcttctcttgaaatccggccatacgcaatatcggcatggactgtaacgaaatcacccggctgaagttctcccagcagccgcgttgttaccgtcttcttcattccaagagcttcaacgatcgctgaagccgcgttgacgctcacaacccttgcgggcattccaatgcacatgtttccctctccaaagacacagtgcgtttgagcggatcctttgcacacgctgatccacccagtccctttcggaactacaaaaattctattcgtaattcctatagaaaaaaagagttcataagccgtacgctgaagggattagactttagggtttagatatctgatttctattaattttttatgtattactgatacatattcaggaaattccttcagaactttagcgttttcacccgctttgagccacaatatctgtaagggactgttccataaagaggggtggcctgaaggaggtagcgatcggtctcgcccggtttgaagggctgtaagaaacaccccgctccctcctaagttgtaattttcatcatcccctctcctcttttcaggatcggatcccctgaaccattgaggaggcgtgattatggaaagcgaaaatgccactatccagcaggaacccgcggctgccggcacggtttctcttccggctgaggacttcggccggaaaacgcttgatgaggcggaaacctttgcggataccatcctgaaacggatccgggtaaaggacgcggaaggcatcaagtctgacctcacctccctcctatcaggcgccgaattgctcacatccggaaagaaggatgaccgggggctccttgccacgctgcccgtggtcggaaagctctttgaagcctcgggcatcgcttctcctgaagctgaaacgctcatgaagtcgatcggcgtgatcagcggaaaactcgacgccgcgcagttcgggctgatcaaagacagcgcgacgcttgaaaccctcgccgcaaaaaacaaagcgatcggcgcgtcactcgctgagctgctggagaccggcgccgaagcgctcaacaccgcccgcaaggcaggaactccgcttgacttcagccgctttgaaacggtcctccggggactcagcggcatacgggatgaaacggaacggatggcgcctcagatccgcctgatccaggagaatgaccgggcgctcgccgggaagatccagtcgatcatcttcgtactccttcccacgtggagggaagtcatgcagactgaaatcgagctccgtgaggacggcggtccgcatgaactgaatatcgacggaaagaaacccgaaacgtaccacgaagaggctctgaaagaagcctatcggaaactgatcgcggggcttggtgaagcgatcacgctcgggagtgaagcggcaagacttcgcgaactcgcggatatcggtcttcagcagctgaagcgggagatcggatatctggttccaaaagcggcagcgaccgccgcgccagaagtccgtcagtcgccgcttccgcccgctgaatagcggttggggctgtctttcatgaccgcaaggccgcggaacgctgttcccgcggcctttccttattccgccgcgataaccgttttccggatgccttccggaatctgcacatcccggatccggacctggattccaaaggcttctgacaggctttcttcagtcagcacgtctgaggcccttccaaagaccggcgctttccccttcccgaggagcagtgtgtcatccgcgagttccagcgcgtgatccggatagtgcgtgataaagactgaactcactccctttccgcgaagggatttcagggtcgacagaatccgccgctggtttctgaaatccagccccgcctcgggttcgtcgagaaggagaagccccgggccggcagcgagcgcccgggcaaaaagcgcgagctgatattcgccgcctgagatttcactgcagagccgccccgcgagatgccggattccgacggtatcaagcgcttcaagcgccgccgcttcatccgtttcatccggttccccgaattcgccgtgaaaggcgatccggccgagctctgtcatttcaagcacggtgaccgcgaaaggcggtactttggcctgcggcacgtagccgatcagacgcgcgagttctgccggggaaaggctcgctgccttccggccgccgaaaagcgtctccccttcggtccagcggagatgccctagaagaagccggatcagcgtcgttttccccgcgccattcggccccagaaccgcgaggatccggccagatccagtgccgtcaccaaaccggaagccgacgcctttcagcaccggatcccggtgcccataacggaaaagcccgttcttaacctgaagttccatcgcgagcctccttcaagccttcacgccgcccgtctttcggagcaggtaaataaaggcaggcgccccgatgagggacgtgaggacagagaccgggatttcagcgtcaaacaccatccgggctccggcgtcgaccgcaataagaaacagcgcgccaagcagaaccgaccccgggatcagacgcctcacggaaccgccgaacagcatccgcgcggcgtgcggaatcaggagtccgacccagccgacgaggccgcagagcgcgacgatggaggatgtgatcagggcggaagcgagaatcgcagtgaatctcagacgcctcaccgaaatcccgagtgaccgggcttcatcctcgggaagcgagagcgccgcgagtttccagcggtagagataaagaagcacggtcccgagcgtcacaaaggggagcgccatgaggattccggaccatgtggcagacgcgagactccccatcagccagaacgtgatcgagggaagaacagactccggatccgccgcgaatttgatcagcgctacgagcgctgagaaaagcgcgctcaccacgatgcctgagaggatcagcatgagaatccgattggatcccggaacccgggacaccgaggtcacaagtgccaccgccgcgatcccgaagaggaacgagagcgtctgaatcccgagtcccgaccacccgaggagtatcgcgagcgccgcgccgcaggacgcccctgtcgcgacaccgagcgtatccggggtcgcgagcggattccggaacagcgtctgaaaagcggccccggacaccgcaagccctgcccccgcgatcgccgcgagcaccgtgcgaggaagccggagcccgatcaccacggtttccgcggttgggtccggcgcggcctgaaagacaccggggaacaccgcgtggagaagcacttccggaatatcgcggagcggtaccgggtaagcgccggccgcaagcgacaccatcaccgccgcgatcagcagcgccaagagcccgacgccccaccgggcaccaagcccgggcagtgcccgcgatcccgttcccataccgcttacctcgcgagcttcagcgctgttccggcaccgcgtccggggtcgaagatcgaacggatttcagcttccgacaggtggatcccgaagagctttgaataatagttttccgcctcgcgctcgatattgatgtcggagaagagcgtcggataagcgcatttcgcgagccagaggagcgtcaccggcgtgtccgcggacggcgtaaaggtccggtaggtgccaagcggcatcttgaaaacctgcttctcccggacggccttcacgggcttccagtcgtgataagcgttccgatacagatcctgaggctcagccggcgtgaaattcgtgatgaagatgagatccggatcccaggcgtagacctgctccatcgtgatcaccgcgttctggttctgcgcccggattgaagaggcaacgtttctcgcgccgaccgcgtcgcaccagtactgtccgaagaagtgagagcccgaggtgacaatccggtcctttccatactggaagaggaaaagtgtcttcgggcgcttcggctgcgggatccggctgacacggctccggatccggctcaccactgaggccgagtagccatgcaccgctttcgctttcgcgccgccatcctccgggaacacctggctcaagagcatcacccactcatcaaacgtcttgataacgctgtaattccactttgtcgcgctgaccgcgatcaccggaatatgcgcggcctcaagttcagccagtgtcttcgggtttgaggcgttcgcgaacacgacctgaggccggagcctgagaagcgcttcgacattcaccgtatccccggtcataaagtcggttctgaccttcaggatatcgggatagatccgggaaaggatcccgtgcctcgcggcactcatggaaaccggagacatgccggcgagctttccgcagccgccaaggaaaatcgcggcgacagaagcgaacggataaatatccgccaccacggcccggtctatccggaggggcagcgttacgcgtctccccaggtgatccgtcaccacacgggtcggttccgcggcagccccgcgggccgcgaggaccccgagtcccgcggcgcctgccttcagggcatcgcgtcttgtcatcagcagcatggtttttctctcctgcatccttcagtatgtcgtctttttatcttttttcgctgccggaaaaattgaagggcggaaaatttccgcccttctgagtcttcggtttcttccgggcattccgctatcttagccggagcggagtgcctgagaaacgttctgaaaaccggctttcactttattccaatcgtttctccgccttttcgtggagcagcgcgcttcggaccgtgtagtcggaaagcgcgcggcggactgccgcgatggtcccgagcttccggagttcaggcgtgcaggacgaagtgatcagccgatccccctgccagcggaagcagagaagctttccgctgccatccacgcccgccgctccggcgtttccgatcgcgtagccgtactttccgatcccggtaaaggtatccgcggcatccggaatacccggctcaaaaatatcgcgtccctgataaagggccggtttttcgccgagcgcgatcccccgcagcgtcgggaaaatatcccgatggctcacccactgcttcgaaggcggcaccgccgcaggcttaaacccgtcagggagccagaagagaatcggaacgccgttcgcgtggtgataccagccgttcggctggtagctgaagcgggcattgtggtcaccggtcgcggcaatcagcgtgttctttccccagggttcgcttcttaccccctccacgaaattcccgagcgcgtttgcggcataggagtacgtctgcagcatcgagaccatctcatcatgcggcttctggatcaggaacggcgggagtttcgcgggatccactgccgcgccggtctcgtgatcgggaaggtgatgcggcgggtggttcgttgcggagagaatcatgagaaacacgggtttcccgtccttcgacgctttttcaagcagctcctttgcgtagcggaaggtccacttgtcacccacaccccagacccccatttcggcttccgggaaccgccccttgattttcgacgcgccaatcacttcatcaaacccgtggagcgggagcgaacggttcagttcccgccagttttcggtgcaggacgtgaggaaaatcgtccggtaacccgccctccggaacgcgaggacgttagagaacgggaactgctcatgcccatagcggctctgcgaaatcggagaaagcggggaatcgtaaaggagcccctcaagcgacacgaaggtgccattcccgaccggaatcccctgatggaagacgtagcccgacttcatggcgccggcgagcgcccccagggtgtcgttggtcttcggatcgtaggagtcaaattcgtcccgccccatcgattccatgagagcaaagatcacgttcggctgcctggcgtctcgggttacaggagcgggattctgcggttcaagctccttcagcgcgcgttcagccgcctccggatccgcgaaccccagttcccgaagcccggccgcaggtccccccttcagttcaagcgccttctgatccttcgtcgccacataaagcgcttcggtgccgttcggcacggtggcgttcacaaacgggatcggggaaatggagaaatcctggagccggagggggaattttccaaggctcccgcgcatggcgatccccagaagcaccgtgaaaatcacggcgatcagcgtaagcgcggttttaggacgccggaactccgggacacgcgcgtgaaagagtgacggaatgaaaagcggaatcccggtcgcgattgcgatcacggcgagatacgacatcacgggccagtcagagagaatggtcttcgtgatcgccgccgtatcgtcctgcaggaacccaaagatgatggatgaaatcggcgtccggtagaaaccgtaaaaaccgaaattgacggcgtcgagaagcacggaaagaaatacgccgaggacaaagaacaccttcgcgatttttccggacaccgccgctttaagaccgagaagccagaagagccaggcggggaaaagaagaatcgatacccacttcagatcgacccgcgccccaagcaccagcgcggagagctcatccgcgaaactgatttcaggcgaccggtacgccaaaaagaaggcgagcctgaagcccgtcataatgcaaagcaaagccgctgccgccgcaaggccccggacgagcccctgcagccacattttcctttccatgaagccagcaatattccttaatgagaatcagtgactctaccacgctgaaagaaaaatggctgtcaaaaacctgcccccggaattccgacgcggggtcaattttcttccgtaaagtggcaggcgtccgattccggcccgtccggtccctcgctgcagatcgggatcacggtgcggataccggccccgaccgtcccctcacccgcctcaatgtgcggtgccggattgatgccgcgttccccgaagtagtgtctcgagtcgccccaggaatcaaaccccacggtgtcacccgcccaccggacgcggcccgtgaggcagcgtttgcattgatcagacgtgtcctcgatacagggttttccgtcgtaaagctgataatccgcgcgatgctcggggagcgtcacgatcggcatcaggatattcgcgcccgctttgagcccgagctcccgcccccgtttatcaagcccctgaagcgctgtggtggccgcgatattcacgtccttcagcgcgaggcgggtcgccgcgatcatgttgagtccgaggataaaacggcggcggcaggcagcatcggtatttccgccctccgcctccacccgatcgccgagcggcgtcccgcgggacacgatatagggtcccatcccgatcatgtcgatcccaagcgctttgaagtacaggatatcgtccgcgagattctccgcggtctgccccgggagaccgatcatgacaccggtgccgacctggtacccgatttttttcagtgtccggaggcaggcgtcacgcacagaccagaggtggtggccgtccgcggggtgcagtgttgaatagagttcggggctggattcctcgatccgaaggagatagcggtgagcccccgcctcgaaccaccgcctgtaagtttcttccgtctgctcaccgacgcagagcgtgatgccgagttttccatccgacacccgcttgattccgcggagggcctcctcaacaaaatcaataaatttcggatcggtccgttcgccggactgcagcacgacggaaccatagtggttttcgtaggtccacttcgcgataccgaggatttcatcaagcgtcgactcaaaccgatgcactgaactgtggctcttccggattccgcagtagaggcagttcttcacgcagatattcgaaaactcgatgagaccgcggtagtaggagacacagccgacgcgttccgccttgacccgatgagctgcctcagagaggagctcccgctcgggatccccttcttcaagccccaccgcgtacgcaaggtcttccctcgtccactcgtcccgcgaaatgatgtcagaaagccttgtcatgcggcgtcactccgggcggctttcgcttcccgccacgcctcgagcgcctcggggaacggcgaaagcgtccgctcaagcaccccctggaggtgcgaaatcgcgatgccgtaattggtcatcggaatgccctgcttccggcactcccgaagccgcgcgagcatatggcggcgcgtcaccatgcagccgccgcactggatcaccacacggtagggcctcagatcggtcgggaagtccttcgataccgcgaccgtgatcttcatcgggccgcccgcgtttttcgcgagccagttcgggatcttcacgcgtccgatatcctcgccctgcgggttgtggctgcaggtttcgcagatgagaaccgggtcaccgggcttcagctcgggaagcacagccgcgccgcgcgcgagttccgcgaggtcgcttttgctccgcgccatgaggatcgagaacgtcgtgagcggaatctcaggcggcacctgggccgccacccgcttcactgcctgggagtccgtgatcacgatcgcgggcggcactttgagttcggatatggcatccgccacctgggtctccagaacgacaaggcagcgggatttctgatcgagaagctcccggatcgactggacctgcggcggaatgagacgccctttcggcgcaccgaagtcaatcggcaccacaagaattgccgtgcgtccttcggggatcagcccggaaacgagcggctgatccggttcccagcccgcttcgaccgctttcacgatcgccgcgcggactgcctcaattccggttccgagcttcgccgaacaggcaaccgccgggatcttttccgcggccgagaagtctgacgccattctctccgcggtaccttcagggacgcggtccgcctgattgaaaaccacgacagccggtgtcccgagctcccggatatccttcagaagcttttggtccgcggctgtgatgcccgttgccgcgtcaatcacgagaagcgcgagatccatccaggagaggaccccgagcgacttccggacacgctccgctccaagcgccccagtatcatcgataccggcggtatcaatcagcaccaccggtccgatcggatggagttcgcaggccttttcgaccggatccgtcgtggttccgggaacgtctgaaacgattgaaagctcctgattcgtgagccggttgatgagagaagatttccccgcgttccggcagccaaaaataccgatatgaaggcggagcgccttctgaacctgaagcgtgatcggaacggaattcatacggatggagcctcccggcgtgaagtcaatagagagtgatggcggccgcaggaattccgctcgccctgcccactctgatccgctcattttactgaggagaagcggagtatcagagatctccgcgggagggatattcccgctccgtcttcctcaggcaaaaagggcggcattcctgccgcccttcctctgatgaatcaggatttcgctttcagtgtgatccgcttttcatctgttttcccacagccacagccgccgcagtctccgcagcaggcaggctttccggtctttgcctggcggatcacgcgccggagcgcgagagccacgagaaccacaatcacggcaccaataatataattagccatttttcattccctcctttatcaggagaatccaagcgcgaggccgataagcctcacgattaccgcaaccacccaggcaatggcgcactggaagaacaccatcttcagagcccacatgccgcccagctctcgcttgacagaggcgattgccgcgacgcagggcgtgtagaggaggcagaaagcgagcatcgagcacgcggtgagcggcgtaatcgcggaggcaagctccgaaatgccgccatagagcaccgagagcgtcgacaccacgctttccttcgcgaggaacccggaaatcagcgctgtgcagagcttccagtcgccgagccccgcaggcgtgaagatcggcgcgatcgcgcccgcgatgagggccagcatgctcttgcccgtatccgccaccatgttcagccggaagtcaaaggtctgcaggaaccagaccacgattgtcccgatgaagatcacggtgaacgcccgctccaggaagtcacgggccttatcccacatcagacgcagggtgtttttgagacccggcatccggtaattcggcagctccatcacgaacggcaccgcctcaccccggaagagcgtgtttttggacgccatcgcggtgagaatccccatcagaatgccgccgaagtaaagcacgatcatcacgaggccgcccgacttcgggaaaaaggccgccgtaaagaaggcgtagatcggcatcttcgcggagcagctcatgaacggggtcagcatgatcgtcatcttgcggtctcgttctgaaggaagcgtccgggttgacatcacagcaggcaccgtacagccaaacccgatcagcatcggcacgatgctgcggcccgagagcccgatcttccgcagcagcttatccataaagaacgcgacacgcgccatgtaccccgagtcttcgagaagcgagaggaagaagaagagcacgacgatgatcggaatgaagctcagcacgcttccgacaccggtaaagatgccatccacaatgagtgactgcatcgcgtcattgacgccggatgacgcgagcgccgtcttcacgacttctgtcaacgcgtcgatcccgtccgcaagccagtcctggagcgccgcgccgatcacgttgaacgtgagccagaagacaagcgccatgatcaggatgaaggctggaatcgcggtgtacttccccgtgagaatccggtcaatccggcggcttctcacatgttcccggctttcatgaggcttcaccacagttttgcggcagagcctgtcaataaagaggtaacgcatatcggcgatcgcggccgcgcggtcaagccctcgctcagtctccatctgctgcgcgatgcggtcgatcgtctcaatttctgccgggtcgagcttcagttcctcctgaatcaggtgatccccctccaggagctttgccgcggcgaaccggatcgggatcgcagccgctttcgcgtgatcctcaatcagatgcatgacgccatgcagcgcgcggtgcaccgcgcccccatgatcattcttgccgcagaaatcctgaagcccggggcgctcctggtagcgcgcgatatggaccgcgtggcggacgagttcttccacaccctgattcttcacagccgaaatcggaaccaccggcatctgcagaatctgttccatttcgttgatatggatcgagccgccgtttccctccatctcgtccatcatgttgagggcgagcaccatcgggatgtcgagctccatcagctgcatcgtgaggtagaggttccgttcgatattggtcgcgtcgacaatattgatgatcgcgctcggccgctcatcgagaatgaattcccgggaaacgatttcctcactcgtatagggagagagcgaatagatgccggggaggtctgttacctccgtatccgggtaccagcggatcggaccgctcttccggtccactgtgacgcccgggaaattgcccacatgctgattggatcccgtcagctgattgaagagcgtggttttgccgcagttctgattgccggcaagcgcgaaagtgagcttccccttcaccgggcggagatgcgcctcggggtcatcgatcaggcctttttcctcaccgagtcccgggtgcgggagctcaagctgccgctcctcctcatcaaacgtttccacatgctctggctccccctcacggctgatattgcggataccgatcttcccggcgtcctcaagcctcagcgtgagttcatagccatgcagcctcacttcgacggggtctcccatcggcgcatatttcacgagcgtcacccggacacccgggatgagccccatatcgagaaagtgctgccgcagctgccccttcccgccgacggaattcaccgtcgcactcatcccgaccgggagatccctcagggtctcggatgccggaccattcgggcttttaatttttgtcattggtaatttttatctttatgtgagttccgaggctccgggatgatgagattgatactggccgccgcggactctttcatgcgtctcccgcctgaaaaacactggacagaaagcggagaggcgcatactttgctttgaatgttaatgatagctagtttcacttcgatctgtgacgcaaagcgctggattatccagcggaaaatcattaatctctcaaagcagtttttccgcccggcgggccgcccgcgcgttttcacccaaccccgcctttttccctccgaaacatcaagccccaacgggagcctctgcagcatggatcagaaacctggtttcgatatcatcggcgacgtgcatgggcacgccgcgcttcttgaaaagcttctcagaaagctgggctacgtgaagtatgggaagacctggggacacccggacggccggatcgcggtgtttacgggagacctcatcaaccgggggccggaacaggtggaaaccgtgaaactcgtgcgccgcatggtgaggcacgaaaccgcgtactgcgttgccggaaatcacgagtacgccgctctctgccggttctgcggcatcggccacgttcacggaacggattcccgcatcactttctttgactccgccgtgaaagacccgaagacgcttcagaaactgatgaagtggatccggacgctcccgctttggcttaatctcggtgaaatccgtgtggtgcacgcgtgctgggacccggacgcgatccagtcgatactcgacgcctgtgtccgggaaggcgcgcttccgacactcggactctatgaggatgttttgcggagttcgggagaggagtcagatgccggacagtctctcatcgcggcgcttgatcagacgcttaaggggcctgaggtctggcttccaaagacactttcatacaaaaacgcggaaggcaaagcggtgacccgagtccgcgtcaaatggtgggaccgcggaatcacgacatacgaagccgctgtgatttcggacccatcgcgctccttcccgcttgaggatctccgggaaaatccttttgtgttcaaacccaccgtgcccacgtttatcggccactattcgctttccgacaccgggaatttcgccccgcttgacactgcggtcgcctgcgtggactacggagccggaaaaggcggccccctcaccgcctaccgctggaaccggggtgaccggctgccgctggataaaaaacggttcacggtggtctatccgtagactgcggccctccttctcccatctctcagacatctgccatgcagcactttctcagcacctttctctacgtgatcgccgcgctgatcccgatggtgaatccgctttcgggctccattttctttctctcgctcacttctgacctcggtccgcgggaacgcgcgtggcttgcggcccgggtcgctatttactccttcatcctgatcgagatctcggtttatgcgggcgtcttcatcctgaactttttcgggatttcgattgatgtgcttcgggtggcgggcggcctcgtgctcgcgtctgccggctggaaagagatttcgagcttcgggggcggagagaagaaaagtgaaagccgcggctcagacgaaccgcttgagaaagaacattttgagcagcgggctttcttcccgctgacgcttcccctcatggtgggacctggcgccatgtcagtctgcaccgcgatcggcaccacgctcccgacgacgttcgcgaatacgctcggacttaatctcgcgtcagccgcgctctgcatcggtatctgggtctgcttccgctatgccggccagatttcaaagcgcctcggcgccgcgggggcggacgcgatcgtcaaggtgttctctttcatcctgatctgcatcggcattcaggtcctctgggccggattcagcggtctctggaccgagctcgcacggacaagtctcgccttcctcgcgaagtaattccgataaggaaagagcgctggaataaatccgcgctcttcctcttttaccaaaacgtgaggtgttccggcatcctgtcggactgcctcgaatttttaatccgataaagattaatttattaaacagaatcagtttacttatattccatcaggaggctggtttcccgccatcttcaccgcagcaggatcctgaatcggggtacggcggatctccagaaattcggcattatccttccagagcgcgatccacccgtcgatctgcgtcgtgtcgtccagcaccacatcgagatggaacaccccatccgcgtctttctccagtttctgctcccggttaaacggcgtctccttcagattcagcgcgagcaccgggctccggaaagcgatttcaagccggcatttctttcccgtgccgaaattgaagttggagtgccggatatagtccgcgagcctgaaatccttcgggcggtctgcttcgatatcaagaagccggatatccatgatgcggtgaagcgcgaggtttcggagatcctcatacccgtcgtaacggcagacgagataaatacggagatcctgctgcacgagcgcgatcggcgaaacaacagaaactttctgcttaccgttcttatttgaatagttgatttccagcttccggttccgatagagcccctccgtcgcgatggagaaaatccggggcttgatttccgggggaagcgtcgggatgctcgtgaaaacaagcgctaccttgttcagccaggaagccgccggggtcgccgcgggatgactgaagagctggtccctcgcggcatcaaacacctgagagagcgaggtcgagatcgtggtgggaagcagatactgcagatactgaccggcaagcgagagcagcaggctttcctcaggtgtcagcttcagatccgcgaattccgacttcggactcgacctccggtatccgtagggctttgagcggctgtcgcactccacatgcaggctctcggtttccgagattgacttcaggtagcgctgcagagtccggatcgggatgtcgtaccccgccgagaagaggctgttcctgatttcagacgctgtgatcagccggtttctcggaatcagcttcagaatttcaataatgagcagagcttcctgcgaaatagaactgaccctggccatgagtgctcccggaataagaaaactgaaaaaagtgtaggacttttatctctccgatgcggcgagaaaagcgcctcctgatggcatgcgtcaaaaactgacgcatgcggaggtaccttaataacataacaaaggaggagttatgaacaccacagatttcagtatcaaagttctgggcaaaacgatgcccctcaccgtccttgaggctcttggccttctggaagccggcatcaagaccggttttgaaccgattgctgtagcgctttcaacgcatcagtcgcataagatccgtacgcggctcgcctcctccccggggcttccgcttgaggcgcttgagaacctcgcgacggatccggcgtctgacgtccgggaaatgctctgcttgaactccgacgcggtctcgcgccttccgttcagctatcttgcggaactgatcggcgacgacccctatctctttgaactcgtgtctcagagcgaccggttcagcgaaaggaaggacctcgatgagatagcggagtactatcaggggaacgaggatccagcggtgcgacgtgtggtgcaggcaattttcgaccacacaatgccgcttaaaggacagaataaaaaagactccgaagagaatttataacaaaggcaaaacccgggtcgcagtgatgcgataccagagttaataaaaaggagaaggcggatcagcttcagagctgatccgcctttcttcattccgcgcctcgcgtttattccttcactgaggcgtcgtgtgatgccgcgagttcgcgcctcgtggtttcgaggtgcgccttcatgatcgcggccgctttatcgccgtcccgcatccgaagcgcccggaggagctcctcatgctcttcgtacgactgagttttctcagcctctgtcagatgcacaacgcttcgcgatattttcagaagctcatcaaagaagtgccagagaatcaccgcgatctggttatcgccgatctccgcgattttcagatgaaactgccgcccggcgtcctctttttccttctcactcgcctcacttctcagcacggcaatcagccgggagagctcatcaaagtcttccggagttcccttccgggcagcctcccgcaccgatacctgctcgaccgcgatccggatatcaaggagatcaatcagggttttgagtcccggggacgcgaggaacggtcccactttcgcgagtacctgacccgggtcaagcttctgaaccacaacgcccttccccttcacctgattcacgattccgatgtactgaagcgacttgatggcgtcccggatcggaatccggctgatgccgagactgtttccgagctcgcgctctgaggggatcatggtcccgggaggatattcccctttcagaatccggtcccggaggatttcagctgcctggcgataaagcggctcgctttcgcggctgagcggctcttccggctcggttttctttccgttcatcatggcttcaactctctaaatagactggctctcttaggtgctgcccctggggcggtctgaaactctgccggtttctgctccgctctctttatatttccttccgcgacaaatatctgattccatgggaaacccctgaagaagcccattccatgcaccaatccagagcttggcggaacctcttaggaatcagcggataccgcaaagataagaatattctattcgtggtataccaaaatatcactctctccattacttttaattccggattctttgtgatactctttgttgcctaggttaaatagcctagttaataaataataagaactaggcaaaacctaggtaaatcaccttatttttaattggagagttacatcatgcatttcggtcacaaactgatcactttcgcggtcggccttgccattgctgttggcgctcaggcactgccccaggtcaagattcttgccacgggcggcacgattgccggtacggcttccagcagcactcagatgacgggctataaggccggcaacctgggtgttcaggttctgatcaacgcggtcccgcagatcaagcagtacgctgaagtgtccggtgagcaggtttccaacatcggctctgaaaacatgacggacaaaatctggctgaagcttgccaagcgctgcaacgagctgctcgccgatccgaacgtgtccggaatcgtgattacgcacggcacggatacgctggaagaaaccgcttacttcctgaacctcacggttcacagcgataagccgatcgtgattgtcggcgccatgcgtccggctaccgccatttcggctgacggcccgatcaacctcctgaacgccgtgaagctcgcagcggatcctcagtcgaagggccgcggcgttctgatcgccatgaatgacatgattaacggcgcgcgcgacacgacgaagaccgatacgacgaacgtcgcgaccttcatgtcgcctgaactcggtgccttcggcttcatcgcttcgggccacaattacttcgtccgtcagacgacgaagcgtcatacgtcgggttctgaattcgatgtgtcgaagctcgactctctcccccgcgtcgatatcgtctactctcactcgaacgcggaccgcgtgccgattgacgctttcgtcaaggcgggcgccaagggcatcatcatggccggcaccggtgacggttctgtgcatgaatgggaagaacccgggattgttgacgccacgaagaaaggcgtaatcgtaatccgttcctcccgcgtgccgaacggcccggtaacggaatctctccagcgctacgcggatgaaggcatgctgcagagcggcacgctgaatccccagaagtcccgtgttctgcttcagctcgctctgacgaagacgaacgacccgaagaagatccaggaatacttcgaagagtactgatcaagggttaagcgcccgacaagagtttcagtccccgggcgctttgctcttccctcagtctctccagagaaaaaaatccccggatggcttctgcagagtcatccggggctaggagagaagatcaataaaaatctaggcggttattctctcttatcaagacgttgcaagtctgtatccggagatgcagttctgccggattttttcagttttccccgccacaaccctttccgtactcctcaaaaagtgacctcagctcagggatcagtttcctcaccgcagggttcgcctctgccgcaatctgcagctcaattcctttaaaaaacggcaccaccgtgagttcattccgccggatttcccgctcgatcactcccggatccgcgccgaaaaagatcccggcccccgatttcgcgagcatgatcccggtttccatatccggaacaaaatgcgtccgggcggtttttccagcgagttcgagcgacttcagcatcgcgcggtcagcctgaagaaaaatgacagggatacggctgaaatcctcagggctgtaaggcaacccggttcgccggatcaggccgggggacgcggtgagcacccagggcacagacgcgatccggtttcggggcgatgttccgtcagcgatccgggccgtaatcgcaagatccgcggattcccgatcggcctcagacacggtgagggagaacgacactgccccctcctccgccgctttggagaagagcggaagtatccgggctgccgcgactctcgggtcacggaagaccgtcagtgtcacgggttcaggcttctcatcagattcaaggagtgtcttgacagatgtccggataccggcggcaagcctcgttccaaacgcggtgaagaaaacaccggtcggctccgcccggtatatcggctgatcaaaccggctctgaagatcatccagccgccgtttgacagaggaaggcgcgatcccgcgccgttccccaaccttcgaaaaactccccagctcctcaagctgaaggagcatcagccacgtatccggaataagcgattttttcattcgatcggctcgataaaaggattctgccggcaggcctcttcgagaaaccgcaccagatcccggagcaccccgggagcagtttctttcgcgataaacgcgcgaagcggaagcgggagagagtgccactgcgggagcacatgaacgaggttccccgagtcgagatagggagccgcgaggtacgcgggaacgagcacaccgataccctcccccgagagcgcgcagaaaagcgctgagagatgacttcggagcgaaactctcgactccgcctgaacccgcctgaccgattttccccgggtgaaggtgagaaatccgggatccaccgcgtctttcggcccgaaaaagagatgcctctccagatcctccggattttcaggcgtcccattcgcctcaagatactccggggccgcgacacagatccgcgtgagcgctccaagcggatgtgtttccacgtcttccataaagtattcgccgtggcccacccgcagatcgaccccctcccagagcgggtggtacgtgccgtgtgtcagccggatatcgatccggagtccggggcggctttccgcgaaccggacgatcagaggagagagcagcgtggcaccggtcgtcgtaggtaccgagaccgcaaggctctcatacccgggctcttcctctgatacgggatctgcctggtaaaggcttgaagccggttccttccatttccggaaccgctggatgccggcctcagtcagcgtaaagacgccatttgtcacccgaaaaagcggctccgccgcttcccgcgtgagggcgttaaggagcgtttccgcttcttccgcgtgaagccccagcgtcttccgcccctttgtgagactccgcgcctccgcgcaggcgcagaaaagcacccgtgcgagaagccttttccccgtgtcttccttcatcacactctcctccgaaaccggcgtctctattttagaggagcgcctctcgggcaccgcttcagccgcttcagacaacaggttttctcctgccaataaaaaaggcttccggtgaaccacgttcggaagcccctgaaaaagctcttccgggagccgaaagagtgagagagaaaaattaaaaatgaccctcgcccggcagccgcccatgactgccgccaggcggggaggagagaacttttttacgcggctttcgcgcgggctgccgcctcatctgcgccgacccggccccagatcaccgcggctccgagctgggaacctgagagatagtcgtcatagaagagaccgccgatcgcgttccccgcggcgtagagtccggggaccggcttcgactccgtattcagcacttcacccttcaggctgatcttcgggccgccgaaggtggctgtcataccgccggagaagggaaccgcgaggaacggccccttttcgatggtgtacggcttcttcatcgtggcaggcaccttaagagacgcgccgcgcccggcgtgaaccgcgtcgttatattcagaaaccgtcttttccagcgctttcgcggggacaccgatcttcgacgcgagctctccgatcgaattggcttcaaaaatcggagccttggcagccttgtagcgatcgattcgcatagccacaatcggaagcttcaccacagccgagtcgagaataatgaaggccgaatcccggatcgtgtcctttgccgtatggcgggcgatttcgacgtaggtcgacgcttcatccacgtaccggttcccgagcgtattcacgcagattccgaaattcaccatctgcgacggattcgccttggtgggtccatggatcggaccggcatggaactggtccatattcacgtacatcgggaagaagggagccgtgagaagaatgttttcgccggtgagagtcatcgagccccgaatcggcatccaggccacttcgcctcccatgaactgggtgaccagcgccttattcgcgtggaaaccgccggtcgcgagaatcacgccgcccttcgcgtgaatcacgagcggcccctcgggcgacaccgccttaacgcccgtgcagcgaagcatatcgtcatgcagcagctcaaccaccttggtattgaacatcatcggaacgtgcagtttctccacttccgccatcatgttctccaccatctgggagccgccgggaccggcctttgaatccacctgatggctgcggccaagcatcggcttgatctgcatcgggatctttttccagctgaggtggcagcggtcagtaagccactgcacagcgccggcagactgctcacagtacatcttcgtgagttccgggtcgccgcggcctttcgacaccatcatcatgtcctgatagaaggagtcaagatcgtccgtaatgccgccacgcttctgaacccaggtgcaggccgcattgacgaagccgcccgcgtaaatcgtgttacccatcggaacagcggacttctcaatgagaagcaccttcgcgccccggtccgcggcttcgattgtcgccgcaagcccggcgcagcccgcgccgaccacgatcacgtcataggtaagctccttcgctttcggagccttggccgcgtgagcggcagcaggaaccgcggcggccgcggcagcagcggtacccgcgagtcccgctttgagaaaatttcttctggatgcaaaagccatgattcatctccttaggctgagatcttcctgaagaagatctcctctttttggctgagaggaatcttatgaggcttatccggaaaacttaattacgcaaaactctg

SEQ ID NO: 1373 - DNA, 26560 bp, Unknown
  gut microbiota DNA sequence
tgataattcaccaggtaaaggcaatacggcggctttctattacaggtaaaggatccggaaggttataagttttgcaaaggataggatctaggagttcagcctttgcagtttcctcacaatgagtaatagtgacaccgcacgtgtgctgataaaacgcgtaaagcatcttctcacggtgatgaagtatgttattcggcgttatgcatgaaaaaatctttgcatcgcaccaaatctcgtcaaatgttaccgggccctgatcagtgcgaagaagtctaacgatatgcagaagaggctcgtcaaacgatttttttaaagcctgtgatacaacgaggggggaaatttctgtttcaaaatgaagcaactgaatttctgttggataacgcccttcatttacctcatcaggctcaagccggatgtaccgttcataaacgagttcctcgttatgactgaattcagtgacaaaagttccctttccctgatggcgtaacagaaccccggagtccaccagtccttttaacgcccgcctgaccgtcccctgactcacacctagatctcttgaaagatctacttcatttggaagcatatctccaggagcccattttccctggtgaatcatttcggcgatctgttgctcaacttcttcaaaaagagtcagtcgctttgggatcgcccttatgctgctatcctctgccatgtgctctccttttttcgatcaatcatacagggatgtggagcgatcaaaaaagttgattaaataaaaaaactaaaaaattactttttagtgtagatgtctcatttcactccaaaacgtccagtattccgggcggggtgctacagactgtcgttgtgtgttatgggaggagacttaccgctgaaactgtaacccttcaaagtgcgactttttgtctaaccatcagacttccgattacatctctggaagtgtgtgtgatcccacaagcccccccaaatagtgagcccagtgaataccgccgatcgtttcacctcagcacctgaagatgtctatccacttgaaagtctcctatcgagaggtagacccagacattgatctttgccaataagaagtgagtgccttcaaactacccggcaaatatcttgcgtttgaatttcagatccctatctgacgtaaatgtctgaatccactctgcgaccagcccaagcaatcccttggacccctcgtcaatcttcctggttggccaccctttggaagcgtcgcggcgttagccgctccggccgcgagcatgaagcccgagaccatcgcgagaagcagagctgctttcgtcatacatttctcctatggttggcggcagtctttattgatctgactgctcactcttgatgctatgtgcatcgttaccaaagaaaaacagacagaagtttgtttctttaaactcgcagttgtatatttactcaaagaaggtattcaaaatccataatctgccattcacaaaaccaggagttgtgaatcatggaccgtcttcacggaatgaaagtcttcgaaaaggtggccgactgcgggtcatttacagccgccgcagaggcctgcggaatgacgccgcagaacattgccaaaatcattgcggctctggaaaaggacataggtgcccagctgctcaatcgaagcacgaggcggcagaacctcaccgaaatcggtgaaatgtacctggaacgggcccgggtcattctggcggacgttgaagaaactgacgccctggtctcccatttcacgggagaagtaaaggggacactccgggtttccgttgccaatacctttgctatctatcagctctcacacaaactccccggctggctgaaggaaaatcccggtatccgcctcgatatgacggttacaaaccgagaaatcaatctgattgaagagggtttcgatgtagcggtcacggatgaggagcctcctgacagctctttgatccggcatagaatttccgagcttcccatcattctcgcggcctcccctgcctatatcgaagcaaacggaatgcccgcttcccccgaagatctttcgcaccataccctgctcgtccgtcaggatcagacatcctggaccttcaaggggcctgatcggagcctgatcaccatcccgacgagcgcgaaatatctcgccaataactgccagatttcctgcgaaatggcgatcggaggattgggtatcacaaagcagccccttttcaggctccgccctcacattgagcggggagaactcatccaggtgctcctggattatccaattccgtcaaagacgctttccgcggtctacccgcagcggcgccttatgacgcttaaggtaaaaaagttcctcgatttccttgatcaggaattcggacacggacagcttatgtaaacaatttcgcttttatgcgtaaaagtgtttaaagcaatgctgacggatcgaggcgatttttttgaactttgttcaatccggaccgtaacttgtgtcatttagacacatttatgcagtaacgcttttcgtacatttcttgattacgtccatcctattggcgctagaatggtcagtgtctgtaaacatttttggggctacgctccgattgggccagaaactatgaatttgaaactttcagttattctcatgtctgcatttgccgctgcctgcgcgaatgccgctgttacggatttcactgtcaatgggacgaaggttacggccgcccagcaggagcagattctgaagaatctgacggcccgcggtcagcagcgtacgcctcagcttgaaaatgccgttaagcagaacctcgtgaccgagatcgctgtgcttcaggaagcccagaaggctggtctcgcaaacgaccccaacgtcaagatcgctgttcagaacgccacgaacaacatcatgactcaggctctccttaaccgctatgtccagcagcatccgacgtctgacgctgatctgcagaggatgtatcagaaggacaaggccgcttacggcaacaccgagtatcacctccgtcagatcgtgacgaagacccagggtgaagcccagaacgctctgaaccgcgtcctgaagggtgagaacttcgccaaggtcgcctctgccgtgacgattgatcagccttccaaggcccgcggcggtgacatcggctggttcgctccggttcgtgttgttccgcagattggtcagctcctcccgtccctcaaggccggtcaggtttactcgaagcccgtgcagttccgcggcggctgggccgtgttccaggtggtggctacgcgtcccgcgcagcttttcccgacctttgaacaggctaagccccagcttcagcgaattgctgctgctcagaccgcgcagcagtacgtgcgtgacatcacctcccgtgctgtcgtaaagtaagcttttctgattcaaaaagagaaaacatcaaatgaagttcaagaaggcactcgtatttgcctgcgcgatcgcgatcccgtttgctgccaatgcggcattcaaggacgtgaccgttaacggcacgaagatcaccgcggctgaacaggagcagatcctggctgccgctacggcccacggtcagaagcgtacgccgcagctcgaacaggcaatccgcgacaatctgatcgcccgtaccgtcgtgctgcaggaagcggagaaggctggcgtagaaaagcgtccggctgttgccgccgcgattcagaatgcgagaaagcagattgtctctgacgtttacctcagcgactatctgaagaagaacccggtcacggatgctgaggtccgcagggtttatgaccagcagaaagctcagtacggcaagaccgagatccacatcaaccatatcgctgtgaagacacaggacgaagcgcaaaagattcaggcacgtctcgccaagggcgaatcgttccagaagattgcccgcgcggagtctctcgatccgactgccaagcggaacggcggtgatatgggctgggtcaacacgggtgcccttcctcctccgatggtttctacccttcaggggctgaaaggcaataagaccgctatcgtgaccggccctgccggttacgaagtggttatgaaccgcggcacgcgtaatgccaaggcggcgccgtcatttgatcgcgtgaagcctgaaatccgccgcgcgctggaggctcagaaagttaacgcctacatgcgtgacctcgtgaagaaggcgcaggttaagtaatttctgcctttcctccttaaggacagcccggctctgccgggcttttttatttgtctggtcgctggccgacctttttttatgttagtggtcctgttactctaccttggtatatattggcggataaaagaaaacaagcgatactgccgcctgttttctgcaggtctgaaaatcaggcccccggaaagctcacattctgaagtacggcggcgacgatcggatccatcttgcccttgtctgtcagaacctgaacggtctcataaacaatatccttcgccgaaattccctctttatccgtgagacggctgaggagtttctcaagctccgccaaaccggcctttcggcgggcttcagcttccgcgtcctctgcggacaggggtttcggtgccggcgcggctgcaggagaatcagccttcttttcaggttcctgcggcggaacctcctcatacttcccttcagggggcagcggcacaggatcaggttctttccgttcgcccagcaccagtgtgtggaaatcgacgacaccgttcagatgaggccagcgtttgagccccatatcgaagagcggccccatatattccgggaccggcggcgtttcctgaaagtaaatcggcacagactcgtattttccgagatgctcctcaacagcgacccacgccggatcgtccatcgattccgtgttcacgaggagcgccgaggcgccgagagaaagtgcgagccgcttatttgaaagccggtcttcaattgaacggcaaccaaggaacggatccagagcggtcatgagaacgagcttcccggaatccagcagcttcttccagcccggctgcgcagcgagcgacgcgagcggcttattcggcacctggcacgcggtccctcctaccttcagggcgccgcgaagcgctccgctttctgccccctcttcgcccgacgcgacaacgagaaatccggcataagaagccattgtgccgttttcgttaccgatccggtcatagtgcttgtttttggatccggtacccagtactgaaaaggcatcactctgcagaagcttcagattgccgcagccccagacagcgggaggcgtatcttctctcagatgcgctttcaggatttttggataatcccggtccgcccgcgtacagcaccagataccaagagaccgccaggccgcccgggcgcgggacagctccgcctttcttccgagcagcgctttaagacgctccgcgtcgaccagttcgccgcaggagtggatcagttcggtgttctccgggttcaggaggtcggatggctttctcttcatattgagaagctgccgcgcgaggaatccatattcctcagtcgacagcggttcgattccttcctgcacttcgccccgtacggcgagcggcgccgtgagaagcagtatcgcgtcggaattgggagaaatcgtttcagtcatcggggcgtctctctttgcgttcagttgttttttcagacagagaagtcagtttaattcctctcccacctgagcaacagccctgaagctccctttccgtccatcagatcctgttctctttctctctattttctgaatccttttagaattccacccgcagaacccagttcttatgggctcccttattttcaggagtgacaacacatggctcttcttatccgcaatgcccgcgtttacgcgccgaaggatctgggcatcaccgatgttctgatggcagccgggaaaattctcgcggtcggcagcaatctcaccgtctcgctccccgatcttgaaaccgttgatgccaagggaaagattctgaccccgggattttttgatcagcatattcacgtgaatggcggcggcggtgaaggcggttttgcgagccgtacgcctgaaatcatgctttccgaactcgtgaaggtaggtacgacttcgatcgtcggcgtctgcggaacggatttcatttcccgctcgattgaaaacctgctcgccaaagtccgggccctttcgatcgagggcgtaagcgcctggatgtatacgagcaactaccgcttcccctgcacatcgatgagtcagagcgtcgcgcaggatctgttcctcgtgccggagtgcctcggtgtcaagatcgcgctcggcgaccatcgctcctccttcccgcggccggatgaagtgctgcaccttctctccgatatccgtctcaccggcatgattaccggtaagggcggtgtgctgcacgtccatatgggcgacatccccgggatctttgatatgttcctgtccttcgagaagggcggcttcccgatccgtcacatccgtccgacgcactgctcaagaaagcgcgaagtgtacgaggggtcgcttgaattcgcccgccacgggggctttgttgactacacggccggattctcctgcaacggctccacggcaaacgacatcacagaggccatcgcctccggtgttgatcccacccggatcacgatgtcgactgacggtcacggctcaatgccccgctttaatgagaagggtgaaatgatcggactcgccacgggcggtgtcggcggtctgctcgatacggtccgcgatctgatcggcaaccacggaatggatccgtcactcgcgctcacgtttgataccacgaatgtcgcggatgctcttggcctcaaggatcagggccgcgttgaaaccggcgcctgcgcgaacgcctgcctctttgacgaaaactggaacctcacggatgtggtctccaaggggcgcttccttatgcggaactctgaggtgatcgtcaaggggacgttcgaggaataagtctcttccctgaaccggaggcggtgaagccctgccgcctccccctttcgagcagttcccatattccgtgttttcaccctatgattaatgtatacgacggtttttcagcgggtgaatatatgaagaaaaagatcctcctcgcacttctcgcctcggccgcagcgctcacaggctgcgccaatatggagtcgctcggttccgatcaggaagtcgttgcagccgccaatcagagctgccggcagatggatcagaaaaacaccattactcaccagtatgacggccgcatggccatcattcggcagggactccccacacaggtcggcgggcagacactgaattatcaggtctataagaccaaggacatgaatgcctgggcgatgccaaacggctgtgtccgcgtgtattccgccctgattgatcgtctgaataacgatgaggtccgagccgtgctcggtcacgaaatcggacacgtggcgctccgtcacagtgtgcagcagtaccgcacgaaccgcggcgtcgcgatcgcgctcagcgcgggcggcgcgctgggctccctcgtcggtctcgatggcaccgggtctgacctgatgcagcaggtcgcctactccgcgatttccgcccagtactctcaggcgcttgaaaccgaagcagataactacagcgtggatctgctcctcaaggagccgaatggaaaacagaaggcgctcgccatggcttccgccctcaagaagatttcaaccggcgacgcggattccggcatcatgcagaagatgttcggagaccaccccgatacctcgaagcgaatcaagaacgttgaggaccgggtcgcagctgccggaaatgttaaataaccaacgcttaaaccaacagaaaaccgcggacgcttggcagcagttccgcggttttttctgtttccgacaatctcggatcagatcgtctgaaggacggcaagcagaagctttgtccgctcgtaaagcgtctcttcgatcgcatactcacgctcggtgtgattaaattcgccccggacaccgagtgagcagatcgtgggaacgccggcccgcgagaggaatacggagtcagatcctccgcccgtgctgatcggtttcatttccggcagtccgcaggaaaccgcaaggtcattcacccgggcgaaaagcgcttcagaagcttcagtccgctccattgccggaatatcgaccttgagctccgccttggtttcggtgccttcgatatagcgttttgtctcaagctccgccatcgcgcgcttcacgcgttccatctccgctgctttcgtgaaccgtacgtccaccgtgcaccaggccttgtcaggaatcgcgttcgggaccgtaccgcctcccatgacccccacgttgatcagggttcccgcctcatggtctgcaagatcgttgatatcgatcatcttatgcgcgagctcgataatcgcgctccggccgtcttcgggattattgccggcatgggcgccgacacccgacacttcgacccggtagaccgcgtagccctttcgcccaagaacgacgctcccgtccgcgaaccccgtgtcaagattcagaccgacaaatccgccgctggcttcctcaaccaggtcacgcgccgctttggatccgcggtgagccgtttcttcgtctcccgaaatcaggatcttcaccggatgccggtcccagccccgggcagcaagaatccggatagcggagagcagaatcgtgatgccgcccttcatatcaaggcaccccggacccgtcacaattccatcccggatcgtaaagggccgctccgccgcttctccgtccgggaacaccgtatcgagatgcccgacgagacagataaagggttttgtcatgtccccccgttcggcaaccagcaggttcccggcttcctcatactcatggaaacgtaccgaaaaaccgcatttcttcagcgtatgcgcggcaaacgcctgcagggcatccacggcggctttgttttttgatccgctgtcgtgattcacgaggtacgcccaggttgcccgcatatcgggctttgcctggtcaacgtcgcggaaaagagactcaatttctggggtcatgatcatcctttattcagtttcggctctgtgtctttttattgttgccggcggatggtcctgcggctatccgccggttggctgatcaggtcctatgctcagatcgtgcagaggatcgtgatgaggagctttgtgcgctcaaaaagagagtcctccatcgcgtactcacggaccgtgtggttgaattcccccttcacgccgagcgcgcaaactgtcgggactcctgccatcgtgagcgccgcggaatcggatccgccgccaacccccttggcggtcatctcagggaacccatgctccacggcaatcttattcacgcggctgaagagttcgagagacgattcaagcctcggcatcgcggggaagtagaagagttctgtcacttccgtatgcgtcccgtcgagatagaccttatccgcgatcgccttaaggcctgcccggacacgggtgattcccgcctcacccttatagcggacatcgaccacgcagaacgccttttcggcgcaggcgttcggaactgtgccgccgccgatcacgccgacattcagcgtcgtgccttcgtcatagtcggtgagcgcattgatgtcagcaaccttcgccgcgatttctgtaatggcgctccggccgcctttcggattattgcccacatgagcgccgatcccctgcacgtcaaaccggaatgtggcgacgcccttccgttcaatgacgactgaattgtccttgaaactcgtttcaaaattgaggccgaaaagcgcgcctttcgcctctgccatcatgtcgcgcacggcggtcgacttctgatggcccgcttcttcgtctcccgcgagaatcactttcaccgggtaccggtcccagccggcttcgttcagaatccgcattgcggagaggagcaccgtcactccgcccttcatgtcgagacaccccgggcccgtcacaacgccatccttgatcgtgaaggggcgctttgccgcctcgccatccgcgaacaccgtgtcgagatgtccgatcagagcgacaaacggcttcgtcgtgtcaccgcgctccgcgatgagaaggttccccgcctcgggatactcgtaaaagcggactttgaagcccgcggactcaagaatccccttcacatcctgcccgaccgcgtcgaccccggccttgtttttggatccgcagtcgcggtcgacgagcagcttccaagtggccagcatggagtctctggattcatccaccctgctgcagagcgtttcaagattttcagacatatcccgtttcccctttcggaaaaacgagccgccgcgaaggacggatctccgacttcgcgttcccggcccgttctgttttctttgtgattcacaaattatgcggcagaggtccatggcacgcatggaatgggggaatgagaaacgcgttcaggcggtattagtcacaaaaggtaagcttttctacctattaaaacgtcttgaacttattgtctcttggggctaaaacaaacataacggaatgtttttgagaaaaccattcagaagggagagcgcactatgaaatttcattacaaggctcagctcgctgcagccctcatcgccgcggctttcgcaggtactgcgctggccggccctgttctctatacgactgaaaccacggacatcacgtcgaccccgggcgcgaatgtagcgggtcaggtgcttgcgggcacccaggtggaggaacttgaacgcgtgagcggcaaggcccgcgtccggatccgcggctggtcccgtgtagcggatcccacgcacatttcggcagaacccggaaagcccgtgattgaagcggcattcgcctcttcccgcaccgtgaagctcgatccttcggccggcaccgcgaagattctcggcgcgacctggaacgtggcaaccgctgaaggctgggttgactcttcgaaactcaccgctgacggcgccggtctcaccgctcaggccaaagccgcgaaggattccaagtgcagcgcctgccacgcggcgcctagcccctcaagccagaccgcgagcggctggtactcgatcttcccgcagggcggaaaggccggtgacgaaaactctcaggatgagctcgtcttccgctatctccagaacggcgcccggaagtaacgcgcctcctgtccgcctgaaaccgcgtgtctgatcctcggtttcaggtctgtctgcccggatgagggttccgcccgactccgggcaaagttttttccgccgcaccttttctcccatctgctaagatgtgcgccctgcgggaaaaggactctgagccctctcccacgcgacctctatctcattgatttgaatactcccatgcttctcactctggctcccatggaaagcctcaccggaattgttttccggcggcggcatcatgaatttttcggcggcgtcgaccggtactacaccccgtttgtcaccccgaccgtggagcccgagtttacggaacgtcagatgcgggagctgtcccctgaagcgaaccgcgggatgaatgtcgtcccgcagctgatggctaaagacgcagaccgcttcctctgggctgcgaagcgccttgccgaactcggttacagcgaggtgaacctcaacctcggctgcccgatgggcacggtaaccgggaagggaaagggatgcggcttcctcaggcatccggacgagctccgggagtttttcgaatcggtgttcgcggaacctcttccgatcgcggtgtccgtaaaaacgcgtctcggctggaatacggaagaagagttcgatgatctcattcgggtgtacgcggatttccccatttcggaactcgtcattcatgcccgggtgagaaatgacttctataagggggatccgagaacggagtgtttcctcagggcgctccccaaactcccgatgccggtggggtttaatggcgacattcaccttgtgagtcagatcagcgagtgggaaaagacccatcctgaacttcagtcgctcatgatcggccgcgcctcagtcgcaaatcccgcgattttccgtgaggcccggggcggcgcgccggcctcgggtgaagagctcgcggcgtttcatgacgcgctgatggcggattacgccgcggcgttcggaagcatcggaaacaccgtcggccatatgaaacagtactggttctatatgaagaacatgtttgagggcggcgaaaagctttttaaacagcttctcaaaaccaaaaacgtgtcggactacgagtcgctcgttcaggaaatcgcgacgacactaccgatccggactgaacccgcttacggctggtggaagccggtttaaaacccagaccaggggtccttcagacgggatcccttttttatgcgctcataaccgggaatctatctaagccaaaagcgctagactacccacaccccgggacagcgagccccggttattacaaaccggatccacttacatcatgatttccttcattaccctattccttgttggtatcggcgtcgggtgcttcggcgcgctcgtcggtctgggcggcggcctcatcatggttccgctcttcatgcttacgatgatgcctcctcacggaaccacgtttgaaaccgtgcagcaggtcatcggcacgagcctcttcggtgtgctgctgaacgcgatgtcaggttcctgggcatactggaaatccaacctcatcatgttccgcgcggcgatcccgttcgcgatcgcgacaattccgggcgcgtggctcggcggcacgctgtccaactatttttcgggtcctggtttctcgatcaccttcggcgtcacgctgatcctgatggcagccgtcatgtggtggaagaagaattcgaagcgcggctcaacgccgattgaagggtttgacccgaagaccgcgaaattcaatctctggctcggtgtgttcctctcactctttgtcgggttcatctcttcgatcctcggtatcggcggcggcattattcatgttcctatgatgatgttcatcctcggcttcccgaccatcatcgcgaccgcgacctccacctttgttctgatgatcagtgcgctgatcggcacggtaagccacgcgatgctcggccacattctctgggtcccggcgatcgcggtcggtgtcggcgctattgtcggtgcccagatcggcgtgaagctcgcgaagaagagcaagccgaaactgatcctgaagctcctctgtctcgcgatgtgcctcgttggcattcagctgatcgcccgcgcgatttgacggatcgcacatctgtcagatcccaccccggaaagccctgcctggctttccgggattttttatccgtcttccggaagtcatttatatcaatttccctttccgcgccgcacacactcgcaccaccccggcggagcatctcaccgacctagaataggatttatccgaacagctctgacctgacgttgcattcgggttatggctgtccggtcctttggaccttcttatcgtgaggtgagtgatgctggactgcattctgaaaggcgcccgggtcgtggacccggtgaatcatctggaccgtgtaacggatgtcgggattgagaatggaaagatcgccgcggtgggcgataacctcggttccgcgaaagaaaccgtttctctcgacggtcttgttctgaccccaggcgtcattgatcctcatctccaccttggatccgaattcgggtcccggtacggccagcggatgaccgccatgtcgggcgtcaccacgtgcctcgatatggcgggtccggtcgccggcattgtagcggacagccatgaattcggttgcggcatcaatgtggcgatgctggaaggtttctcccccatgaagcagatggggaccaaggcgccggaccgcaggacgatggacgcctggatcgggaagtcgcttgaggccggcgcgatcggtgtgaagattctcggcggccactggcctgtggcgcttgaaaccgaagcggctctcgtcgaggaagccgtgaagtgcggctcctatatcgcctggcacgctgggtcagatactgccgggtccaatattgaaggggtccgcgaagtggtccgcgcgatcggtaacgccccgctgcaccttgcccacatcaacgcctactgccgcggccgcgtgaacccggtgctcgacgaagtgaaagaagcgctggatcttctcaaggcgcatccgaatatctggtccgaggcgtacgtgagcccgatgaacggcacgattctcacctgcgacacgaagaccggcgcctgcacggatcacgtcacctgcaactgcctcagaacctttggctgcagcgaggacacggccggaattgaaaaagccattctcgccgggaacctcttcgtcatttatgacgacggcaatatctcgtacctgatcggggggaaagaggccgtggactactggaagtcgaaggggacggtgaccgcgggatccttccccgtgaaccccgcctccgcccggttcctgatcgccgaggcgaagcgggacgacggaagtttcgttgtcgactcgatttcaactgacggcggctgcattccgaggaatgtcattatcgataccgggctctcgctcgtccggttcggtgccctcacgctctccgaatttgtcgtgaaagcgtcagtgaacgccgcccgccatctgagactcgtgaataaggggcatctcactccgggcgccgacgccgatatcacggtctttgaccttgagcggcagaaggcgctttactcctgggtcgccgggaaacctgtcctctcaaacggtaaactccttgggaagagcacccacttcattacgggtgagcgcggcgtgaaggcgctgacagacgcgggattcaccgcggaagccgtgtcctttgagacgccggaacccgcgcgcttcgttccgtaaagtccgcggattataaaaaagctccggaaggatcatttcctttccggagctttggttttctgaagggggatcacaggggcgtctgctcacggacagttctttccgctgccctgatagaacccgttcttatcgtagtagctggtagcggcgagtgccgctcccgctccagtgaggagaaggccggcaatcacggcgcgccggcttaggccgcgttcctgacctttcttcatggcttaacctcgaaaaaacgatttcaggaggcgttactgcgcctttccctgataggcgccatagcggtcgtaatactttccgtccttcgatttcttcccatcgtaggcaccgttccggtcatagtacttgccgtccttcgactgctttccctgataagcaccataccggtcgtaatatttgccgtctgaggactgcttcccctgatacgccccgctgcggtcatagaacttcccgtccttcgacactttgccctgataggcgccgtagcggtcgtagaacttcccgtcgtcagtgcgcttccccgtgtagcttccataccggtcataaaacttggtgtcggcgaacgcggcgccggatgccgcgagcaagagtcccatgatgacggctcggcgtgttgtcctgatttcctgactgtctttcacctgcggctccttaaaaaggagttattaatagtgttattagtccgaatttcaggaaaagtcaataaaatccggtattcttgttaccgattgagagaaccggaaacgggtttaggggcattctgctgccgggcataactatctgaccgcccaacgtactttcctgtcggtccataaatccggccggaagaatccgcccgtcccacatagtgcccggtgctgtcatacgttcttccatcccggctcaccgaaccggcaaactgtccggtcgggccatacgcccgcgcgttcggagccggagcgcggggtgccggcggaaccggagcctgatagccgggggtcttcggggctcccggaggcggcgggacacccgggcccccgatcgcggacgccggaaacgaaatcgcagctgaaagcaccgcggccgcgagaatcctcataccaatattcatttcgctgcctcctcatttttttcttcaatatcagtcttctctatattaaatcccgagagaaaaacgatatggttccggtcctacatcaagccccggtcactatgcctcacggcctatcaagcctcaggatatgatttaaagcaccacgaaaaacaaaagaaagattggaacatcatgcagctcatcactaatcagactttcggcggcgaacgctccctttacaagctttctgacgccaaactcgatcacgttacgattctcgccggtgattctcccatcaagcacggcacgaatctcacgctgaccaactgcgacattgagggcaagtatcccctctggatcaataccaataccgtggtcgacaactgccttctcaaggtaaccgcccgctccggtctctggtacctgaagaacttcaaggtgacgaacacccggttcgagtgcccgaagtccttccgcgattcggacggcattgaaatccgcgactgtacgttcacggacgcccaggaaacgctttggtcctgtcgaaacgttctcgttgaaaagagctctttcgataagggcgactacctcctcgcacactcttctgacatccgtctgaagaacatcaagctgaacggcaactacctcggtcagtggggccggaatatcgaagtcttcgattccgaaatccattcccgcgacgccttctggaacaccgagaacgtctcctgctacaactgcacgctggacggcgaatacctcggctggcactccaagaacctccatctcgtcaactgccacatcaagggtcagcagccgctttgctactgcgaaaacctggtgctggaaaactgcacgtttgatccggacgcggatctcgccttcgagtactgcacggtgcatgcggatatccgcggcgcggtgacgagcgtgaagaacccgacgagcggcgaaatcgtggcggattcgatcggcgaaatcattctcgatggcaacgcccttccgcccgcgaactgcaagatcgtcacccgtaagtaatcgacagagcaagacacaactgagatggcagaagaacagtttgatttcgacgagctgattgcccgccgcggcacccgctcgcttaagtgggatatcgaccaggatccggacgtgatcgagctctgggtcgcggatatggatttccgcgccgccccggtgattctcgaagcgcttcagaagaaactcgattccggtgttttcggttacggcctcccgacgaaagccttttatgaggcgatcgtcagctggtaccggaagcgttacggagtggaattctcgcggacttcgattattcccacgaccggtgtggtgcccgcgatttcctcgatcctccaggggctctgcctcccgggcgatgaagtcatcatccagacgcctgcctacaactgcttcttctcctcagtccggaattcgggccttgtgctgagcgaaaacgcgctgaagctcgtgaacggccgctgggaaatcgatttcgaggatctcgaagaacgtgcttccagagaaaaggcccgcgcccttctcttctgcaatcctcagaacccgacaggccgcgtgtggacgcgagacgaactcacgcgtgtcgctgagatctgcgaaaagcacgggatcttcctgatttcagacgaaatccacggcgaactcacggctgaaggcttccgctacacgccgctcgcctctgtctctccgtgggcgaaggaccatgtgatcacggcgtccgccgcctccaaggccttcaatatcgccgggcttcagaccgcgtacatcatcgcgccggtcgcagaggcccggaaccggatcgaccggcagatcaatatcaacgaggtctgcgacccgaatccgctcggaattgaggcgctgatcgcggcgtacagcgaccggggcgcggcctggctcgacgccctgaatcactacctcgatggcaaccggaaggtgatcgaggagtttgtccgcgagtcactcccgggctgcttcctttcgcctcaggaaggcacgtatctcccctggatcgatttctcgtcctttgggaagacatcgaccgaaattgagaaagagctgctccacggctatcacgtccgcgtgaatggcggcgctcactacggcgaaacatcccccggctggatccggatcaatatcgcgacaccccgggcccggctacgtgaagggcttcgccggatcgcgctctgggccgaagacgaacgcaaaaagggctgacaccctttatatcgccgcaaccccttgaaatacagggatcctgtccccatataaggtgtatcagcagtcttttttcaatacggaactcatttatggcagcaggtaacagcggcgatatccagatgaacggcaacgttgactggaacgcgatcgccaagcagacgctcaggtatcagtatgacgcgaagcgtgcctccgtctgcctttggtttattctctttttcttcaatgctgagcagcgccgcgaggcggcgaatcagtgggagtcgctctggcacgatctctcctttgtggagcagatggcgctgccgcagccgcctcccgagatgaagcctgctccctacccagtggagcagatgaacgccgatctcgcgcttctcttcaaaaacggcgacgtgaagatgctttccgaaaccgctctcctcaagcccgaaagcctcaccttcgatgaggagggtttccgcaaccggctgctcgatcgctataccgataacggaatctcgattgagcctggaatggagcggctcgcggacacactgcccgctgagttctcgttccttcaggcgctgatttcgcagagagcggacgataaggagcaggcgaggttcttcttcggtcatctgagaccgcttggctatgccacgatcaaggttctccgggaaaaggcctccggaaccaacctcgaacttgtcgcccaggccctgcatcgtttcctcgtcgctgaggagacgctttataagaacgggtacgaaggtgagccgctttcggttcgtccgatcaattgaagacaaaaaatcgcgtcgcacgaaggggagaaatttttatttctccccttttttctgcccttggatcatgagtaccgcggggcggctctcaaagacacgccggatagccgcgttgacgtcagaaagggtcagcccctcaagcgcccggagttcagacaccggatcagtgacccggctgttttcaatcgaatacgccgcttcttcccgccagaaccgcgaagacgcgatcgcgttcctcatttcagacacgaggggcgatttgatttccgaaaactcagactccgtgatcccatgcctcgcgaggtctgccgcgatcgcgcggatccgcgtccgcacagaagcgatgtcagcggcctcggtgaggactccggactcgatatagctttcctccggatccgattcaacgcggacaagccggcaccagggactgtaggtgagaccaagttcagagcgcagaatcctgcggatccgggtatcgagcgcggcggccgcggctcttccggcccagtaccctgaatttccccgctcagacggagaaagcgtgtatccccaagccgtgaacacaccggcgcgcggcgtcgtttcctttagggtttctgtcttttccactccggccgggaaccggtagcgggatctcgccgcggcggggcggggaccgcggatgatttcgtttccgaaaagctgttccgcgagtttcagcacctctgcttcatcaaaggatccggtgaccagaatccggatcggcccgggattccgggtgtcacggaaccaggaaagcgccgcttcctttgtaaatcgcgcggtatccgcttgcgtgagaagcgcaaaggccggattcccgccgtggaagaaataggaaggccgccacgtcaccgcgccatccatcgtgttcactatccggtcttccgtattcagaacaccttctgccgcacgcgccgcgtccccttcgccgaccatcgggtcccggtactgcgtccagatggcttcaaaaagcgtcctgaggcgctgcgcgggggctgttccctggatcaccgcggttttcgcggcgtacgactcagacacctggacgccgagtgaaccaagagacgccgcggtttccatgggggacatccggccgactccgcgctgaggaagaatgagggacgcgaaccgcgaaacccacaggcggtctgtcggcagggcatccgttcccgggccgaagaaaagcgatacggtgacaccctccgcgtttttttcaggcagcaggctgagttttgccccgttagcgagtggcagtgttttcagttcaaccccctgagccatcacccgggtttcagcttttctctccgcacccctgagggccggtgtatccggaagcggcggaagcctgagataggggaagcggattgtaccggtctgagatccgacgggctctctcccgctccctccccgcttcgcgctctcatacgcccggagaagatcagactcgggcaccttctctggcgccatgagttcaattgtgactgcaccggtttcaaaagcttcccgaatagcgtctgaaatcgctttgccagtgatcgaagacgccgcagcgtcaaaaaggacgagatccgtttcgggggacgtcatcacgcggccggacgcgagttcggtctccatcccttccaccgcgatgtccggatccggaattccggctttgaccgcgctttcgagggccgtccggattctccgctttgcgcgagccgcctcctcgtccgtcacaccggtttccgcggatttcagttcagcgaggagcgccgagagggaagcctcccaggatgaggatccgccatctgcccgaagcgatgcctcaggcagatagggatcctgaattccgatataagcagccgcggacacccaaggggcgccgcccgcctctgcccggcgcgagagccgttcagtgagcacactctgagccgcggcgataaggtatccggattttcttaacgctgccgagtcctcggccggagaccgtttccgcatgacgcggatccggatccgagccccgtttccccggattacaccggaccacgctcttactccctcccgatccgggtcacccagataagggaccgggggcggcgtacccgcctgaagcgttccaaacgttctctcgatcagaggaacaaggtcatcaggccggatgtcacctgccgccgcgaggatcatacgctgcgggacataccaggtccggtagaagcgcttcaggttttcgggagatgccgcggaaatcacggcaggatcccccgccgggagaaactcaaactgggtgccgccgtaaagaaactttctcagatcagcgagcgtccgcccttcctccgtatccgcgagcgcaagttctgaaagcacaacgccccgctcactcgcgacagactccggcgcgaaaagcacaccgcccgcgaagtcactgagcacctgcagggattcagagagtgtcttctgatccgctttctggagcgtgatccggaacacggtccggttgccggacgtgaaggcattcgcgtcacgcccgaacttcatgccgttttcttcaaagaacctggccgcggtgcctgatggatagtgagtggatcccgtaaaagcaaggtgttccgtgaagtgggcgtacccccgctcagacggccgctcggcgtatgacccggcgccgacaataagagaaagcgacacctttcccttccggggagcggataagagtgcgtatcgaaaaccgttcggaagtttcccctgaatgatccgggagtcaggtgtcaggtcgcccgcttcacgccacccgccgatccacgctgattccgccagtgcgggaaccgcgggtcccttcccctgaaaccagggggaggacgccgtataagcccctgcctcagccgcgatagcggtgaggatcattgagaaaagcagacggggaacggctgactgtcgcatgggagatggaaattcagataacggattccgtcattctaagaaaaagaacccatacccactgaaaagctttccaatttgcggcgcttttcgctaaactctagcgaattagctttcgggtaagagccccaaagcgattgtttcgtacaaagggtattaggaatatggaacccaccacgactgatcaggcagctgaaaccgctgccgcagcgcctgaaaaagcaaagactgaagagaaggctgctcccgccgcagaaaccaaggctcccgcccaggcttctgacgccaagcgtcctgccaaggcccctcagggcaagaagggaaatcgccacggcgatcatcgcggaaacggcgaccgtcataatagccgcggtcacgatcaccccgctcccatgggtgctctgcagcaggctctgaagaagacttccggcgactggaaggcgttccgtgacgcacagattgctgaaggccgctcgcagaagagcttctggctgacggaaaatgaagctgagcgtgtccgccgcttcattcataagatccgcgagaaggctgagcgcgaggctgcccgtcaggctgaaatcgccgcccgcaagggaaaggccggctcgaagccgaagcaggctgataagcccgttcagaagtcagttccgaaccccgtgaagaaggaagcccgcgctgaggctgctgccgcagtcgccgctccggctcctgaagcgaagaaggaagagccgaaggcctaaaatcctcactggctgatccgatcagaaaggcagttcagaaatgaactgccttttttgtgtctcgaatttcacccatccccgaaatcctgttcagaaatcacgcagttacttccccttcagccctactctctgcgagccattgccccatcctttctgaggtcagaccgcctctatagtgagatacgtagatagtcagattgacctaggcgcccctatccgtctgactttaggtatttcctttagtatcccctgttttcggggtttttcagcaacctctgcctatttcatgggcgtaagctcacgcgcctacgcttcaaaaaaccttgggagaagagggcccgaaatggacgatacattaatgcgagttgtgctgcttctgattgatatcatcggtccgatatcgatcggctacttcctgaagcagaaaaatctcgtcaagccggcattcaatgacttcatgatcaagctgaatgtccggggtctcttcacggtcctcgcctttgtcgctttctggaagctgaagttcaccgcagaagtggcgctgatcccgattgccggtctcatcattcttttcgtgccgtatttcctcggcatggcaatcacgaagaaagttgaggatccgctggaacgcggcgccctcgtggtgtcctccatgcttggcaacacgagtacgcttggcggtcttctctgcttcatgctgcttggcgccacgtcgttcgcctacgtccaggtgatcggcgtgctgcagagtatcgtgctgattctcttctgcttcccggtctgccagaagttccatgatatggcggatacccagcgaggcctttccaaaaagcgcaccttccgcgagatgttcttcacctggaatcaggtgtctatcctcggcatgctcgcgggcgccgcgctttctctcggcggcgtgaagcagccggactgcttcgccccgttctttgccgcgctcgttcatatttcggcctggatccagttcctcccggtgggcctgctcctcaacttcgcggctgcccgccgtcagctgaacctcaatgtgctgaagctgattccgctgaaattcatcgtgatgccggcgattatctggctcttctgcttcttcgtgttctcggataagacgattacggctacgctcgttatccagtccgcctgccctgtcgcgatcaacacagtattctgctgcgcgctttatggtctgaagaccgacaccgcgatggccgctttcgtgtccaccacgatcgtgttcctcgcggtgctctgcccgatcttcttctggctctacctctgataaagaacggaagcgattccgatcataagaaagccgccggttctttttgaggaaccggcggcttttgtcagcttacaggagcttctcagcggaaagacttcatgcttcggagcgtcttgaaggcttcacgcatatcctgcttcacaagcttcaccttcttcatgaagagatcgcggtaaagctcggaattcgcggggttcggggcgtaagaggcatcgcgcacgatcgtgtcctgtagcgccggaatcacgtccttcacaccgcccgacgcgagagccgcgaagacgcagttcgtgacgaccgcgccgcccgcgttgcggaaacggacgacgtcagacgcgagcatatccgccttgatctgattccagagagagtcgcgcgaaccgccttccgtcaccgtaatgcgcttcagcgggacaccggaggcacggtacgtatccgtgatctccatatagtcgtagccgatcgcctcaagcacagcgcgccacatcacgccctgatcatcatccagcgtgaggttgaggaagcagccggaagcgttcgcctcatcaccggtgccgcccgtgagatacggaaggaagaggacgccattgcagcccgcaggaaccttttccgccatttcggaaagcggcacgtagtatttcggatcgtctgacttcaggcagatgttgtccttgaaccagcgaagcgcaagaccgcccgtgcggatatagccccagtagaaataggtgtccggaagggagccggaattgaagatcagaccggaaccgggtttcgagagctcgggaacaatgccgtccgtcgaaacgcagaacatcgagcaggtacccgctacgtcaacgccctggccagactcaaagacaccgctaccgagcatcgactgcatcgtgtcgccggcgcccgcgcagacaagcgtgccttccgcgaaccccgtcttctcagccatttcagcggtgagttttccgacaatatcccagggcttcaggatcttcggcatgtacttcggatcgatgccgagaatctcaagctgttcctcgctccagaccttatccatcacgcggtagccaaggccccagccagacatcgtgccccagtcaatgaaggcgtcctcagccttgagacccgcgagatgcatgaggatatacggcgcgtcatggacaaacttcacgccgcgctctttgaacgcgtcggaattcttcaggaaccagcgggcgaacatcgccgggaacatacaggaagcttccgggtttccggtctcacggccccagatctcgcggggcgtgctgttgatcgcgtcaacgtcttccttcgtccgcgaatccagatagttgatgaagggagtaatcgcgttgccgtcagcgtcaataccggtgataccgcagataatgccgtcacccataatggcagcgacatccgccggatcatagcccttgcggcggagttcatcgctgcaggccttcatgcaggtaaccgtattcgcgacgtattcgtccgcatccatctgaacccagcccggattcggatacccgagggtagtcggaagactgtgggacgcaacctttgtccagctgctgtcatagaccgcgaccttgacgctctgagtaccggcgtcaaatccgagataaagctttcccataatgttcttttaaaacctctgattgagggaagggaaaaactgcggggtgcaggcaggtgagacctgcagaccgtaaagtgccatcttccgcttccagtgatgaactgatcgattgtaccgatccggaaccaactacacactagtggttagcacgtttttgtgaccaacgggcaaaactgttaggaattatgaatttgcccacgggtttccgtgtaagctattcacgtaaaccataacaaacagccctcagaagtatccgatatgtccctttcagccgccgtctcggtttatatcaagtttttctttctgctcaccccgttcttcattctcgcggttttcctcgcgctcacggaaaaggttgagacgcggatgcagcgggcccttgccggccgcgtgacggtcggtatcgttctcacctcgattctgctttttctcttcggggaaacgatttttgatctcttcggaatcacggtggactctttccgaatcggcgcgggtgcccttctcttcctttccgcggtgtcgctcacccagggaaagttttctcttccgtcgactgacagctcactcatgagcctcgcgattgtgccgctcgccattccgatcacaatcggccccggcacggtcggcgctctcgtcattgccgccgcggaatcgcccacctatatcaagaaggcggagacgcttgcctgcattgtggcggcgtgtcttactgtcggactgatgctctttgtcgcggaccgcgtgaaaagcgtgctcggcgcgaacggtatcgcgatgctttccaaaatcacgggactggtgctcgcggccctcagctgtcagctgatgttcaccggcatcgcggctttcctgaaataaacggaattcgctcctcaagtcgcagaaaaggcggaatctcaatttgaactgctccccaaatttaggacttgtt

SEQ ID NO: 1374 - DNA, 5528 bp, Unknown
  gut microbiota DNA sequence
gtcctagtgctacgaaaaacgccacctataccaggctttacggcgagccttgaagccggatacacatttggcctcaaagattgggtgagcagcgatggcacgcggaacgccgcgcgcctccggcttgaagcccaggtgatccgcatgggcgtgagagcggatcagcacgtggatgccgagaactacacggtgtccggcaccggggccgggaacgtccggacccgcgtgggtgcgacggtctatcacctcttcacaaacgacagaaccggccgcgcgatcaaaccgttcctcagcctcaactggtaccacgacacgaaatcctttggcgtcacctacgccggggtccatgaccaggcggaagggaaccggaacttcgacgaagtgaagcttggggtcgaaggaaagctttcgaagcacgtgaacctctggggtgctgccgcgtaccagcaggggaagcagggcttccggaacgtcggggccttcattggagcgaaggtgctcttctgataggctagtgacgtgaggttccttcccttccgggcgggaacctcaggggatctgaagaaaatgccgcgggtttgaaacccgcggcattttttatgttgattcagcgggttaagtaaccgaacttcaagcagcttccgaaataaaaagaagccaccgatcagtggttcacactatccatttcagaagctgcatctgaaaccgattccagaaaccgcttccttatcctccccgctaaaacggaaaaagcttgcgttaaagcaaaagtgccgcctctcagaaggggaatattgtccgggcggtctgaaacagcaacagacagaaatcgatctttacgcgggtgaacacagcgcggaagccactccggctacgctcagtcacacaaacgatcaaagactctcattcgcagcaagggatcccgaagaacttcctccatcggttcttcgggattctgtttttatcgagttacttcgagagcgcctcgagacgcgacttcgcgagcgcggcgaagagcgtcaccgcggcggggagcacttcgtcattgaagtcaaaagtcgggttatggagggtcgccgtgtgattgtcatcccggatcccgacccgcatcatgagccccggcaccttctgctgataaagcgaaaagtcttccgcgcccatgatgagctgaaggtcggtcttcacgtgatccggaccgaagaggacggtcgcggtctcaacgcacgccgcagtcagtttcggatcattgatcaccggcggaatcagttcccggtattcgacttcggcttcgaggtcgttggcttccgcgattcccttcgcggttttcgggagcttctccttgatgagtgcccggacttcggggttaaaggtgcgcaccgtgccgctcatcgtgaggacaccgggaacgacattcgtgagttcgtacttcccggcgttgagggagcagatactgatcaccgcggggtccgccgggttgatacggcgggaaataatcgtctggacatccgacacaatctggcagcccaccgggatggggtcgagcccctgatgcggccggccgccatgcgtccctttcccgatcaccttaataaagaaattgtcagacgacgcctgaagcggacctgacttcatcccgaaaacgcctttcgggagcgccggctcatcgtgcgccccaaggatctcctggatcccgtacttctcaaagaccccggacgcgacaacggctttcgcgccttccgcgatttcttccgcgggctggaagatcccgatcacggtgccggggaagtcgcgatggaggtggaggtagcgcagtgcccccatgagccacgtctgatgaccgtcgtgaccgcaggtgtgggcaagacccggtttcaggctcttccaggggttcacactctgatcatccattttgagcgcgtcgatatcggcccgaagtccgatcaccgcgccggggcggttcccctcaatccgcacaacgacaccgtttcgcacgagccggtcatcgatatcggtcagtccccatcccttcaggatccgcacgatccgggccgccgtttccgcggtctcaagccccggctccggatgctggtgaatttcgtgacggatcgcggtgagttcatccgcccacccggccacttcggggtacacccggtctttcaagacgatatcagccatggatcaatgctccttaaagggatcaaaacgaatttttgtgtccctatattagacgcttagccggcaatcgagtgaggaaacaatgagcgcttcggttctgacgctcttccggattcggggaacggcacgccgaagttcggagacccccgtcgggccgggcttttgggactttgtacctacttataaatattatcggtttccctcataggttcacatctgacttatggaaaatttccggaggaagatagcgaaaagcgtgacttattggagagggttgctgtctgacagtccctttttatcaggacacaataatcagcgctattcagccatctcttgattaataaaaggatttcatacgcgaattgaacagatttgtagacgagaatccaatttttgtcattttttaccaataaatctgtcagctgttttttgctaaggacttttacttaacttttaaagacagatttaatttcagaattgatgtgactcagaaatggatatccgatctacagcaaaaatcgctatactttcggaaaaattaggttttatttttcatttgtgctactgaagtcagaaagttcagctgaatggaagacataacttaattcacaactgattgattctggttgattgttttacgtaaaccggcttccggctctgtcagttggcactggattcattgattgacttgcttgacccccgctcctctcaagcgcggactgaatagctgtacccaaccagtctcctcgttcagttctgtctttgtccgtctgcctttcgagattcttgcccatcggaaagggcagagggcaaaggcaagcttcttctctatgtgtaattcccgccgggtcggagaggatcctggcaggagttgatggcgcgatcgggggttttactttcatggctcgcgccatcactttaaaccctgctcagtttcggccgagcagggtctttttttttcgcgcggcccgttggagaacaaggccggatccggttcccgcatccccgaaaggggtattggcggccctctcaggcttttttccggagggcaagggacgtgagcacctcacggacccggtcaagcgccgggagcacggtttcaggcggataggcgtagccaaagagaaacccattcatcggacgcgccggatccgaaatcacgctgagtgtacacacgaaaatcccggatttctcaaggatcgcggcggcctcggtatcccggaacgcagggtccaggagaaacaccgcgtgctttccgctttttgtttctgaaaactccccgaagggcgacagccgtttcccggcagcctccataaaaaaccggtaccgctcccggtagcggcgggcgagtttcctcacgtggctgtcccaggctccgctgcggatatattccgagagcaccgcctgcaggttctcgggattatggcggtccgtgaggagcttcgctcccgcgaaagcgtctgaaacctcatgcgggaccgcggcaaaaccgatcctgacccccggaaaaaccgtggttgagaagctcgcgagaaaaatagtgcagctttcagctcccgcaatgctccggatcggggcggacaccgattccgagacccgaaggaaactgttttagtcatcctcaataatccagccaccggtcttcagggcccagctgaggagcgctgcccggcggtccgatgacagttcaaaccccagcggatactggcaggcggaggtcacatagacaccggccgcgtttccggcggcttccacttcggatgtgaggatcccatccgtatccaccgggattttcttcacgcggcagccccggaaggcgagcacgtcggacacgagtttcagccctggagactctacgcacacggtgtcacccgcggagaatagaatctgcgacgcgatcgacgcggtctgaacggaacccgtcgtgataatgatgtcgtctggatccgcggcgatcccgcgaagccgcctcagaagatcagagagtgtctcccgaagagggccgtacccgcgggggtccgagtacccagtgtgacgccaggtcatccgggcgagctgcgcggaaagccgggtccagacgggatccgggtcgctcgccatcccggtcgcgataccgacgaacggtgccgggttcgagaaagcgggggagtagtcgcggagagcggccgcagcgagcgccgcggtttcagatgaatgccgcggaccaagaggaaacggtgccggatcagacgtcttcggaacagggcggacgtccggcagccggtccaccacaaaaccggatctggggatcgatttcagatagccctcatccgcgaggtcatcaaagacgcgcttcaccgtgtccggcgaaaccgatagcagtcgcgcgagtttccggatcccggggagccgggtaccggaagtcaggatgccggcctcaatctggcgcgtcagttcccgcctgatctgctgatacttcggggcgggatccacggggtcgatcgaaagcgccggaatcacaataggtttagccatgcgtcaggagtaatcaaaaagactgagggggtcagaaaccgcaaatctgtatggattcaattctaaaacgcatccatacaattttctccatacaacaaccaaagcagtaaccaaggagaaatctcaaatgacaaaaatcaatcggcgttccgccctgatgctgggcgcggctctcattccggcgatgagtttcgcggacgaaatgacaggcagcacggatggcccgatgtcccggaagcctgagcgtcagctcacaaaggacgaagcgctcttcatcatcaatcacaccgaacacgcggttctcagcatggcggataaagctgactacccgtacgggatcccggtgacgccgatttatctcgatggaaagatttatttccacggctcaaataagggccggaagggaaaggatctcgagcagaacccgaacgtatcgctctgctggatcggggggcacgaagtggcgaagggtgaattcgcgatcaattacgcgagcgccattgtgacggggaaagcgcatctcgtgaccgatcccgagaagaagacccacgttctcatgagcatcgttcaccgcatggatccgagcgttccggataaggatgcccagaactacatcaaggccggcatgggccgcgtctcggtgtgggaagtggatatcgataagatttcaggcaaagcccggaataagcaggtgtatttcgggaagttcccgaagaaggcctgactggtttcactggcaccggggcgtctctctcctcaataacaaccatcccccggtgtcatctccctctctgttttctcatttgccggaccggccaccgcgggtccggatttttttt

SEQ ID NO: 1375 - DNA, 1159 bp, Unknown
  gut microbiota DNA sequence
ctctggcgatggctcaggaaccgcctggaacgtgaagttcatcttcgcgattctcttcatactgatgttctcgaagcaggtctacatttcgtccctcacaaacttccttacgttctacgtgatggagaaattccatgtggatccggtgaccgctcagtacgcgctcttcgcgttccttggcgcgggagccgcgggaacgctgcttggcggtccgattactgaccgcttcggacgccggaaggtgattttcgggtcgatcttcggcgcggcgccgttcgcgctcctcgtgccctatgtcggcttctggggtgtcatcgcgctcgtgatcctcgtgtccttcgtgatttcgtccgccttctctgcgattctcgtctgcgcgctggatgtcgcgccgcgtcacaccggcatggtgtccggtgtcttcttcgggctgacattcggtcttggcggtgccgccgccgcgttcttcgggtggctcgccgacatcatcgggattgagaatgtgttcctcgcggcatccttcatgccgctcgccgggatcttcgctctcgcgcttccgaagaagctctgagccgtaaaaccccgaataacaaactaacctccctcagccgctgaccggtgttttaggtcagcggtctttttgtttttcgagcgactgaacgagtgaaccgggagtcagcccgaagaatttcgtgaaggcggcgctgaaggggccgggacccgagaacccgaggtgaagcgcggtctgcttgatggacatgcctttcgcgagacagtcgagcgcggcgcagaggcgggcagcggatttccaggctttgaaagtcatccccgtgtctttcaggaactttcgctcgaaggttttgggcgtcaggtggacttcatcacagagggtctcaagcggcaccgcccagcggctttcccggaggatcccttccgctgcggatcggagcacgggatccgtgggaagcggaagaggatccgcggtcggcgctgttccatgaagaagactcagcaccagacggctcatctgcttctgaacggatggcggataggtattcctgaagagctccgagatcagatcccggaggagatcagacacttccatcgcccggatcgaagtggacactttttttgaagcatccgcggggaagtaaagcgt

SEQ ID NO: 1376 - DNA, 270 bp, Unknown
  gut microbiota DNA sequence
gacgagtctcgaactcgcgacctcaaccttggcaaggttgcgctctaccaactgagctactcccgcatcagtacgcctgctgaattatggaggcgcgaggcagaatcgaactgccgtgaacggatttgcaatccggtgcataaccactttgctatcgcgccaccacgcttcctcagcattactgaagaatcctggagcgggagacgagtctcgaactcgcgacctcaaccttggcaaggttgcgctctaccaactgagctactcccgcat

SEQ ID NO: 1377 - DNA, 8279 bp, Unknown
  gut microbiota DNA sequence
ggtgaccgaatcaccccctacatcgattaaccttgaacgagccgcccacaaaaaattacacaccctcattgcccctgtcatcgcttccttcccgttccccatcacaagcatgaccgagaagcaaagtgtgacaccaaaaggcacccagccaagatattccatctgctccttatggggatcctcggggaggggatcgccagtgaaccgcgacggatccacaccatctacccaaactttatattctttccccttgtactcaaagacactgagacccacaggaaggtaaatcgtctttgtgtcatacgactgtgaaccgctccaatgccagtctttctgttcgtctccttgagcgtttgccttcacttcagacgccaccatatcacccacccggctctcaacgtacagctggtaggattcgcgatcggttagagcgaatttgtctttcgaaaagccactgagaaacttggcgtcgtaaggtaccatctttgaacgatcctggtctgccaaaagctcagcacagtttttatcgatttccccgttacccgcgtacccaaacaggctgaaaggaccgtttacagcgccgctcaccggacgccagtccgtcacggttcgagcgttgctgccggaaccggtttgccgctcataaccaaacgacgccgtccaatcggcatgatattcaccatgaaagagataaaacggcacgtacttgaggtattgcttcgtgacggtcgctttctgcaccagatcatccggtgtcagcttcccctgcgtcatataaagacgcgtggcattcgtaagagcatctccctggatctgaagcgggatgatgaggtccgtgtccgtgatatcttccggctttacagcctgggttggaatcttgaccgtgtttccgcagtacgcgcagacaagcgtctcagtaccaggttgataagtaagttcggatccgcatttgtcgcagcggattttcaaatctgtcatgtcactcaacctttattgaattcgtttttgacaagaatgttccgctgattgaagagccggaaaagcacttgcgcctgatcgtttaaggccttcgcgtcgccgaggctcgattcgagctcgccaactgcggcgacgatctgcttctcaagagattcggaggccggatactgcttcgggttcgagaaagatgcggcgtcaatcaggcgctcgaggatcttccggtcttcgtcatctttcgctttcgcctgaatcgtgcggatttcggacgccacctgcttattccacgggaacgcgttcgtttcctgagcaagtttcgacacctgattcatcgtgacgttgctgaaaacgaaatgacagccaagcgcgagcacccagagggcatctgtcgcaagcgacagctttaggaacccgcagagcgaaaagacgagtgagagcgcagcgaccgcggccagcagcacaccgaagaaaatcccgatcccgagtcccgcaagcgcggaatccatcccctttttcccggggcaagtcggaatgatgaaaagatacgcgacactcagcgcggtaaggaatgctgcagcgtagaaatagccgctcctgaggtcagacggtacgagcgctgcgagtataaagatcaccgcagcaaacgcgaggaccgccagaaatacgaacttcagcttaatgtcgctcatcccagaatccttttcttttcagtcgcaaactcttcgtctgtcagcacgccctgggcacgcagttccccaagctgcttcagcatctcgatcttttccttgaagctgatcgtgtcagccttcggcgctgcaggagcctcctgaggggccgccgggggattcgtgttgatcaccgcgccggcaccggagggctgcgccattgggttcatcgcgccgccgagacccgttccgagtcccatgccgacaaaggctccggtggtcccttcgttcttcgccgcggcttccagcacgtcgaagctccggacctgctgatagttgttcccgaggatcccgagctcagcctttcgggcgagcgcggccttgagcgagattacagaggggtcatcctccggcacgctgatcgacattacgtcgaaccggacaacctcaatcccgtactgatcaagctcttccgcgaacaggttccggaggctatccgagatctcatcgagatacatcgagatatcgagcaccgagatctttttctgaatgatcgtttcagagatcagggtcttcgttttccggatgaagatgcccttgaagtagttattcagtgactcaccgtcaaaactcgggagcgtccccacgagtttcaggaggaacttcttcccgtccttgatccggataccgtactgcccgaacgcccgcaccggcaccatcacgccgtaaagcggatccttcagctggatcgggtccggcgttccccacttgaggtcgaggatcgcggctttgttgatgtaccaaacctcagccgtgaacggagactgaccgccgaacgggattccgaggagattccggagaatcgggatattcgccgtcgagagggtatgacgtccgccctcatatggtccctcgtagacaccgccgcttacgagatacgcttcctgtgtctcgttaacgatcagctgcgtccaggtggagagttcctgtgacgggaatttccacgcgagaagcttcgggtttcgtgtgtcccacttgactaagtcgataatcatttttggtttcagcttcaatgaaaagaggttgattgggtccgggaacaacgatctcggatccgtattccaatgctactccgtatagtactgattttcacttcgtatgtgaaccgaaacgggagacattccacccccatgaaaatcagtttctacctgcctcggatagcctgggattcgttataacttactcggggattttaacccgattgacgcaattaaaaatttgttatattcagcagaaatcaatgtatttccgggatcttctgtgcgtgttccaaacggaggcaatatcccgtcagccgcggatagttccccggctgacgccagaacataaccaagggaattgatttcgtaatctgaccctgatattcagttctgtactaggcgctgaaataacgttttcgcgctctttagtatctcggtctacgggctaacaaaaactaattccgggttcgcctcaaatctcagacaattatttagaccgaagttcttgatgtaataccgaaacccgacttctcttctttatcccctcttcctgcgagccgccggctgccctcgcttcttttccgtttcaaaaagtttcagaagacggattccttctgtattacgcaaaacggattgagaacgatcttcattcgtctgaaacccctgtttttcagggatcaacgctatacaaagtcacattttccgttctcatctcattctttcggtctggattttctaattctttagagctatattgaacgtgcgccaactggtataccggtatcccataaagggaaaaaacaggcataccggcgacgggaagtctgtgtattctgtgctttaagcctgtccgggcgtacgaaccggacagcggtctcagagcctgcggccctgattcacacgctggccttctgaggcaggagaaacacgctgaccggagtcacacacctcctctcagctccgctgacaagcctcataaccaactagaggagacactatggctaaattagaactgccgtacgagcaggtcttcgacctgactcacaagatgtgcacccgcatttcgccggacgtcctttacctgctcacggaagcagcgaagaaggaaacgaaccccgcggcgaagacgttcctcgagacgatggtggagaacgagcgtctcgccgggatcgaggataagccggtgtgccagtcgcctggatacccgtctgtctggatccgctggggcgaagcctatgagccgaacctctcgaacctcatcgataacatcacgcggtctgtcgtcgacgcgacgaagcagggctacatccgcccctcgatcgtgcatccgctcacccgtttcaacccgggcgattccacgggccgcggcgttccgaattacgagctccgctacgagaaggacctcccctactgcgaaatcatcgtgagcgcgaagggctgcggcgcggagcttccgaatgtcgcgaagatcctgacccccgcgacgcttgggaaagacttcaagggcctgaagcagctggtgcttgacacggtcaccggcgcccgcggccaggtgggcgcccacggctacccctgcccgccgttctcgcttggtatcggtctcggcggccagatggacgtcgcggcgaagctctctcgcgaagccatctcgacccgcaactggcttgaccacaacccggatccgctttttgatgaactcgagcaggagctgctcgctgacatcaataagctcggaaacggccccgcgggcatcggcggcgacacgtcggcgcttgccgtgaagatcggctgggcttccacccacaccgctattctccctgtcgtcatcaacttccactgctgggtcgcgcggcgcttcggcatccgcttctacccggacggtcacacggaagaactctttcaggttggagaataaaaaatggcagtgtatgaactgacgctccccgttgataacgagacgattgagaagctgcatgtcggcgacatcatttatctgaatggccaggtctgtacggcgcgcgatcaggcgcacctgcggcttaaggcgctggacgaagccggaaagcctttccccgaagacctgaagggcgcggcgatcttccacgccggccctgtgatgaagaaggacgaggcgggtcactggtatctctccgtgatcggcccgacgacctccatccgaatggaaccctacgcggacttcatcggccgtatcggcgtgaagatcctgatcggcaagggcggcatggcggaaggcacccggaaagcgatgcagaaatataagcaggtctacgcgcaggcggttcctggctgcgccgtggtgctcgcgaagggcgtgaccggaacaaaggacccgtactggtacgagtgcgggatgccggaagccatgtggccgcttcagacgaagcacttcggcccgttcctgatcaccatggactcttacgggaagagccgctatgacgacgtgcaggcgcacgcccaggcggttgaggaagaaatcctcaaaacgctctgaccgccgttctccccttagaatgactttctgaggaaggacaaagaaaagcccggcaaacgctttggaccaccccaaagaagccgggcttttttcatcgataaaaaataagagagagtaacaaccatgagtgacaccgccacacccgctctgcaccgcgagagcgacacgctgtaccgacagatcgctgagatctggcgtgagaaaatcgtgaccggcgaatataagcccggggacgcgctcccgagcgaacgcgatatctcggagtcgcttggcgtgagccgcatcccggtccgcgaagcgatgaagtcgcttgagtacctcgggatcgtgaagcaggtgcgggggaaaggcgttttcgtgcagaagacggatccgggtgaggtgctcgcgaagatcgggccgttcctcgcgccgccggatgccgcgacgctctctgaactctttgacctccggattcttttcgaggggtacgcggcggagctcgccgcgaaaaaccggaccgacgcggatcttaagacgcttcaggcgtcgctcgacctgctgaatgcctccattacggatgagaaatccgccgaggaagcctctcaccggtttcatcaggaaatcgcggcgatggcggggaaccgccttctcatcattctctggcacttcttcgcggagctcctcgaagcgtcccgccgtctcacgctttggagcccggagcggcgtgaggaatcgctcaccttccatcagacgatctttgacgcgatccgggatcagagatcagacgacgccaggaatctgatgcagcgtcacctcgcgaacgcgaagcagcggctcaccgagcgcgaaaagacgcttggggcggctgaatagcggattttcccccgacatccccaggaatctgttcactctgccccccgctcgctacaatgccgagacaatacggaagtgattgaaaagaaggtcgctgcatgagcatgaatagagaagcggttattgtccgcaccgggattatcgggatcgtcgtgaatgtcctcctcgcggccttcaaggccgccgtggggctcaccgcgaattcgatcgccgtgattctcgacgccgtgaataatctcacggacgcgatctcgttgattgtcacgatcggcggcacgaagctctccgcccggaagcccgataaagcgcacccgctcgggttcgggcgggttgaatacctcaccgcgctcatcgtcgcggggctcgtgctctacgccggcatcacgtcagctgtcgaatccgttaagaaaatcatcaatcccgcgacgccggattacagcgcggtgtcgctcctcatcatcgcggtcgcgatcgcggtgaaaattttcctcgggcgctacgtgaaggcgaagggggaatcggtgaactccggggcgctgaaggcttcgggagcggacgctatgtttgacgccgtgctctcggcctcggtcctcgcctccgcccttttcttcatcgcgaccggaatatcgcttgaagcctatgtgggcgcggtgatctcgcttgtcattatcaaggccggtatcgggatgatcgtggacacgctgaacgacatcctcgggaaacgcgaaaactccgaggttaccgatcagatcacgaagatcctctgcgaggaaccgaaggtgcatggggcatacgacctcgtggtctataacttcgggccgagcaagaatctcgcctctgtccaccttgagctcccggacacgatgaccgtgaaggaagtggacgcgctgacacgccgcgtcgaatcccgggtgatgaaggaaacgggggtgctgcttgccggtgtcggcgtctattcgtacaacacccacgacgacaaggcgaagcggatccgggacgatatccggaagcgccttgccgctcacccctgggtcgtgcagagccacgggttctacctcgatgaagcgaagaaagcgatccggtttgatgtggtgctgagttttgatatcaaaccggaggatgggctgcgcgagatttatgatgagatgcgctccgcttatcctgaatacagcttccagatcacgccggacgtggatgtctcggtctctaaatagagcgtcattacaaaagagcacgccttccgttacggaacgcctgtcgtacaaaagcggaaccgattctctccgttcttatttttataatggagagaaaggaagggatacctgggcgctctgccctcatcccacctgcacgtttttcttcatggaggctccgcgtcatgaaaccctggattctcttaagcgccgcgctgatcggcgtgagcctcgcgccggcagagaccgcgctcgcgaagggttacgacgcgtattcgccgcttgaatccgcccgagtcgtgatgggcggctacaaagcgccggaaccggagaaacggacatacctgaatgtcgcttatccgcggtgggacaccgcgagcatcaagaacttccgaattcagtatcgggagccctcttcaagctgctgcctcgacgacaaatacgaaaccatcacgacgtacgataaattcggcggcattcacgataagaatgtccgcctcaccgccgcgcgacgccggtactggaacgaaagctacatccaaggcaccgcctatacgcggactccggagtatcagctggagcagttgaaaaagcaggcggaagagaatcagcagaagcttgaagagatgatcaaaaacagcaagttccgcgcaaacggcgaagtgaacgggaaacccgcctactacaacccggtgacgaagcagagcctcaccgcggattcgaacgggaaatacgagctgcacgactggtaagaagaaaatccggatgaaatcggattaagaaaacgctataaaagcggcatcaggaaaatctttgggcgaggctataccctcgcctattaactctcttacgaattacctttcgggcttctgtccgaaacagggcaggcaacactgattgccctggaaggccgcctgtcagattaggttttgattccccgacaggctttttaatctgagtaaggagaagttaaatgaaaaacactggattttccgcttcttccaaggattcccagccctccgtgtggaatgcccttgac

SEQ ID NO: 1378 - DNA, 252 bp, Unknown
  gut microbiota DNA sequence
gacaacccgtattctgagtcctttttccgtacgcttaagtacagcggcgattgcctgtatccccgagatggctttaacagcgtcgaggaagctgagcaatgggtgcaaagttttgtagaacattacaacgagcaccacagacatcgcggcatccgaatggttacacccggacagcgttaccgcggcgaagatgcggaggtgctgcgccgacgcagggaaacgatgctggaggctcgcagaaaccacccggag

SEQ ID NO: 1379 - DNA, 3413 bp, Unknown
  gut microbiota DNA sequence
ctctattatggaagctttatgggccactattcttttctcaggctttgcacttgaagtgataattcgcccggcaaatcaaaagccttattggttttgacatattacggtgacttttcgtatttaaagaaaatcagctggtaataccccaataagttccctgagctcagcatccatagtccctgagatgcggaaaaatcaaaaaacgcccgtcaaatctgatcacaaaaaaactgacggtaacaatgcttaatgctatagggactcacaaatcatgaaacgccgcatccttctcgctgctattgcagcctctcccgcaatcgctctcttcggctgcagcaagaacgattcatcctctgctcaaaagacgatcaagcttggaacgttgtccgggcctcacgctgaagtcgctgaagaagccaaaaaggtcgctgccaaaaagggactgaatgttcagattatcgaattctccgattatggtcaggtaaatgaagcgctcgccgcgaaggatattgactgcaacgcgtttcagcacgttcccttccttgagaaggccaagtcctcaaagggatatcagttcactgcgcttgggaaaaccgttctcttcccgcttggcgtttattctcagaaaattcataccaaaactgaaatcgcggatggaatgctcgtttccgttccagccgatcccgcgaatctcggccgcggtctgcagctccttgaacgtaacggcattatcaaactgaaggatggcgtcggaattcacgcgacgacacacgatatcgctgagaatccgaaacacctggttttccgcgaggttgacagcgcttacctcggccggtcacttcctgatgtggggttcgcggtcatcaacggcagctgggcggtgaaatccaagctttcccctgagaaagacgcatttattctcgaaggcgcggattcagacttcgccaacgttcttgtcacccgcactgaggacaaagataaacctgaattcaagactctcctcgcctcgttccagagccccgaagtgaagcaatttgtgaaggataagttcaaaggctctgtggtagccgccttctaatccgtttcacaagggaagaaaatgcatatcaatcagcaatgtatcggatgccgccaatgctggcctgtgtgtccggtcggcgctattggcgctgcggctgacgggcaccattcagaggtcaatctggaccgctgtgtcgaatgcagtgcctgtctccgttccagggtctgtcccgtcaacgcttttgagcctcaggaactgccgtggccccgcagtctgcgctcggctttctccgatgttttgagtcctcataaatcaaccggggttcttggccgcggaaccgaagaaatgaaaaccaacgacgtaacgggacggctgcgggctggtttcgtcaacgtcgcggtggaactcgggcgtcccggaatcagtgcaagtttcgaagatgtccagacggtcaccagagccctcgcccgccttgacgtcgagttccagaaagaaaatccagtcacttctctcttcacaaacgatcgaaatggagatctgaatcctgaggtactgggggagcgggtactctccgcactcgttgaatttgagattcccgtcagccgggtacctgaactggtagaagcgctggaagaagcgggaaagacagttgataccgttttttccgccgccctcgccgaaccgatccgtccgggggaatcggagccggaacttattcagattctggaagagaacggcattttttatcgtcccaacggaaaaaccaatgtcggacttggcaaaccgtttcttccagtggaggcggcatcatgacacatactcttcatcggcgcggctcaaagtcagatcttgcgcatgattatgtggttctcgcaatggcagcccggggtgtcaaccgtgacggagccgcaccgaaactcgcccgggcacttgaaattttcgccgctcataatccggtgaatttcggaaacgtggccggaaattccttcacgcggacgctgcccgaaatggtctctcttacgcgtgacaacacagtctctcacgccgttttcagggatattgaggatgtcacagcagtgctccaggacctgaaaaaagaagacctcggtatttccatcgtggtttcagggctatttgatcaggtcaaggcctcctgtcggtgcgctggactgactcctcacacggccaatgtgtcgcttgggatcttcggcaaaaccgaaaaactgccaaaggaaggtgttctcgaaattgcctccatgtgcggtcacaacatggtctcattcggagtcatcaaaaaactcgttcgggatatagaggacggttttacgacaccggaacaggcggctaaaaaaattgcggcgagctgcctctgcggcgtctttaactgggagcgtgccgctcaggtcttttcccgtcttaccgaaggagcaaaggcatgaaaacctctgaagcgaaacgtctcgagttcagaaggaatcttgagacgggaacattcatgatcgcccccggcatctatgacgcgctgtccgcgaagatagccgaagtttcaggtcttaactgtctcgcgatgggcggttatgccatctccgctacccgtctgggacagccggatgtcgggctgctttctcttaccgagatgcgggaatcgctgaagcagatctgtgaagcgactgatattcctgtgattggagacggggacaccggctacggcaatgccctgaatgtcatccggactgaaaatgagtatgagcgggctggcgcttcctgcatcttctttgaggatcaaaaatggcccaagcgctgcggtcatatggaaggaaaacaggttattccggccgaaatccatgttcaaaagatccgcgcggcgtgtgacgccaggattgataagaacacagttatcatggcccgaactgacacccgggcgatcaatggggtcgatgacgccatccggcggggtcatctttacgcggatgccggcgctgaaatcctctttatcgaggcgcttcgggaccgggaggaagttgaaaggctggcccgcgaattcgagggaaccggcacttatctcttcgcgaacatgattgagggcggaaaaacgccgattattccggcctctgaactgaaggaaatgggatacgcgggggtgttctggtcctgcgcttcactttatctggttgcgaagaccttgaaagacgcgttcactgaactggcaagagacggaaccagtgacgcgtttctcagcagaatgattgacttcagtgaattcaatcacttcattggtcttgatcgctatcgtgagctggaaaaacgatatgcggcggatgataatctaaattgggctggaaaaatacgtagtcgatagtttcggttatttttcagcccaatctgggatcat

SEQ ID NO: 1380 - DNA, 994 bp, Unknown
  gut microbiota DNA sequence
cgcgcttctttttctgtttctgaaggaaggtcaaagggagagaaaaccgctgtccttcagcggaggagcatcagccggaaactgatccggttcctcacgcggcctggaatgaccagactcaagagggcgccgcgggaggaaccgggagagagaattctgacaggaggttctgggagtctttatgccctgtcagcgatcagatcctggctgaagaccgtcttacttctgagcgggacggttgtggccgaagaagcggagatagcccagatccttcgccttgcccgtcaggtgctcgatcttcatttcgaacacgttcgtgtacttatcgatcttctcgaggcgggcgctcatttccttattgatgtcaacgctcggagtgtggcgttcgaggatcttacgcatgatcgcggtcttctcagccttgtccttgatgatgcggatcgggccggaagcaatggcggacacgaagtcaacggaaagcttcggctgattcgtacggtcctgagcgatccagcagatcgagccgcgggggttctgctgaatgtcggcgttgcggcggccgtcgcccatgccagcgccgtggaagtagatcttgccgtcgagcagaatcggggtgatcggcacgccgtagggttcaccggtgccgtcagcgagcgacagcacagcgtggtccgtgcggcggatgacgtcgagcgtctcttcacgcgtcagcgcgaacttctggttccgcatcggcatgtctttcgtgttcttcgcgggatccagggcgaaagcggaattggcggcaggagcgagagcggcaagagcggcaatgctcatcaggctgcggcgggaaagattggtcatttttattctctccaaatggtttcaggtatttagcggaaggggtctctccttccgcctgagaccaatgtaggaaaaacgcttccgttcctcaaacctgaggcttatgatggagtgctgaaaagatcgatatcagttcctcttttatcga

SEQ ID NO: 1381 - DNA, 641 bp, Unknown
  gut microbiota DNA sequence
aatgcctgccccggtttcatgatgatgaacggtgtatcccgcagcgaggcaaatgaaatttcgggaagcgggaattggactggatgaggctgatttctggcaagcgggtgagtgagcggaagagcgacccagacggcttcgtgggtgacaactacggaatcgagttcagaagtcaccatcggcgacacaacaaagccgcagtccgcggcaccggatgcgacagcatctgcgattcctttcgtggttccttctgtaatccggagctggatcttgggaaatcgtctcgcgaattccggaagaatccggctgagaatggtttcagaccggtagggagtggagccaattagcagttcgccagccgctcctccctgaagatcctcaagatactgctcgcgctcgcgtcggattgcgtcaattttcctttcagtttccagaaagtaccggccttccggcgttagcacccagggtgactgcgatcggtcgaatattgtaatgcggtattcttcttcaagtcgttttacgaattgggaaagcgaaggctgggcaatgaaatactggcgggaggcttccgctatggagcctgttttcagaattgcctctaaatgatgaagaattcggcttcgcatggagagaactcctga

SEQ ID NO: 1382 - DNA, 4433 bp, Unknown
  gut microbiota DNA sequence
gaaccgcagtgtcccgtagaggaagagaaaatgctggatttgctgatcaagggcggtcgtgtcgctgattggaagaaccataccgatcgcatcctgaacctgggggttcaggatggaaggattgcgtatttggggactgacgttccggaagccgctcggactattgacgcggtcggtctgatcgtcattccgggcgttatcgacagtcatatgcatgcgagttcctggctcgggggaagctcagcattccgcatgatggctaaagccggtgtcacgaccgcgatggaaatggcgggtccccttgaaacggtctttgaaggtatgaagcgggaaggcgctgggctcacgatcgcggtgctgcagcagctgaagccggggctcaatatttcaggaacagatccctcggatgacgagctgaaacgggcgattcaggagtctctggaatccggtgcttatggggtgaaacttcttggcgggcactatcccatgaccccggacgcgatgaagcgcctgatcaggatctgctgcgactcgtataccttcctcgctatccacgcgggttcaaccgagcatggttccaaccttgaaggggtccgggaagttattgtggcagcagaaggccgcccgtttcatcttgcccatatcaacgcatactgccgcggcaatgtcgagccgcttgaggacgaaatccgggaaaccgcagaccttctcagccgtcaccctgagattgagaccgagtcctacctctctcctatcaacggctgcagtgccaaatgccgggatgatgtcccggagagcggtgttacgaggtcatgtctgaaaagccacgggtatgacgtcagcgcagaaggcattctgaaggccgtagctgacggttatgccgcggtccacgaagtggtagatggatttgtcacgctggcatcccctgagaagggaattgagatcctgaaagctcgcggaatggatgtaccggtgagtttcaaagtaaacccggccttatcgcgtttctattttgctacccagaagaagcaggacggaacctttctcgtcaattccttctgtacagacggcggcggaattccccgaaatgtcatcctgaaaaacgggcttctgcttgttgatttcggagctctcacactgcaggaattcgttctgaagtcgagttacgagacggcctgccgcctggggctgacatccaaaggtcacttttcggccggtgctgatgccgatataacgatcgcggatccggtatcaagagaagccgtgtcgacctttatttccggacagcctgtgcttgaggaaggaaaggtcgtggcgagaggcggaaccatcgtgacaacaccggacggagcggatgcggtacggcggtttggtctcccatccagggtggtggatgtcagaacgttgcttaaaacccgctggaatcgctgaaaaaagaatcaaccgacgtaagagagaagcaaagcggcagccgattccgaattttccgggctgccaaaaattaatactaggagaacacatcatgatctggattggattggcgattgtcattctgaccttctatctgatttacaagaactatgaggcaagactggttctggcgctgtcaggcattctgatggccgcgatcggctggctcgctgcgggatccaatgtcacgatcggcaccgctgtggatgcctttgtgaagcagctggtgaatggcgggctcgtgccgactattgtgaccgtgatggggtttggcgctgtgatgacttacacgcactgctctgatcatctcgttaatgcgctcgtgagacctttgactcatgtgccagcgattgtgattccaggggctgccatcatcacctggcttctgaatatcgtgcttccgtcagccgcaggcgttgccgctgccgttggcgtgctcctgattccttctcttatcgctcttcgcgtgaacccggtgatggccgcggccgctgtgttcctcggaacctggggttccgcgatcagcccgggattgatgttcaaccctcaggtagcggatattgcgttcaaggcgggtgagatttcgtcacctgacgcgatgatcgtgattttcagtgaagcgctccccgcagcctgcggcgcggtggttgctgcgatcacgctcgcgattctcagtcacttcatcaaggaaggagtcggaaccgctgatttccgcccggaagacgcccaggtggatctgaagaatttccatatcaacccgatcatggcagtcattccgattgtcccgcttttccttctggtgattgcctcgaaggaagtgggctggctcccgacaaaaactttctcggttccggtctgcatgctgatcggcacggctcttggcctgattgttgccattctgcataaacaggatccgggagaggtctcaaagcagttctgcaagggcgcgggggatggattcaataatgtagtgatactgattgccgcggcatcgctttttgccgcaggtatgaagtcaattggccttaccggttctctgattgatgccatgaaagggtcgcagtccgtcgctatggcgtcagctgttcttggacctttcatcatggctattgtctgcggatcaggaaatgcggcagctctcgcttttaatgaagcgatcacgcctcatgcggctgatttcggtatgaccattgttcagcttggcgctgttgctcagctttcggccggtatcggccgcacgatttccccgattgccggggggttgattgttctttgcggcatcgcgcatgtgaatccgatggaagtggtgaaacgcacagcgcttccctgcgtccttgccttgattgtagtaaccgccgggatgtacttcttctaaaaatctgaaaccggcacacagagtgagcggccccggaattaactttccgggaccgctttttttaggaagtcttaaaacggagtcaatccagatatcattacaaagtgctgatcctttcctcaaaggtgctgagaagaatcgttatttcacgggataaactttacccaggatagggacgggtagaaggatcttcactgcttatccgcttaatttgaatgggaaaatgctgataatggctacgtgtccagtttttactcttatccctttccaagagggtggattgggaggaatccacacaaaggaatcagaggcataatcaggattattctgtgtctgagaagaatggtagtttgctttgtataactgattttgaagctggaatgtagcgtatccgtgcttatgcaaaaaatgtaatttctgttggactttggctctatgtatttattttttaaagaaatttaatatatagggataggatattgttatgagatgtttgatactgggcggcactggttttttgggagttaatctaaccaatttactgataaatttggggaatgaggtaactgttttcagttcgggcgcgaataaagattttcttgactatggcttaaaagccaagtttgtttgcggagactttaaagacagaaatttaatagatactctgagcaggaatgggtttgattatatatttcatttgatcagtacaaccaagccttcaaatttagacccatactccgaattcactgataatgttttgccgactattaatcttttggaatcggtcaaaaaatcaagtgaattgaaaaagatcatatttatatcttcaggaggaacggtatatggtattccggaaaaacttccaataacggaagagcatgattgcaatcctatatccttgtatggtattcagaaacttacgattgagaatctttttttctattaccaccaccaatacggtcttaattatcagtcaatccggttgtcaaacccctatggaccaggacagccggcgtattccaatcagggtgttatcgctaatttccttcggaaagctattcttgatgagcctatagaaatatgggggacgggcaatgttatacgggacttcatatatatttccgatgtattggaagcttgtaaggcctgtatgaattattcaggaaaccaaaccgtatttaatataggatccagtcagggagcctcacttattcagattatcggatatatagaaaatatcctgaataaaaaggtggaaattgtatttaaagagggaagaaagcaggatgtaccagcaaatgtcctggacatcagtcttgcccggagggagctgaattggaggcctgagattgagctgccgcaaggcataagactgatgtttagttcctggtctgcttcaaagcataaatttatgatttaacacttatccgtaaaaagcccggtgcaggttctgatcaaggctggactgtcttcggggcaaggcaatctatataggacagtctgtaaaaaagttcactgaaatgtttggataggtagatctaatgtattaaaagaagagggtgtgtaattttttgtgggcggctcgttc

SEQ ID NO: 1383 - DNA, 2213 bp, Unknown
  gut microbiota DNA sequence
gtcaattgatggcgcagaaaaaaggcgtgatgtcggatgctcagtcaatacggatccgtattgtaaaattacggattcggattgatagataagaatgagcgagtgatgacgaacgaccgggagcgatttctccgctttatgcgggcgatgaacacgattgacggcgaatacgccgccctgatgcacgggctccgcgtgaaggagagcctctttgtgctcctttacgcgtgtctcgatgaagcgccgcgctctcaaaaagagatctgtgacgagtggcggatgccgaggtcgacattgaacaccgcggtgcttgaggaaatcaaagcggggaacgtgactctcgtcccctgcggtcacaaagaaaaactcgtgacattgacacgcaaaggccgcgcgtacgcggagtcgctgctccgtccgattctcgacgcggaagcccggatcgcgcggaccgcgctgacggatgccttcatcgcggaactggaaagcgtggggcgggaagcgaaaaccgcgttttcggcggtcggaaaggcgtcggctcaggcggagtctgaaatcaattctcttaatctggagcccgcccgatgaagcacccaagcacgctttataagaaactcgtgcggggagtgcttcttctcgccttcatcgcggtcgccctgatccttgggaaccggctcgggatcctgagtcactcggtgaaaaacgcgggtctcgtgatcctcctctttgtctgcaacatggcgctcgcgctcggtgcccgccacgcgatcgagcgcgcggtgtggccggaatcgtggaagcggggcggggcggccgggcttctcgtgctctgcttcgccgcgcttctcttcgcggactccgatatcacggatctcatcatcggggagaagggggacccggtggatgaggcgacggcgcagctcgccgcggccgcgacctgggtgggggcgtacgtcgtcgcctggaaaccgttcctccgccggaaagaaaaccgctatatctcagcctgcgtgtcgctgacacttggctgcatcgcgttcgcgctcttcttcgtgagtctctactcaaacgcgctccttggtgttgtcgggtggaaggtggagtttgtgcgcttcgcgctcgcgagtgtggcgttcgcgtcctcgatttccgccttcatcgtgcagtgggatacgcgggaagtgcggcggcggaaagaagaagtggagcggctcgtcgcggaccgggtggagatccggtactttgaccccgcggatgatctcgacgaagcggaacgctttgccccggtcggggtgaggctggaaccggggaacgaaaacgcgttccaggcctggaccgcgggacgcgacgcgatgtgcgaagcgctcgtgcgcgcgacgcatttctacggcgcgtattaccagggcaggctcgccgggttcctgctcgccgaacggaagggcgagcggcggccctatcagatctcccgctatacgttcttccactggctctatcagcggatccaccgggagcttcatgggagcgaagcgatgtggttcgaggaagcgaagtcagaagtggtttcctctgtcactccggtcccgaccgcggagattcttctcttcgcgaccgaccccgagctcatggggcgcgggatcgggacgaaactccttcagacctttgagtcggactacaagggagaacgcgtcgtcgccgcggtggatggggcgacggacaccgcgttctttgaccgccacgggtacgtggaagcgggatcgaaaaccgtgtctgaggcgctgaggcccggagacacggagatccgctgccgcgtgtttatgaaagcgatcccggctcccgatgagaccggtgagtcccccgaaaagaaagcgaaagacgcggagcggctcctgggtgaaatgcggctccggttccggcactgaagccctttaaacacaaaatcaatcccctttagcacaccgtgcgtcagttaatggcgcacggtatttttgtgtttgataaacgtcacaatacgcattcccgtgcccaagatcgcaatacccttgattcccgtgagtcatccaattcagtactgactacaataacagtgaagtgagaggaggtaagagaaagaaaatcccttttgaataagagagtttcagggttttgcggacaggaaaagcagaatccggttcgtgcggaatttcggttaacccggagtgaggctgaactgggtt

SEQ ID NO: 1384 - DNA, 12057 bp, Unknown
  gut microbiota DNA sequence
aagtaggtcactgtcaggctcccctttcaaaaccctcgaaagttttctttcgagggttttgttttatgtgcttttggaaacccggacatgaaaaaagggaggagcattcgctcctcccttctttcgggtttcataaatacctctacgcggtttccgctgcgtcgttcagcgtagtgagttccttgccttcctttttcatgcagtcaatcaacgcgcgggccgctttggaaacgtaccggttgctgcggtagacgacgcggatatcggaatccggaatcttcggacggatcgagaagaaccgaagcgggaacttaggcgcgaaaagccgcgcgagcgtattggtcaccagagtcggcccgaccttttcgtctgtcagggcaaggcaggtcgccagatcgccggtttccagcatcaccttgggcttcacgtgagcctttgcgcagagatcatcaaagacagagcgcatccgcagatcgtgtttcacggtgacgaacggttttccgtcaaagagcctgaagtccagaacagggtaggacgacgccctgttttcaactgcctggctgcacatgggatcatctgcccggagcgcgatcaggcactcttcggaatggagttcctctgtcgtgatgttgggcaggtttctcggattcggaacgatggcgagatccagtctcccgtccgcgaccgattcttccagatccacgccggaaccctgctcgatcacgagctccactcccgggaattccttcatgaaaggaggcagggcattgacgaggaagtacccttcaaagtactgaggtgtaccgacaacgagccggcccgtaatgccgctccccatatcgtgaatctgaacccgcgagagcgcgcggatcttattgacgttcttttcggcctcaatccagcattccccggcgggtgtcagccgcaggggctttgccacgcggtcaaccagcgtagcgccgacgtctttttcgagacgcatgatgaactgagagagcgagggctgagagatgtttaggcgcttcgcagctctggaaaagctgccagcctcgagaagtgtctgtatatattggaaaggtttgtctgccatggtcacagttgtaccaaagaagaatgttcaacccctatacgaccccctaaatccattatagatttttttctattttgttataagtttgtttttaagaattaacaattaaattcaattctgagagcattgatcctatcgccgcttctcttggtaatacctcgaaaacccgtgcttttcagcgagatttttttttgaaaaaacgctacatttactaaaccaaaactctgtttcgcccttaaaaccgggcggcttgaaaagttctaaggagatagataatgaagcgtcgtcaattcctggctcttgcctccagcgctgctgccgctgccatcctgactgcctgcggtaagaaagaagccgcctcttcggctgccgccaccgctacggcgggttcgagcgctgctgccggcaatgtcaccatcaaggtcggcgcgactccggtcccgcacgctgatcttctgaaggttgccgcgaagaacctcgagaaagaaggcgtcacgctgcagattgtcgagttcaacgattatgtccagccgaacacggctctggaagacaagtcgattgacgcgaacttcttccagcataagccttatctcgatgacttccagaagcagcataagactcacctcctcgccctggccccgatccatatcgaaccgatcggtctttatgccagcaagagcaaggatctgaagaacatcaagaacggcgctacgatcgcgatcccgaatgacgccacgaacggcggccgcgctctgctcctcctgcagtctgccggcatcattcagctgaagaagggcaccggcatcaacgcgacgaaggccgatatcgtctcgaacccgcataacgtcaagctccaggaactggaagccgctcagattccgcgctccctgaaggatgtggacttcgctgtcatcaattcgaacttcgctctgaccgtgaatctgaacccggtgaaggacgctctcttcattgaagactccaagtccccgtatgcgaattacctcgttgtccgccagggtgatgagaaccgtcctgagatccagaagcttgtgaaggctctgcagtctccggaagtgaaggaatacatcgataagaacctgaagggcgctgtcgtcgccgccttctgatcgttctgccgataaaaagcttcagagcaaaagaagcgcccggatcctgatggacccgggcgtttttttaaatcccagacgaaatttctgcttagtaggtcataacggccggcagagtcttcgcttcttcaacccacttggcgacttccttttcggaaaccgcgccgttcgtcagattcttggcggcattgacctcagccatcttttcggcgaggttcttcgggacgcggtgcgcgagttccttcaccgtatcaacaccggccgcttccagcagttcggcgtactgaggaccaacgccgttgatacggcatagatcagcatggttcgtccacgtgagaatcagctttccggaaatacccgtggcctcttccagctccgcacggcccgaacgggtagctgctttcttcagcagatcggcagaatccttgatgcccgcttcttccagctttttggcgtaagtttcgccaacgccttcgatatcaatcattttgtaggtcgtcatttccagatttccttatgaggtgatgggatattaatcactataaatcttttttctgtattacggtaatgcattttttgcaatttcctcctaaaaaatcctcttttaattctttctagtaaactcacaccattctctttagaggtacgaaagaagtgaaaaagaagaagctgagcctcggggggctcccggatatcggtttcatggatcaggatgctggcagccttccaggggctttcggggacaaggcagcgccgcggccggctgccgtgaaactgaagaaggaacttgccgcgaagaaggtggctaaagcagagattccagccgaagcaaagaagacgttcgaccgcgtcgcgaaggcgctcgaggaatttgattccgccgtgaagaagcacgcccgttaacgggtgggggtcgttttttcatcccggaggcaaaaagaaagcccgcggaatttttcccgcgggctttggtctgactgaaggaatcagacgctgtgggggcttcaggccgcagcggcgagcagcacgtcaagcgccttcttcagatcggcgtccgaaatgttaagcggcggaaggagccgcaccatgccgccatgagcggtcagggcgagaacgccgttctccatcatcttcgcgacgacttcattttcagacttcacggtcttcacgccgatcatgagaccaaggcctgagacacgctcaataccaggtttcccggcgagatactccttcacgaagttccccttgcgggtgacttcggcgaggaacttatcgtcgagacgcttcagaatcgaaagagcgccggcgcagacgatcgggttgccgccgaaagtggaaccgttcttcccgggggtgaagacattttcaaccttcattccaagcattgtggcaccgatcgggagaccgccgccaagacccttcgcggtcgacaccacatcaggaaggacgccgtagtgctcataggcatagagcttaccggtgcggccgttcccgcactggacctcgtccgtcatgaaaacgatatcttctttttcgcagagttcagcgacacccttcacataggcatcggaaagcgcccggacgccgccttcaccctgaacacattcgatcaggatgccggccacgcggttctcgcggacaatctgcttcagcccttcgaggtcatcaggctccgcgtggacaaaacccggcgtcagaggcaggaagtcctgatggaacatgtcctgtcccgtcgcggcgagagtcgtcagcgtacggccgtggaaggagtcccgaagcgtcacgatggtgctccactccttgcctttcttcgctgccgcataggcacgggccgccttgatggcgcattcattcgcctcagcgcctgaattgctgaagaacaccttcttaagaccggtgcgttcgcagaggaactccgcaagttcagcgtcaggagcggagtagtaaaggttcgaggtgtgctgaaaacggtgaagctgcgtctgcacggcttcaatccaggccggatccttctggccgaaaatattcacgccgataccggagccgaggtcgatatagtgcttgccgttttcatccgtgaggatcgatccctcaccgtcgacaatctgtacaggataccgggagtaagtattcgcaatgtactgagagtcaagcgtcttaatgttattcgtcatcagtcatcagtcctttcatcattcttattggccgtgtctttctcagccttctttttcttaacgatcatcgtgcccgcaccggtgtcggtgaagagctccatcaggacggaatgggggatgcgtccgtccatgatgatcaccttcgaaacattgttcttcagcgctgtgatgcagcattcaatcttcgggatcatgccgccggaaataattccggagccgatcattccttccgcttcttccatgtcgatcagcggaatgagcgaagtgggatcatccttatccttcagcagcccctgaatgtttgtcatcaggatgaggcgctgggcgtggagggctgaggcaatctttgccgcagccgtatccgcgttgatgttgtagacgtttccttccttgtcgcagccgagggacgagatgacggggatatagccgcgctcgagcagatcccggatcggaaccgggttcactttcgtgatttcacccacgtagccgagcgccggatccttcatctttgccgtgatcatgcggccgtccatgccggagaggccgatcgcgctcccgcccttcgcttccagataggtgacaagggttttgttgatcttgccggccagcaccatctgggcaatctcaaccgtttccttatccgtcacgcggaggccgttcacgaactgggattccttgccgacccgcttcagcatgccggtgatttctggtccgccgccgtgcacgagcactacgcggactcccacgaggtgcagcagaacgatatcctccatcacctgctgctggaggtcctctgtcagcatcgcgtttccgccgtacttcacgaccacggtcttgccgtagtacttcttgaagtaggggagtgcctgggtcaggacttcagcccgatccgcattcgaaaaagcagttgccatttttctgtctcctccgctgatcatgtccgatagtcgccgttgatcttgacgtagtcataggtgaggtcgcagccccaggccgtggctttgccttcgccgtcatgaagatcaataaggatattgatttcgggttcgagaagcactttcttcgcgatgtcttcggagaaggggataccggctccgtcaacacagaccggaatgacgccggctttcgattcgaaagagagttctaccttattcacgtcaacatccgcaccgctgtagccaatcgcgcagagcacccggccccagttcgcgtcagcgccaaacatggcggttttgacgagcgacgaagtaatcacggctttcgcggcgatccgggcatccttatcggtcttcgcgccgaccacccggcattcgagcatcttggtcgcgccttcgccgtccccggcgatcatgcggcagagatggatcgtgacggtgttgagtgcttccatgaaagccgtaaagtcagggccctcggaagtgatcggctcatttccggcaagaccgttcgcgagcagcagcacgtgatcattcgtcgacgtgtcaccgtccacggacgtcatattgaaggtcttctgcacatcgtgcgatagggccttctggagcatttcagaagtgatcgcgcagtccgtcgtgatgaaaacgagcattgtggcgagattcggatgaatcatgccggagcccttcgcgatcgcgccgatgtggcaagtcttgccgcccaccgtgaattcaaccgcgatctgcttcatgcgggtgtctgttgtcagaatgccctgggatgcgtattcgccatgctcctggtcgcgggcgaggccggcaatcagagaggggagaccgttcacgatcggggtgatgtcaaggggcttgccgatcacgccggtcgaggagacgcagacgtcctcgggtttgagaccgagctgcgcggcggtgatttcagtcatccgctcagcgacctcaacgccatcggcgttgcaggtattggcgttcccgctgttcacgataacagcctgcgcgcggccatccttcaggtgatcgcgcgtcacgaggagcggagcgcctttcacgcggttctgggtgtagaccgcggctgcggtgcagggcacatcgctcacgatcagagtgagatcgcgcttcgactgattctttctgatgccgcagtgaatgccgttagcccggaatccgagcggcgtgcagacatttccggaagagatcttcaacatgtcagtgatccttctagcaaaaaagggtatgcgtatgacctgcctgcagcctgtgcccggaagtccgggcggctgcttgaggtccgcttgaaaataaagttgcttttagccggtgcgcgtatatcagacaagcctgaggccggtctcgggcgcagcgccgattacaaggttgagacactcgacagcggcacccgatgctccttttccaaggttatcgtagcgcgcggcaagaaggatgcggtcttcgttaccaaaaacagacacatccattctgtcgagtcccgagagggaaagtgcggaaaggaatccggactcgtccgcattttcccggtacgagacgatggggcctcggtatcgtgactgatagactcgtcggatatcttcaatggtggcgccgttcaggagatcctcgcggaaaaccggaacggtaacgagcatgcctgagtagaagtcgccgacaatcggaaggaaagcgggcagcgtatgaagcccggtaagggctttcatttcaggaagatgcttatggtgctgggggagggcgtaggcgcgcggcgcgtcgaggagcgggctccggccttcagactcgtactcggcaatcatctttttgccgccgccggagtatccggtgagcgacgtgatggagagccgcgcgtcaggcgacagaattcctgcttctacaagcggagagacgagcgcgatgaaaccgctcgcgtggcagccggggaccgcaatgcggcgggaggtccggatcgcttcttcccggccggagccgagttcagggaatccataggcccagccaggcgccgtgcggtgcgcggtgctcgcgtccagcacaatggtattgggattggtgatgagacttaccgcttcaatggcagccgcgtccggcagacagagaatcgcgacatctgcgctgttcagcgcgttgcggcgggcttcagggtcctttcgggattcttccgggagcgtgataagggtaagttcctgacggccttctagccgctcacggattcgcagtccggtagtgcccgaacttccgtcgataaaaacttgagtcattcctgccttcttattaaagcctgcccgggggaaatgtggccctgacaggagtgcttgtaaagatgactgttttggccgaccgcggaaagctgacacggcgtacggctgactcctggggtacttagcccctgcctcaagacatcgtctgtttaagatacaagttccataaaaatgtgtagagaaggcagggtattcaatcttgatcgatatcaaacaaaccggaatagaggggggttttaaagcctttcaggggatgtaattcaggattacccgtactatagtaattgtttttacgggtttaccctctaagaggtaaacaacaattacgtttgctatatgaattttccttttgttccgcctgcctccaatgcagccactctccgatggaagaactggattgcgatccatttcctcataaccggcgttgctgtgctgacactttcaggtttctcatccgtcatgggaatctgggtgctggaagactatggcctgacgctgagcgcgccgggctgggagctgatgcggggcgccaaagtggtgggggagattctgtcgggactcggcctcgtccttttcattattggtatctggacgggaaaaccacggacaaagcctggactctggctctcatgccttctcgcgctttggctcgcggtcacggttcccgggccggggtttgagccggtgatcgatgcggggcttccggtccccgtttggtgcgctctgacgtcgctcgccattcttgtgttcacgctccgtgtcgcgacagggagccgtcaggcgctttcagtcgccatcggcaccgcagcggtgcttggagcgctgagtgctgagaatctcgcgccggtgctgctgggaatcctctttatcctgctcggaagaacgcggtccgcgcttctcgcgcgtgaggagttgctcttcacgctcgcgaatccggatcgggagacgctgaccggttttgtgcttcagggagtagggtacggaattgttgtgctcggtgccgccgcctggtattcctacagcgcctactccaatgagcacttctctgtttcccttctgattcagggaattgtgatttttctgatcggcgcggttcttctccttatccgccccgggaaaaagtccgaagcaaaataaaaggctgattccgcgcgttgcggaaccagccctgtctgcagaaacctcggcggactacttcgtcttcttcgccttggccttcacatccttttcatactgaatgagttcattcagatattctcccggcgtgtcgctgcaggacacatacagccggtcaaccgcacgggtagcagccacgtggaagagcgcgcgttcagaccgcgcggcttcttcccggtcatccggatccggcgattcattcagcgtcagcgcgtcagggatgtttccttcatcggcgcccacaatgaatacagcccggaattcaagccccttcaggcgatgcagcgtcgcgcttctgacgccggccgcgttcgggtcatccggaatgtttctcgaaatctgcagcgtcttgatgccgcgcttcgagagcgcgctctgataatcgtcaagcagactgtccgttcgggcagcgatgacgatagaggagagcgcgaggtcgcgttccgtatcgatcaggtgatggatctgacggacgatccagctcacttcgtccgtgaattcctttccgacatagagttcggggagcggtccgtggcggagggtgatctcgcgctccttatccttatcggattccttcccttcgttcaggatgtagtccgcggcacccgcgatttcagcggtcgtgcggtagcttgtcgtgaggaactgggaccgtccgcccttcacattgatgccgcaggcggcaaaggacacatcgcggccgtaaattctttcacggctgtcgccgacaaggaagaggtcgccttcgacatcgcggagttcagggtgcttatcgtggtcaggcgtcagagcccggagaagcttcaggccttcgggaccgaagtcctggatttcatcagcgataacggcgcggtacggtgctttttcagcggtgctgctgcttgtgagaaggccgatcgccgcgtagtaggcgtcaggcgccgcgaccttgccgcgggcgaaaagctcgcgcctgaagttctcaaagacgggccagatcgcctcgcgctgttcagcagtgagtgtcgaggcatccgacttcatataggtcttctgaatccggatgttattcgggagcacatgacgctcgaattcctcgcgcgcttcggcttcggtcacaccttccggaagcgtttcggtcgcggctttccaggcgagttcataaatcggcttccccggatagatgatcgcgggtttatagccgttgcggcgaaggaatgccgtaacccagccatccaggtttgtcacctcaatcgtattgatccggtccgcgcggacgagcctctgcagctgttcctcgatatcgaccgcgaggttacgcgtcgcggtgacgaaaagcagccggtcatcatccttccagtcggggagttcaacaaggtgcttcgcgcggtgcatggcaaccacagacttaccggtgccggcgccgccctgaacaaggagcgctcccttccacggtccatcgacaatcttcttctgctcgggattgaggtagaggcggatcttgcccatctgggattcggcggagtggtggagcttcgcgtactcacgcttcacagcggaccattcagccccatccacgtaccaggtgagactctgataggtctcagccggaatttcgcttcgagaggcttcaagatcgtccttgttttcgagatcacgcacgagcggcagcttcgacttgggaagcccgatcgcaatcagctcttcgtcggagatatccgcgaaaagcggagggggtggaggcgggacctcttcctcatgcttcaccgcgccgggtctctcgcagagtctgaagtaaccgccggtttttgcctcatcgttcggaacgaattcgtgttctgccgcccattcaaacgctgccttcgtccagttggcttgggcgatgatcttaagatccggggcgggttccgcgacaacgacgctccaggcggagttgagagtaaagatccggaagccctcaggcacttcctgggactttctttccttatagggaatctcttcgggattggcagaaaagcgggagataaatgcgaatagatccgtctgaatgacggacggcgcgctggagagtgcctctaccagctgtggaagtaggaaaatctggacagcgcctgcttttgaatcagtcatgactgctccctaatttgtgatacttcggccgcaaaagaagaaccgaagattccactatctgctaaattcattgtacacaggaaaaaaataatttcgaaactatctcctgataaggggatgggaggtcgcatgcgggttgttatcacgtcgcggggcttcgcggaaaaaggtgaatttcaggggtcttcttcccccaatgaccccgaatcgatcctccgggaggcgggtttcgaagtggtgaatctttcctctgccgggttcggtgcccaaagtacggagaatgagatttttgaagccctgaaggacgcggatgcggcgatcgtggggcttgagccgatcacggaaagcctgatccgaaggctccccaagcttcgcgccgtgacgcgtcgcgggatcgggtatgactccgtcgatattgacgcctgccgggcccgcggtatcacagtgatgcggacgactggagccgtggaaggggccgttgccgaacatgtgatggcgtaccttctttatttcgcccgccgtctggatcttcagaatcagtccatgcagtcggggcactgggaacggatggcgatgccggggctcgccggttcaacgctcggtctcatcgggtttggcggaatcggaaaggaaatcgcgcgccgcgcggcgcctttcggagtcaggattctgtatacctgccgtcatccggatcctgcctgggagacggagttcggggtctcctacgctccgatggatgaactcctgagagaaagcgacgcggtatccgtaaacgtaccgctcactccggctacgcgggggatgattggcgaggcggagctttcgctgatgaagcctgacgcggtgctgatcaatatcgcacgggggccggtagtggatgccgcagcggtgaggcggcatctcgatcagggaacgcttggcggggcggctgcggatgtttttgatcatgaaccctgcacagactctcctctgatggggtcagaaaaagccgttctgacgccccacacggcgtctttcacgaaacggaacgcggccggcatgaatatcagagccgcgaggaatatcgccgagtgggcccgcggaaccctggatcccaaatatgtggtgaagtaaaaagaaaaggcggaattgaactgactcccatttttaggacacacctaaaaa

SEQ ID NO: 1385 - DNA, 194 bp, Unknown
  gut microbiota DNA sequence
ttcttccgcatatctacgcatttcactgctacacgcggaattccaccctcctctgacaaactctagccatgcagtcacaaatgcagttcccaggttaagcccggggatttcacatctgtcttgcatagccgcctgcgcaccctttacgcccagtaattccgattaacgcttgcaccctacgtattaccgcggct

SEQ ID NO: 1386 - DNA, 41416 bp, Unknown
  gut microbiota DNA sequence
tgatgatttgatatgccgccaggcttaccatcatggcggccttcccctcaccataaactttcttcaaatcatcagttaaacccgaggtttctgctgcttgagtaaggagtgcggttgttccgaacgttttgtcatgatcaaatttctgacgcttatcagtggtctttttgacacgggtcagcttcagctctgccgcataagctgcgttcggaacaaattttccatcaacaagcttgccaatatatcgccttttttgttggccccgctttttttctttatcccaccaatacttatggattgcaacgtactctgtgtctttgattcggacaatacgcgcatcttcgggaaggatcggattgtgatcagtcatatcgcaagggctgcaaaagagattatatatgtctatattatacgtatgttttacctataaatcaaccctttttttaaattttctatttggaaaatcaatagacttttgttaaaaaatacagctaacagagcgggaatttagggttcccttttcgcttgcggataatgcagttttgagaaaggtaaggaatttgtgcctttttgcgatcagactggcgcttttctccgtgaagatccccgaaaaccccggattccgggcgcttctctgttaccgatcagaaacaaaatgcgtcacgaaactcacgccctttcccctagaatggtcttcagaaccgaattgattttctgactcaaggatcagcgccatgaaacgcagaactcttcttaaggccgcggcagcgttcccggtcacactgctttctggctgcgcggtgtatgacgatgggctttacggcgggtattacgagaccggggtgatttaccagccggtgccgcatccgccgcctcccccgcatcctcatcctgtgccgccaccgccgcccccgcgtccccatgtggcaccgcctcctcctccgagacccgtgccgccgcctccgaggccggctccgccgccgcactttgctggccccggtccgagaccggggttccgaccggcacctccgccccctgggcctcaccgtcccgtggatccgcggatgatgcatcggtctggcggtccgcgcccgatcggtcctggcagaccgggaccgggtttccggaatcctcccggacgccccggcggccccgggatgggtccccgcccggggtctggtcctcgtccggggccagcgccccggtcggcaccgaaaggccctcatggtcccggtgaaccgccgcctggctttccccgctagaggctgaaacgacaaggcatccttctaccaaaagaaggatgcctttgttttttgaactgtccgaaatcccgggccagactcagaaactgctcccccgtccggtgacaggcgggatcgacgcccagaacgcgcacttatgttcacccgcgaagtacgcggccgggcgcgtgccggtctttccaggagcgagcaccatcacggcgccgtcttccttataggggccccacgccgggacgcctttcccgttcgggtctccggtccggatgaagttcccccagtacgcgcggatcgtttccgcgagctgcttctgatccggcgtcatcttggatgcgagcgcgaggaaccgcccggtgtcggggaagaggtacgagagttcagaaccgtggctcgcgccggtcttgtagccgggatagcggggacgaagaagcgtcggcgcgttctcatcctcaaacgcgtagaaccaggaggtgacatcagacgccgccgcggcccgcgcgagcgtcaggctcccgcagccgccgagaccccgcatgccggaatccgtcatgaagtcccccatgatgtaggggacaccgtacgcctcatccttctcatacttatcacccgggtactcaacctgagccttgtaccagttgtcccccacgagcctcttcacccagaccttataggcgtcctcactccacccggtgaagaccgacgcagcgtcccgcgcctcgtttttattcgaccccgagaggagcggcacacggttccaattgcccttactgatctgctcgatcccggggacttccgacaccggagcccaaaggccggatgaggcgctcgcctcggcgatcttttcagccggaaccttcctcaggcagtttccgactccgctctcaaagtcgcagcccgcccgcttgataaagaattcactccggcgcttcgccttcgcggggcgctcagaatcaaaggcgcaggtgtctgactgaatcaccgcctgatggaagagccccttcgctttcgggtccacgagcatccggcagacatcggtgccgccggaggactctcccatgagggtcacgcgatccggatctccgccgtagcccgcgatcgtctttttcacccagcggagcgcttcctcgatatcggtgatcgcgaagttccccgaggcttccccgaattcggggagcgacaggaacccaagcgccccaagccgatactggaccgccaccacgatcacaccggattccgccgcgagccgcgacggatcctgcgctgaagcgcttcccgtgatattcgcgccgccatggagatacacggcaaccggaagcttcgcgtccgacttcgtgccggccgggcggtagatatcggcgtagaggcagtcttccgatcccccttctggctgcaggcacggcgccgcgtgccactcggcgttccggacaccagtccagtttttcgcgggagccgcgggtttccagcggagatcgccgaccggcggctcggcgtacggaattccaaggaacgcgtccgccgcaaggtctgtgccgggaagcgtccgcgtgatgccagtcacctttccctggaccgtgtccgcgactggggcggaggaagcaacagtgactgagggggccgcgcctgaaactccggccgcgagaccgagcatcccggctgccacccaactgaaccacgttttccgcgtcatgcttatcttcctcctcgtgaaacacaaaaaaaccggctggaagccgcccccttatattaaaagagaagacggactgccaaccggacaccggagtctgtcggaaagtattgctgttttgaagtcgggttacgggagtttcgcgtagtcgtcgtccgacaccggctcacaccactcggtacttgtcttggtgcccgggaccccgatcccgatatgctggaaccagctgtccttcgccgcgccgtgccagtgcttgacgtttgccgggatattgacgacgtcgccgggcttcagttcccgggccggcttcccccactcctggtaccacccgcgccccgcggtgacgagcagcatctgcccgcctccggtttccgcgtgatggatatgccagtggttgcgacaccccggggtaaaggtgatgttgctcaccttcacttgttcactcgagagcgccttccggtagctctttcccgtgaagtactgtccaaagggattctcttcccccatcgggaagacactcagctcttttacttcttcagccatttctcaccgctcctcatataggttttctttcatgcgctgaatggcgtttctcgcgaaagagggcggaatcgcttccgcccccctcctcctctgttctttcttacttcagagcgtcgtaatcggcgtccgacaccggttcgcaccactcggtcttcgcgccttcacccggcacctcaatcgcgagatgctggaaccaggcgtctttcgcggcaccgtgccagtgcttgacgtttgccggaatattcacgacgtcacccggcttcagagcctgcgcgggcttaccccactcctgataccagccgcggcccgcggtcacgagcagaatctgaccgccgccctgcgtcgcgtggtggatatgccagtggttgcggcacccgggctcaaacgtgacgtttccgaccggaacctgttcggtcgaaagcatcttgaggtagctgatccccgtaaagaacttgttatagggattcacgtcgcccgaatcgaacacactcatatctttctgatctgccatctgcttttctccaaaaagtggccgggaaccggctaaggggtctgaaagcatctctttttcccgctctcaaagcaccggttaccgctcctaaagaattatcagtcgggcgggatccccgatttgccattttttctcaattgattgtcagttcctgtccccgaatccgtctttcattttttgcaatcacttcaatatgtgataccgaaatccgtctcccccgacttccccttttggaggagaatgcggggctgtttttccgcttcgctgtggataagcggaattcctgatatgccatatctggtccggagactttccgggtccggctatttagtttccggcgcctgaaaaataaccccggctgatcaaaaactcatcagcgaaatgtggaaaaaaagcgccgcttttcaccccgctgtgaacaagatttgaaagcgcctgaatcaaaaaaggaaaatttccacaccgggctttctggttgaaaaaagcaccagattatgtatcattaacgagttccatcaacaagatttagttggctctttgaacagatgccaggagacgcagagtgaagatcatcaagcgaaacgggtcggaagaagaattcgaccgccagaaaatcaaaaacgcaatcgctaaagccaatatctccgatgacggcaaagccgagctgaccgatcgtcagatcgattacatttcgctcgtcattgaagaccactgcaaagaactgggtcacgctctctccgttgaggagattcaggagctcgttgaaacccacatcattctgcagggcgctcctgagaccgcaaagcgctatatccgttaccgttttacccggaatctcgtccgtgagtcgaacacgacggataacaaaatcctctcactgatcgaacgtaacaacgaagaagcgaagcaggaaaactccaacaaaaacccggtgatcaacagcacgcagcgtgactatatggcgggcgaagtgtcccgcgacctgtcggcgcgcatcctgctcccgaaggacatcgtgaaggcgcatcaggaaggcctgattcacttccacgactccgactactacgcgcagcacatgcataactgcgacctcgtgaacctcgaggacatgctgcagaacggcaccgtgatcaccggtacgctgattgagaagccgcacagcttcgcgaccgcctgcaatatcgcgacgcagatcgtcgcccaggtcgcgtcgaaccagtacggcggccagtcgatcagcctcgcgcacctcgccccgtttgtgcagacgtcgcgcgaaaagatccgcaagatcgtgaagtctgagatggagtcgatcggtttcgagccgaatcaggaacagctcgataagatcgtcgaggaccgcctgcgcgacgaaatccgccgcggcgtccagacgattcagtaccaggtggtgacgctcctcacgacgaacggccaggcgccgtttgtgacggtcttcatgtacctcggcgaagcgaagaacgaccaggaacgccacgatctcgcgatgatcatcgaggagacgctccgtcagcgtatccagggcgtgaagaacgagaagggtgtctgggtgacgcctgccttcccgaagctgatctatgtgcttgaggagcagaacattcacgaggattcgccctactggtacctcacgaagctcgccgctgagtgcaccgcgaagcgcatggtgccggactacatcagcgaaaagatcatgctgaagctgaagaaggataagaacggcgaaggccactgctacacctgcatgggctgccgctccttcctcaccccgtacgtgaatgaccaggggaagccgcagtactacggccgctttaaccagggcgtggtgacgatcaacctgccggatgtggcgctctcctccggcggcgacatggagaagttctggaagatctttgatgagcgtctgcagctctgctaccgcgctctgatgtgccgccacgagcgtctgctcgggactccgtctgacgttgctccgatcctctggcagtacggcgcgctcgcccgtctgcagaagggtgagaagatcgataagctgctctttggcggttactccacgatttcgcttggctacgccggcctctacgaatgcgtgaagtacatgaccgggaagagccacacggatccggaagcaaagcccttcgcgctccacgtcatgcagcacatgaatgacaagtgcgctgagtggaaggcgaagacgaacatcgacttctcgctttacggcacgccgcttgagagcacgacgtacaagttcgcccgtgccctgcagcgccgcttcggcgtgatccccgggatcaccgacaagggctacatcacgaacagctaccacgtgcatgtgtctgagaagatcgacgccttcacgaagctcaagttcgagtctgagttccagcgcctctctccgggcggcgcgatcagctacatcgaagtgccgaacatgcagaacaacatcccggcggtgcttgacgtgatgaagtacatctacgacaacatcatgtacgcggagctcaacacgaagagcgactactgccaggtctgcggctacaacggcgaaatcaagatcgtcgaggatgacggcaagctcgtctgggaatgcccgagctgcggcaaccgcgatcagtcgaagatgaacgtcgcccgccgtacctgcggctacatcggcacacagttctggaaccagggccgcacggaagaaatccgtgaccgtgttctgcacctctgagccataaggacgccatgcactacgggaatatcaaagactgcgacatcgcaaacggtcttggcgtccgggtgtctcttttcgtcagcggctgcacgcaccactgcaaggggtgcttccagccgcagacgtggaacttcaagtacggtgacgtctacactcaggaaactgaggatcagatcgtcaagatgctggaaccctcttacatcaacgggctctcgctcctcgggggcgagccgatggaaccggataaccagcgggaactcgtgaagctctgccgccgggtgaagaagctctacccggaaaagaacatctggtgctacacggggtacacctacgaaacggatctcctggcacccagccgcgcgcgctgcgaagtgacggatgagctcctttcctatatcgacgtgctcgtggacggtgaattcgtggaagcgaagaagaatatcgtgatcgccttccgcggctccacgaaccagcgcctgatcgacatgaataagacccgggaaacgggtcacgcggagatccttccggatctgccgtaaaaaacgagaacgactgacacacagagaaagtcaaaataaattccaggaaactggatttacctgcgccgatacccgcgaagtgccggcgcttttttttgcctgttccctgaggagccggagtctctctttcacaggctccggttttttgctgccgcgttcttcgggaaccgcggcttccccctccgctttcttctccggtctcctcatctgaaggtaatattgaaagctatgctctggcttttcacgtcaaagaggcacggctcctggccccccgctcaggtcgcctcaaacccagcgcatacgacagataaaaaggatccagcatcatggcagagaacactccgcgtctttctttcacctgtgactacgaagaaggcgcgcaccccgcgattctgaagcgtctcgcggaaacgaatttcctgaaggaaccgggctacggctacgacgaattttcgctcgcggcgaaggataagatccgcgaggcctgcggcgctccgaacgccggggtctacttccttatcggcggcacgcagacaaacgccacggtgatcgacgcggtgctccgcggctaccagggcgtcgtcgccgcgaacaccggtcacgtcgccgtgcatgaggcgggcgcgattgagttcggcggccacaaggtgctcacggttccgcaggagcgcggcaaggtgtccgccgcggtgctcaatcagtcgcttctcgatatcgagaatgacggcagctacgagcacatggtgcacccgggtcttgtctacatctcgcagccgactgaatacggcacgctttacacgaaagccgagcttgaagcgatccgcgcggtgtgtgacgaacataagctcccgctctttatcgacggcgcgcgtcttggctacgcactcgcgtcgcccgcgaacgacgtctcgatgaaggatcttgcccggctcgccgacgtcttctatatcggcggcacaaagtgcggcgcgctccttggcgaagcggtcgtgatcccgaacccggacttcatcccgcacttcttcacgacgatcaagcagcatggcgccctcctcgcgaagggccgcgtcgccggtatccagtttgagacgctcttcacggacggcctctacgaaaagatcggcatccccgcgatccggaacgcccggaagatccaggacgcgctccgcgcctcgggttacgagctcctctttgaatcccccacgaaccagatcttcgtcgtgctcgagaacacccagatggcggaactcgcgaagtcggtggccttcagcttctgggagaagaaggatgacacgcacaccgtggtccgtttcgcgacgagctgggcgacgcgggatgaggacgccgatgaactcgtgcgcctcctgaaggacatgcgtctcgcgtaaaaagcgacccccctggatcccgtcccgctgaatccggcgggatcccgtcatgaagaaaggcctgagagacatgttctctcaggccttttgcttggaatacagcgtgaacggcgcttaatcgttcgtcatattcatgaagttctcttccacgcggacgatcttgccattcgtgtagtaagcgtcttcagagatgtagtgcagcgtcttcgcgaagccggcggcgaagctcgaatgctcttcatcccacagctcttccttcacggtgatgttaacggccttgccgatgcagacgccggtctttttgagtgtctcaagatcgacgagctcgcactcgatataggcaagcgcgtcaggcagcgtcttgatcccgaggacttcagaagtcaccggggtgatcttcgcccaggcgaacttgtcacccgaatcacgcccgtggatcgaccccacgcggttgatatccgcgatctggccttcatgcggaatcgcgaccacgaatttcccggtctcgataatgttcttcgtcgtcgtgtgaccgcggtccagcaccacgagcacctgatcgctatcgtacggcgtgttccacgcggccgtcatgatatccgccacgccttccttcgacgtggtagcgaccgtaacaatctgtccgccgcttgtgagacggttcgcggcgcggggcgttaacttcttatacatatgagctgccttcttttgttgtgttagcacgaataccaaaaatattacggcaataggaaaaaacagatgaggctttgaaacctcataggtttcgctccaccgccataaccgtttcctgagatacagaatttctcactcgtaataatcttaagcgtctttttccgctatggattttctgtatacggcacgggtatagttgtaaaaatgggggaaccgaatggaagcgtcagcctttgcctgacgcgaagggggcggaggtgaagagccgcttatccggtcttccgccgaggagagttttatgtctggaatcacaagaagaaaagtgctcgcgggagcggccgcggccgggctcgtgggggccgcgccggcgttcgcggccggcgtcacggaaaaatacgatgtcgttgtggttggctcagggtccgcggggtttgcggccgcgatccgcgcggcggaagcgggctcaagcgtcattctccttgaagtgaacacgtggttcggcggcgcgtcccgcgtcgcgaccggaatcttcggctgcgccgggcacccgatccagaaggcgctcgggttcaaaacgacgcctgaagacctctatcagctttatatcggcgaggccgcggcgacgcacaccgtgggagaaccggacgtcgcccggattctcgcggacggcgcgattccggctgcggactggcttgagtcactcggtgtccgctggtcccggaagaaggctcagaagttcttcctcaatattgaggaaggcgtccgtctcggtcaggtgctgatcccggcgctggaggcgaaagcgaagtcgcttggcgtcgcgatgcgaacccgcacccgggcgactgaattgatcacgtccggcggccgcgtcaccggtgtcatctgcaagaccccgaaaggcgtcacgcgctacgccgcgaaagcggtgattctcgcgactggcggattcgaggggaacccccacatgatcgcgaagtatatcggtgacggctgggatatggccgggttctactgcacccccgcggaccgcggtgacggtcagcggatgggagaagcggcgggagccgagctcgccgatatggatgtcttcaaagcgaaccccacgatccaccgctttgaggggaataagtacaacatgcgtcccgcggtgaacgcgggcgcgatcatcgtgaatcaggatggcgtccgcttcatgaatgagacgggcggctactgggaagcgaggaaaatctgggcgctcccgcagaagcaggcctgggtggtgttcggagacccggtgctcgccgcggataagcggcttccggggctcatcgcggcggggtccatcgtgaaggctgtcgacgcggccgcgcttgaaatgaagaccggtatcaacggcaaggcgctcgcggacaccatcgccgcctatacgaaactcgcagaaaccgggaaggatccggatttcgggcgcgcgaacgtgaagcccgcgtttggcggcagcctctacgcggctccgatctccccgatgatccaggggacgttcggcggcgtgaagacaaacgcgcagaccgaggcgctgagaccggatggctccgtgatcccggggctctacgcggtcggcgaatgcgcggcgtccggactccggggactgaacccgcagaccgcgaacgcggtgtttgggtcgatcgcggggcggcaggccgcggcctgggcaaaaacggcgctctgaggagggaagaaaatgaagaaactcatcacattcgcgcttatcgccctcttcgccgcgaccgccggtgccgcgacacagacgctcgcccagaaacacgcgaaggcaggcgtcagggggaatcccacgcaggaacaatgcatcgcctgccacggcgggagttacgaggcgctcgcgaagcagaccgccaacgtaaaaccgaatccgcacggctcccacatgggaccggtgcagtgcgacgcgtgccacaactggaaggggcgctcgaacctcatgtgcaacgactgccacagctttccgaagcttcagcagaagctccgcccgcagccgaaagtcattcagtaaagcaaaaagccgccggatggcatcttgtccgacggcttcccttgaaaatacaaagagcgctgtgattaccactcacagcgctctttatttaagcggattctgtgtgaccgagaaccccgctctccttgcttaactaagcaaaaagggtgggtgacatcaacctagttcgcttacttcacccatctttcggcccgaaagccgaagttcaagacggctgatgtcacccataaaagaagaaattccaggaacaaccagctaagcccggcccacgggatcaaagccatccaggagtctcttgaaaccattatagcgggcattaatgaaaataaatcaatactttggaaatattttcagtacacagaaaatattcaagcaaaacaattgaatagcgtgtatacaattgcttaacgagggtgataattttctgtcaatacccgcttgatccacggtcaggaagggattttacgcacgttttccgggggccttgaggccagggtatcccaaaattttgtatcagacgatacagccgtctctcgttcagataatcttttcagtcacatcactcagaaaattctcctgaggcatcggcatggttggcttaggcactttgatcaatatggcggcgattgccgcgggcggcaccgcggggctcgttttcaggcggtatctcagcaaatcgctgcagacaaacctgatgagcgtgatgggtcttgtctgcatgttcctcggcaccgcgggaacgctctctctcatgctccgcgtttcaggcaccgggcccgcgctgacctcgaccggctcgatgatgatggtgatttcgtttacggtcggaacgctgatcggcacgatcctgaagcttgaggatcggtttgagggcttcggtctctggcttcagcggaaggcggggcggaccggcgacaacggttttatcggagcctttgtgacggcttctctcacggtctgtatcggggcgatggcagtgatcgggtcgatccaggacgggatcgcgggcgactacaccgtgctcgccgcgaaagcggtgctcgactgcgtgatcatcctcatcatgacatccgcgctcggcatcggctgcgtcttctccgcgatcccggtcggtatctttcaggggcttgtgacgctcttcgccttcctcatcggtccgctcctcagccaggcgtcgatcgacgcgatcggactcacgggctcgatgatgattttcgcggtcggcgtgaacctcgtctgggggaagaaattctcggtcgcgaacatgctccccaccctcatcttcgccgccctctggcccgtcttcctctagaatcggaaaggaatcaatcttttgaattcttaaggactgggatcaaaaccagtccttctttccattatgacgatcgaaatccgctccgctctcccctctgaccttgacgcgatcgcggcggccgaagccgaaagctttccggcggcggaagccgcgacccgcgagtcgtttgagtcgcgtcttgccgcctacggaaatcacttctggcttctctttgtcgacggggagctcgcgtcctttgtggatggtctcgtgacgaacgacccggacctgaaggacgagatgtatgaagacgcgtcgatgcatgacgaatcaggcgcgtggcagatgattttcggcgtggtgacgcggcctcgcttccggaagcagggctacgcgggggaactcctgaaacggatgattgaggaagcgaagaaggaaggccggaaaggcctggtccttacctgtaaggacccccttgtccactactacgcgaagttcgggttcgtgaatgaagggttcctcgggtcgacgcacggcggcgtcacctggaatcagatgcggattacgttctagagcggcaattccgtttcaagcgggaagagatccggcatttcgtgcgcgagaaggaatttcttcgcggcaaagcccccgtcgtacccggtgaggcttccgtctgttccaagcacccggtggcacggcacaatcacggcaaacggattcagcccgaccgcggccccgaccgcgcgagctgactgcggcatccggagccgcatcgcgagctcccgatacgtggtggtggtcgcatagggaaccgcttccagcacctgccagactttcttctggaactcggtcccgtagtagatcagcggaaggtcaaacacctttctctttccgtcaaagtactccgcgagctcttccgccgcccgctcattcacggggtgatgaccgggagtgaattccgggttcttgaggtagcgccccagacgcttcatcacgtccccgtaatgatggccgtgcgtccagtccgcgatcaccagccccgcgtcgttcgatccgagaaggatgtcgccgcagggagaagcaaaagtttccgtgactaccacacctgccgtcataagcctcgagcctcccaaaccctaaagtctcaatgagaatgagtgtctattatccgcgactatcgcgaatgacgagaggctttaaggcgagtcaaaagcgaaactcctgctgcaccgcggacggaagccggatcccttcaagattaaggagatagcgcttcgcgtcgaacccgccgccgtaacccgtgagactgccatcccggcctactacccggtggcacggcacgatgatggagaacggattctcacccaccgcgatcccgaccgcccgcatggcttttggtttcccgatcgcttccgcgatttcgccgtaggtcgtcacgcggccaaacgggatcttccttaacgaatcccacaccgcggtctggaattccgtcccgagaaaccgaagcggtaggtcgaacgattttcgtttccccgcgaaatagtcatcgagctgcgacgcggtttcttcgagcaccggatccgtccctgactcgaaaaccgggtttccgagatagcggttcagccgggcgcggaccgtagcctcatgccaccccgccacccagtccgcctggatcagcgctccggacgtagttcctaagagcaactccccgcagggagtctggtacgtcatcgtgactacgcttttttcctccacttttctctccttccgggtgatcttttttccttacttttttcaaaaatctttggtaaagtttccaacgcttttgatgtggatatgcatccgatgttattgattttaatagcgaaaatagagtcttcgctattccaaaaatgcatatcgacgcgtcgaagcctaacctttgaaaacacctattaggatcaagaatactatgaagatctccgctcgcaactgcctcgaaggcaaagtcgtttccatcaagaagggccccgtttccaccgaagtgacccttgagaccgccgccggcgaaaagatcgtctcctccatcaccaccgcttccgccgagtccctcggtctcgacgtcggtgtcaaggctttcgccgtgatcaaggcttcctccgtgatggtcgctgtggagtaatccacacacgggtatgagtctccgacaaggagactccgcgatccaggccggttcattcgtgaaccggcttttttatttccggcaagtttctgagaaaaagacagacaccgcccggatggctgccgcctaaaattgatgataagaaagtgtctttgaacacaaataacaagaatttcagagaagaccggaatcgctccggtctcattggagatttttaaatgacagcaaccaatccgcaggctccgatgatcgggtcgaagaacgtcacgggtcttgatgtcccgggttcccgcgcgaaagtgttctttacgccggtgatcgacgccgagcacctctttaagctctatcgccgcgtgaatgaaggcatctacggccgcaccgcgatcaagctgcacaccggtgaaaagcacggtcccaatattcttccgcgtgacctcgtgcgtgacttccagagccgcatcccgaacagcaacatcgttgagacgaacaccctttacgaaggtgaccgctacacgacggaaggtcaccgtgaaacgctgaaggtgaatggctgggatttctgcccggtcgacattcttgacgaggaaggcggcgttgacctcccggtccgtaacggcttccatctcgaccatgtgacgatgggcggccatatcgtgaattacgactccctcatcgttctcacccatttcaagggtcacgcgatgggcggcttcggcggctcgatgaagaatatcgcgatcggcctcgcctcgggccgcgtcggcaagcgccaggtgcatggcgtggtcgacaagatccccgaaagctggaccgactggcccatgaaggaacccttcatggaactgatggtggattccgcgaaggcgacgcttgactacttcgggaagcacgtcaccttcattaacgtccttcgccgcatgtcggttgactgcgactgcgccggtgtcacggccgctgagccgacgattccggatatcggcatcctcgcctccaccgacctcctcgcgatcgatcaggcgtctgtcgacctcgtgttcaatcacgagagcaacaaggacctcgtggaacgcatgacctcccgccacggtctccgtcagctgtccggcatggctgagaagaagatggggaacccgcagtacgagctgatcacgatcgaataaccgacggatcatcgaaatacagaaagagccaggaaacctccaggttttctggctcttttgctgtttgcgcaaagaatagatgtcagccgccgaaaagccgcttccactcctcttccgcgcgtttcttcgcgtctgacgctgacgcggccggcgcttcggtgcgggacgacacctcctccccttcaaaatcctcttcgatccgatcccggtagtaggacatcggggaggaagacgcgaggaacccctccgcgatctcttctcccacgccccggaaccgcaggattcttcgcgtgtcgaactccacttcaagcgtacggctgcggcggtcgtacgcggcactccggatgccgccccgccgtatggtcttccactccatggctcgcctcctcggactctttccgactgacacggacactgataaaaataaatgtacgccgattccggtctgaatcaaggttttcagcaatatttccaaatacaaaaagcctctgattgcataatttcaggacataaaatttatgtatcagctggctgagaggccggcaccacttaattttggaggatctgatggcttctgactcctgctcctgcagccttgcgacgaaccataagacttgcccccttcctggaaagacagaagatctctacacgatgccctccgttccgggatatccgaaactgcgcgccggcacgcagctcgacgcgatctggggccggatgcttgcgactggcaagggataccgccgtcccggcatcaagaaggaaccgggcacctgcccggggctcccccgcgtcatggtggtgtttgatacccagtgcccgtggtctcaccgcctctgggacaccgcaatgatcctgaaggacgagatcgatttcctctggttcccggtctgcgtcaccaaggacgtgagcaccgcgcaggccgcggcgattctcgcatccgacaccccctgggctctcaccaaagagagcgaagagctcttcgacgatccggatttccgcggcatcaatccgaaggactatccggtcacccaggaacagcgtgacgtcgcctggaacaactcccgtatcttccgcaaggcgggcggcactcaggtgccgctcggcatctaccgaacgcctgataatcagttcgttccgatcttcggcgacgcgacggcagaagaaatccgaaagattgtcggtatcggctgaaacgctttaccgagacacttaaaagcgcgggctcctatcaaacgggagcccgcgtttttttcacttccgtcagaatttttgacatcctgacaggttaagagcattgatttccggagcgccttcccgagcgcccacgcaaacccctttgaatcccctgtatttactatgggaatcggtgttttctttcgccttcctcaagacattcacaaattttttcaggttaaccgctttcaagtgcgcttttgactactacactattagttgaaagttactgaccctgcctgttccttttctctgaagatatatctctcagactacagaaaaggaaaaccccggggctaaaactcactgacaggagatcgccatatggctgaagcagaagaagtgaagacagaaacggtcaccgtgacgcttacggaagatacgctcgcaggtctccgcctcatcgcggaacataaggggatcacagtcgaagaagtgatcgggcgcctcgcctccgccgccgcgaaaaccgcgcacacagcgaagagcgcgaacgagaagcgcaaagcgatcgcgcagctgatttctgaagaactcaccgatctcaacgcgaagaaggatgagttcctgaagcagatgcgggagcgccgtgaacagaataaaaggaatcctcccaacccctgatacaaagacaaagcattgccagccggtatcggaaccctgacccgttatgagcttttccggtacccggtgaaagaccaacacgaaaaggagtctcaacatggctgataagaaagaaaccgtaaagactgaggctgccccggcggcagctccggctgaacccgctccggctcctgtgccggcgattccgccgctcacgctcgaactcgatcaggaaacgcttgaagggctgcagctgatcgcggacgcgaagaagacggacgttcagacgatcgtgaagaagttctgcacgcgcgcctccaaggccgctctcgccgcgaaggccgcggacgagaagcgcgaggaaatcctcgcgaagatctcggacgagatcgacgagatgagcgaaaagaagaaggaactcctcacccgcatcaaggccgtgaagatcgatccggatctcggctgcgaagactgggataaggatgtccgcgaaacggcgaagaagctgaagaagatgctgaagaagctctgatgctgagactcagacgactgtgatcccccgcgcggcgcgccagacagagcacgccgcgcggatttttttcttaaactacgactagcgatagaacccccgcagaaccgggttctgacttcatacggaccgcacccgaatgacgacaccacgccgcaagaaagcaacgcctaagagagtcaccaaagcgaaacggagttccagaaagactctgtccccgtttaagaaacgtctcgcggtcgcggccgccgctctcgtgatcatcgcgggcgtgtctctcacgctgatcccgaacgcctggaatacggtcaaaaacgccgtggggctcgggtcacctgaccgcgaagtgcgggtaccgcccgccgcgaaaccaagtcccgcggcgactccgaccgcgatttcgctccttcacggcaaagtgaccaaagtggatagcggtgacgccttcacggcgctgatcacggatgggtcaactgagcgcgtgaggcttgtcggaatcgacgcgccggacccggatcaggtctggggcgacaagagctacttcgcgctcgccgcgctccttaacggaaaggatgtcgtgatccggttccggggccgtgacgcctacggtcggattcttgggcgcgtgatcgcggatgggaaggacgtcggtctcacgcagctcacgaacgggaacgcctggtacatgaaggcggacgccccgcagctcacgcctccagcccggaagctctacccggcagccgaagcctcggcgaagaaaaaccggattggtctctgggccgatcccgcgccggtttccccgtgggatttccggaagggaacgggcgcgtcggaactgaaaacgtttgaggaaaagagtgaagtgaagcagccggacggctttttcggccgcgtcacctcgattttttccggaaaatcctgagtcacgaacgaaaagtcccgcaaatacgccgtttcgcactgcacgctgtgtttcttttttctacactagagcgatgcgattgagctccgccggtatgagctctttatttgttagctgacgctgatgactgacccccgcgataaccactccgttatttcctcactcctcaactccctcatgagttccccgaagcttaaaaaggcggcgggcgtctttgtcgccgcctttgtcggcgcgatcgccgtgaatggcttcaccggtaacggcatcacaaacgccttcaggcacgcgacgcaggaaacgatgaagtccgtgaagggcggagccggagctccggccgctctcccagggcagaatccgaccgcgaccgggtccacagccggtcttcctgactcgaccgcgaacgccggagcccaggaggttcaggggcaggtcgtgaaggtggcggacggcgacaccattacgctcaaaaaaacggatggccagacgatccgcatccggttccttgggatcgacgccccggagcatgaccaggcgggcggtcccgcgagcaaggctcatctcgagtcgcttgttgccggtcggaacgtcacggtccgctatcggaacctcgatcagtacggacgcacggtcggcaaggtgctggtggacgggaaggatatcaatttaagccagcttcagaccgggaacgcctggttctaccggagctatcagaagtcgatgttccccgaggaccggccgatttacgaggccgctgaggaaaaagcaagaagcgagcatatcggtctctggagcgaagcgaacccgaccccgccctgggacttccgaaaggcgaagcgttcaggctcagacaaaggatttttctaaaaagacggagcggctgacgcctgaatcggcggcagcgcccttttcttttccctcttaatttatgacgcccggaacaccggaggttcccatccgaaccccgattccggcgcgttcaggagatcaagatcatgtcgaagaaaaagaagcagaaagagaagcagcagaagaagagcttccgggagcagaagcttccgggctggatggaagacgctgaagtcctggatatccaccgcaaggctccgatgatccgcacgatctccgaagtggtgtattcgcagatcatcgggaagcgcgaggcgcggcagctccggatgaccgttctgattccggacaccggcgccgcgaaacccgcggtgctcttcttcccgggcggcggctggctgggtgccgctaaggaccgctttgccgaaaaccgctgggcgcttgctgaagccggttttgtcgtcgcgacggctgaataccgcacgatcccggccgggttcccggcccaggtggtggacggcaagaccgcgctccggttcctccgagcccacgccgccgactttgagatcgacaccgaccgcatcggcgtgatgggaaattcggcgggcgggtggctcgctgagatggtggcgctttccacccatacccgcgagtggacgtccgctgagtggggtgatgaatccgaagccgtcagcgcctgctgcgccctgcacccggtttctaacctcatcggtatcggtgaggggctcgaccccgacgccgtcgcggcgcacgactctgagtcgtcgcctgaagcgcttctcgtgaacggcgtgtcgttcaccggccgcggtgacggcccgatcgcctcggtccccgagaaagcggaagccgcgagccccgcgggtctcctcatccggaagcccgctgacgtcaaggcgcctccgttcctcctcatccacggcaccgcggaccgcatggtatcccccgctcagagcgcccatatggcggaactgctgaaagaagcgcacgtgcccttccgctactacctgcttgaaggcgtcgatcattcatccgaccccgcctggtatcaggaaccgatctgcgaccttatcgtgaagttcttcgagaagaagctcggggactgatcggacgctgccggtcagaagagccggcagatacacgaacgccttccggtgatccatcggaaggcgttttgtttggatccgctcccggaaagcccggggcgcggtcaatcgtttatcagaggccgcccgcggcttcaggcttctcagccggcgcttcagtggcttccggagtctcagagccaagagcctcttccggcacggcttccgcctcagcttcggctgccgccgcctcggcttcaagccgctccatatattctttctctacccgggcgagacgcttcttgctgtagcccttcccgcggaggcacccctcatacggggtcatattgagcatatggaaattgacccggctgcggggcaccgtgaactccgccgtctgatgccagtgaccgaagtaccagtcgcggacccggggcagccgctcaaagaggagctgcaggttatcctcagacaccgtcccgaggagccagtcccgctgcagctggcacgccttgcagacatcatcgatcccgacggacggcaccgtgtgcgttaccatgacatcgattttgtcgaggtcgacggtcttcatgatcgccttcacttcgggttcggtgaggagctcttccgggaaccaggtcttcccgggctcacggaattccttatcgatcgagagcgcgccgcccacgaagagatagcgtttcccattaagcttcagggtgcttccgcgcggcatgtagtaaagacgcttccggatccggatcggcttatcgcttccgtgctccgcgacgagttcgcgaagcagcttatggttctcgtgattgccgtcgcagaaatacaccttcgtctgatcattcacgagcgaatcaaagaagtatccgggttccgtccccgactcctcaaagtcactctttctccaatacccgaaatccccgaccacgatcgccacatcgggcttcagttccttcagcgcgtaattcatgaaggcgaattcggcgtgcgtatcaccgacaaaaagcaccttctttttctttgtatcttttttacccgccatctgtctctctccagtgtgtcagttatcgacttatcaggcgtcagaaacggctaaccgccctccggcgtcatatgaaatcatacggagaacacggaaaatgtgcgcaaaattttcgtaagaaaacccgaaaaagcggattccggaacacgggaatgcgttgatttcgggagttcccggcgcgtttcaggcaaaagaaaaggccggagaatccgtgtcactgaattcttccggcctgcaccgattggatccggggtttatcgagatcagcggtctccgcggtcctcaatccggaccggagccacggcttcccgaagcatcgggccgcccgttgatccgccgtcctccgcgcggttcttcacgatgaactgctgccagatctctttcgagaagaacacgcagtagaggagcgcgcaggtgagccagtcaaaaagagcggtggcaagcgtatgcgacatgaagtgttcaccgcgcatcacctgaatcacgctgcaggcgataccgaagagccacgtgaagatgaggctcccgcgggcgagacgcggacgtacatcacggaacgcgaagtacatcgcgaagcagcagaacgcggtgccggtgaagccagagggccagcagtgaccggggttcttgtggaaggagaacacggggctcaagagcggcgcgttcccgctgaacacctcaaccgcgtacgggcagtagacaccggtcgtgtccttcaggaacttcacgaggaacacggacgcgagcatcccgaggatcaggtaaagcgcgcggcggttaccgacttcgccgagcttatagggaggaaccttgttccgaagattctggatgatcacataaagcgccgagaacccgataaagaacggcacgatgcggaacagacggtgaatccacatcatcaccggaatacggttcagcgcgaacttcgtcccgttatagaacggctcggaaagcgcgatatcgagcgcgtgcggggggtaaagcgtgatgtaagcgaggataagtcccggaatcaggaaccacttcacaagggtccacgcggtgatcggggcaagctgaatcttctgagtctgaggcataaggctatgcggttctccgaatgacgcgaaattgcaaaaggcagaattttaaaagaataactcatcgaaaagtcaaaatgccgtgaaattgcaacagaatttcacggcatccgaactggttttcccttgctttccaattacttttctttctttcggtcctgcagcgcgagaagcaccatattgagaatcacgcaggccgcgcccgtgatctcccaggcgttgaagggcacgtgaaagacgatcacggtgagcaccacggcggtgagcggctcaaacgacgacagcagccccgtgacggaggccgacacgtattccatgcttttcagaagcgaatagtaggcgaggaccgacgccacgagaacaataaagaggtaattcgcgaacgcggccggtgtccagtccacatccatatgaaacggcggctgcacgataaagccaaggagtccgccgacaagaagcccgcacccgagcaccggaacgacgccgatccggccggtcaccttctttggctgcagcgtgcagaacgcctggaacccggctgagatcagcccccagacgacacccgccaccgtgaagttaagcgatgtgaagtccccgcgtgtcacaagcagcacgacgcctgtcaccgcgagcgcgaggcagacgtactccgtccccgtgaccggacgcttctcccgcaccgcgagccagaaaagaatcatgagcgggacaaaacccaccatgaggcttgccgtgccggcgttcgatttatcgatagaaacgaaaaacgtgagctgcagaaggagaagcccgactccaaaaacgagaatcgcgccgatattccggaggtttctgaagatatcgcggaagaaattccggcgggtggcgatcccgtacgcgaggagcaggatcagtcccgcgccgaagagtcggatcgagacgagatcaagcggcgtgaagcggcaataggtgaagaggtactgggccgcgatgccgccggcaccgaatccgatgccggagagggcggcaagcccaatgccaataagcgttctggtctgcatgagagggtaagcgttttgcgtcgttattttttatacgtaaacgtgattctctcacagtgagacagaactgaaatccggtgcggttccttttttattcgctctgatccggcggaaaagcccggttttctatgtaaagatgcctggattcagcccgattggcgcaagacaaatgtaattctcaaaccagacaaatacccccttcctctacactgagtatgcctttagggggaggagagagctccctaaagcgcgtcaacaaaggagagagactgccgcggggccggagtgatccgccccgcggactgtctgtccgccgtcaacatttcgaggagaccgaatcatgatctggattggactcgcgattgtcctagtcactttctggctgatttacaagaattacgaggcgcgcctcgtcctgacactctcaggcgtcctgatggcgctgatcgggcaggtggcgcttgggtcccccaccacggtgggggcggcggttgacgccttcgtgaagcagctggtgaatggcggccttgttccagtgatcgtcaccgtgatggggttcggtgccgtgatgacgtacaccaagtgctctgaccatctcgtgaacgcgctggtgcgtccgctcacgcacgttccggcaattgtggtgccgggcgcagcgatcatcacctgggtcctcaatatcgtgctgccgtccgcggccggcgtcgcggccgcggtcggcgtcctccttattccggccctcatcgcgctgaaggtccgacccgtgatggcggctgccgccgtgttcctcggcacctggggttcggtgatcagcccggggctgatgtttaatccgcagatcgcgtcaatcgcctataaggcgggcgaaattccgaccgcggactcgatgatcgtgatccttcaggaagcgcttcccgcggcgctcggaattctgatcgcggcgctcgtgctcgccgcgatctccatgatgctgaaggaaggggttgggtccgtcaaggaagaaaccgagacagaccgcgagatggcgaatttcaaaatcaatcccatcatggcgatcatcccggtgatcccgctcttcctcctcgtcgtcgcttcgaagcaggtcgggtggctcgacacgaagacgttctcggtcccggtctgcatgctgatcggcacggcgcttggcatggtagtggggctcgtccacaagcaggacgtcggtgagacgtcgaagcgcttctgcaagggcgcgggcgatggctttaacaacgttgtgattctgatcgcggcggctgccctcttcgccgccggcatgaagtcgatcggccttaccggcgcgctcgttgacgcaatgcgcgggtcgcagtcggttgccatgatttcggccgctgtgggtccgttcctgatggctgtcgtctccggttccggcaacgccgcggcgcttgcctttaatgaagcgatcacgccgcacgccgcggactttggaatgacgattgtgcagctcggcgcggtcgcccagatcgcggccggtatcggccgcacgatgtcgccagtcgcgggcggcgtcatcattctcgccggcatcgcgggcgtcaacccgatgcaggtcgtgaagcgcaccgccctcccctgcgtcgccgctgtgattgtgaccacgatcgcgatgttcacgctcgtctgaaaaccaaaaggaaccggcggggcttaaaccggcggttccttcttagagacacaaaaagaccgcctggggatttttttcaggcggtcttcttttggcgctcgccccttctgcgtcagaggcgaggctttcttacgggatttcaggaagcggcggcttcgctcgcggcgttcgcggcttcgcgttccgctttcttttcagcggcgatcgcttcacgttccttcagctcttccttcttcggcatcggccagagcttcaggtaaagcttcgcgaagataccgacaaagagcgcggaaacaaacgtgccttctcggataccgatgagtccgcccgagaagacgagcgcgacgaggcaggcgaggagcacgagcgtccagtcgttaaacaccttcacggtgccgaacggcttccggaagaggatcgattccgcgatcacgagaccttcacccggctgcacaatcgtgcgggagtgaagctgcatcacgataccgagcgcgagaaccgtgttcccggcaaagctgatcaggaggcggagcggataggactccggcatgatgccgcccgaaaggctcatcgtgaaatcgatgaaggcgctgaacacgaacacgaccgggatctgaaagaacgtcgtgtagtggaacacgcccttgcggctgaggatcacccactgcagcgcgatgaagatcaggttgataaagaaggtcgtcgtaccgaaggagtacccggtgagaccggtgaccgcgtacggaagcgaactgatcggggtcgtcccgagattcgtctgagtaatgattgcaatgccgcaggctgcgacaaacatccctactaccagcagggcccatctccacacatattcaaagaacttatctgaattcaaaacttttctccacatttcgtgcgacacgaagcgttgggcgcagcccccctcgttgccgcaggcctgtcattgtaggaaaagcaagcaaacgtgaaaaccgacccccatcacatacatagaccatcctgatctatcggactactaccattggtggggtcggttatctatttaatagagcttatgacggaatagccagcccgctataggcaggcagacagcggccatgagcgtgagcgggatgaattccatccagatgtcgccgagcaccgcgccttcgagatagacgcgcttcacgatctcaagcccgaaccgcagaggattgagatacgtgaggtagcggacaccgaccgccatgttggcgatcggggaaacaaagcctgaaagcagcacaaacggcacgatgaggaggaaggaccagagcatcgcctgctgcatattcgtgcagagcgcggagatcgagagcccgataccgaccgcggcgacgttgaagaagaggagcccgaggtagagaaggccgacgctccccacgatatgaatcccgaaccagaactgcacgatgaggaaaataagcgtgctctgcgcgacaccgatgatgatcgagggaacggcctttccgacgaggatctgagggggcgtaaggggcgtcacgagcagctgatcaaacgttccccgctcgcgctcacgggcgactgagaacgccgccatcatcatggtctgaagaagggagagcgaggcaatcagggcgatcaggatgttccagcggctgtcgagcgtcgggttgtaccaggagcgggtgtcgaccgacacggcgctcttctgccccgtgatcgaggccccgtagttcgtggcgatcgagctgatataggcgcccgcgaggctcgcggtcatcgagttacggccatccagaatcagttcaaccggagcggtctggccagacgaaagcttcgtcgcgaagtctgacgggatattgatcgccgcgaccaccttccccgtcaccaccgcgtcctcgatctgggactgcgaggtgagcgtcatcgcgcggataaacatccccgtgctgtcgagatgcgtgagaagctcggtcgacgccttgcagttacaggaatccatcaccgcgtacgggacatagcggaggtcaaagctcgcggcgtacccgaaaaggaacgcctggatgatcaccggggcgatcaggatcgagcggctcaccgggtccttcatgaggacgaggagctccttccggatcagagcccggacctgcgagaaccagataatgagtgaattgaagcgttgggttttcatgagtctttactccacgcgcttccgaagcgtccaggtggtgaggataaggaagagaatcgtgtagccaagaagaatcagcaccccctcactcaccaccgaggcgtcgtttccggcaaggaagaggagtttcgccaccttcatgaagtgggtcgcggggaagatctcgcagatcggctggatccaccccggcatattccggaggtcaaacacgaaccccgagaacatcacggccggcatgaagctcacgagcagcgccatctggctcgcgaggaactgattccgcgtgacacccgaaacgagaagccccatcagaagcgaaacgagcaggtagaggattgagacgagcacaatcagcacaagcgacccgcggatcggcaccttgaagaggaaccgcgcggcgaaaaggcagatcgcgatatcaatgatcccgatcacgaggtacggggcgaccttcgcgagcgcgatctcaaagggccgcaccggggtgacaaagagcgactcaaaggtgccgcgctcccactcgcgcgcgatcagcatcgaggcgaggaatgtgccgatgagggtcatgatcagaacgatgatcccgggaacgaggtaccaggtactgattgcgttcgggttgaaccagatccgctgcacgaccgatatcccgccgcccacggtgatccctccgcggcgcgccgcttccttcgcgccccagttcgagacggcgctcagcacatacccctgaatcgtcttcgcggtctgagcgtcaacgccattcagaatgagctgcacggttgagtccccggccgcgtactgctgcccgaaattcaccggaatcctgagaataccgagcgcctctgactgctccatcatctcgaccgccgccggatagtctttcacgcggaccgggacgaggtacttgctcccgccgagactctgcgcaaggtcccgcgcggggccggacgaatcctccaccacgaccgcgaccttcgcgttctcgacgtcaaacgaaatgccgtacccgaaaaggagaatcaggatgatcgggagcagaatcccgatcgcgagattgctcttatcgcgcatcatctgccggaattccttctggagcagcgcgaagtaccgggtgaagaacccggagagaccggtttcagccttgtctgtcatctcgtgtacccccgcttctcacgcgaattttccacgatcgcgataaaggcgctgttcatatcgacacagtcttcgcccccgagcttccggacttcggccggcgtgcctagcgcaagcatctcgcccttatcctgaatcgcgatccggtcgcagtactccgcctcttccatgaagtgcgttgtcacgatcatcgtgcggccctggctcgcgagctgcgtgatgatgcgccagaaggcgcggcgggcgagcggatcaagaccggaggtcggttcgtcaaggaagaggatcgcgggctcatgaatcatggcggccgcgatcgcgagacgccgctgcatgccggcgggcactttccccgcgatgtcatccgcgttcaggtggaattcccggatcacgtgctcaatccgctcctcgagatgctttccgcggagcccataggcgccgccgaaaaactccaggttctcccggacggagagattccggtaaagcgaaaacttctgggcgacgtaacccacgtgaccgcgggcttcggcgcgcgccgtccggagattgagaccatccacctgcacgagaccgcttgtcgcggggagaagcccgcagagaatccggaaggtcaccgttttcccggcgccgttagggccgaggagcccgaagatttcgcccggtttcaccgagaacgaggtgcttttcacggcggtgaagtccccgaacttccggacgaggtccttcacgataatgactggcgcgacgtcgccgtctgacgcccgatgactctcaatcggagccggattggggaggcgggggtcttcgcccttcacgatctcccgcatgaaggtgtcttcaaattcaggcggtctcgggcggagattcgtgcggggagccaccgcgtcgagctgcgcctgcgtcacgccctctttcgcgatgatgcggacgtcgccgccctgcggcacggcgtccgtcgtgagatcaagcctgtcatagagcgcggtctgcaggaaccggggcgcttcgccgtgttccggcgtcgcgaaatacgtgagtcccgcggactcaagcgtcatttcttttggcttcccctcgcggatcagccttccgccgtgaaggagcaagacgtaatccgaattctccgcctcatccatgtagctcgtggcccagaggaccgaaatccgctgcttggaaacgagtttcgagacaatttcccagaggtcgcggcgtgacagggggtcgacaccgacagagggctcatcgaggagcaggaggtccggtgtccgcacgagcgaacagatgagaccgagcttctgcttcatgccgcctgaaagtttcccggccgggcggtcgaggtaccgcgcgagatccgccatcgcgagaagctccgggtaacgctctttccgcttcgattccgacaccccatggagatcggcgtagaggtcgaggttctcgctgactgacagatcctcatagagcccgaacgcctgcggcatgtagctgatccggtcctgcaccgcctgggagtccgtcgccgggttgatgccgaggacagagagctcacccgaatccgccttcatgagccctgtgatgtggcgcatgaaagtcgtcttccccgcgccgtcaacgccgacaagcgacacgatgacgttgggtggcatggagagcgtcaggtcggaaagcgcgtcaatgcgttctccatccgcccccacgaaggacttcgtgaggccgcgcgccgtgacgacaggggtgaaatcagccataaagggcacccttctctcaattcgccgcaggagcggcggacggaggcgtatccggcacctgagacaccgcggccgcggtggaagcggggatctcagcgcccttgctgttcagattgattttcacggtcgccggctgcccaagacgcagatcccccttcggatccttcacgatcacgcgcacttcgtagacgaggctcgagcggagatccggggtttcaacggttttaggcgtgaattcggagacagacgagatatagcccaccgttccctcaatcggggtgttcgggtgagtgtccgtcacgacgcttgccgtcatcccgggtttcacgttcccgagatccttttcattcacatagacgcggacccacttgggagaggtgagcgcgagcgtgtaaaccggtttcgcggcggacgccatgtcgcccggctgcaggagccgtgaccgcacaatcgcggcgtcaggtgacttcagggtaccaagcgaaatttcgtgattcagaagttcgaggttcgccttcgcggcggcaagcgacgactcggcgctccggatatcctcaacgcggggaccgatcttcatcagttcgtacgctttctgcgcgttcacgaggttctgcgacgcgacccgctccgcgctcttcgcggcgtcgtaattctgggtgctgatcgcgtggccgcccggcgcgttccacaggttattggcgcgctcgagatcctgcttcgccttcgtgagctgcgcttcgtacgcgagcatctggctccgggcctcagcgatttcctgcgggcggttcccgcgcttcagtttgagaagcgtctgctcctgaaccccgatctgggccgcggcctgtttcgcctgcagttccagcgtccgggtatccagcttcgcgagcacctgaccgggctccaccacctggccctcatccacattcatttcgctgatgcggccgctcgcgtcaaaggcgagtgacacctgacggatatcgacgttgccgtagagggtaagttctgtcggcgcggttacctggtgcccccggtaccacgcatagcctcccgctgccgccgcggccacaaggatcacagctcctatcgcaatcaaacgttttttcatactgaacccccttcgcggcagatgcaggaaagctatacaaattaaatttaaattcaaattaaagtataatcgattccacagagaataaaagacacggaaattacgaaggtacacgcgatgccaaaggactcgattcgaaagacccgatcggatggtgacaaaaccaaggaacggattctgaaggccgctctcgcgctcttcgcgaaacacggttttgcggagacggaaaataaagaaatcgccaaaaaagcgaaggtcgatatcgcatcgatcaactatcacttcggcagccgcaagggactgtttgaagcggttctgatcctggctcatcagaacctcgtgagtctcgaggcgctggaagccattcagcgctctgatatgacgcctgaagaaaagctccacggggtattcaatctcatcacaggcgccgcgcgccgcggtgagcgggcatcgcttcaggtgatttcgcggagcgtcatcgcgccaggggcggcgcttgaaacgctgtttaaggaagaggctcgtccgaagcttcaggtgatcctgcagatcgtctctgaaatcaccggattccccgtcggggatccccgcctcatccactgcatcgcgtccgcgatcgcgccggcattcctcttctttgtgttcggctcccggttcccggggcccttcggagcgctcaccaaaatgccgcagtcggatcttgatgaccagctcacggtgttcgcgctcgggggactccgcgcgactgccgccgcggccgctgccaaagcgacagatgaaaaagaaaaagcagcgctgccctccggttccttcaaggttccggatacggcaaacgttgcctgagattcaatctagctgaatctgaatcagaccgaccgaaacgcctcttcacgaggaataagcgcgaaattgagttcagtcctcctgttgaggcacaaaatcatcgatcgtaatcgatgattgaggaattcagacaggatcatcgactatagtcgatggttttactccgcggcggccttcagccgggacagatcctcaccggcggagcttacatccgggtaactctcggacgtgacagcattccttttctgatcgcttaccgcaacgctgccgctgacaaagcgacagatgaaaaagaaaaggcagcgctgcccaccggttccttcaaggtcccggatacggcaaacgctgcctgagattcaatcgagatgaatcagataccgtcgtccccgaggacctggttcagtttattgctgaagaaatacattccgtcgtgcgtcaccacgatcccctcttccacccacttcgcgagaatccggctcacgaccgcgcggtcgctgtgaacgagacgcgcgagttccgtgacggtgatcgttttgggaaggcacttggggagtgccgtgagcggcatattaagcgcctgaaagagcaccttcaccatgagcgcgacccgctgcggcaccgtgaggaggtcattcatcagaagcccctcaatcttcgcgtcgtcatgccgaatgaagctcttcagagccgcgatgcagagaatgggatcaagctccagctcccgcttaaactgcgccgcatccatcacgaggaccttcgtggggagaagcgcccgggcgatcagaggcttgatcgcgtgcttacctttgatcgacttctccgctcccactgaagttcccggagggaaaagcacaatgaggcgctcatacttcccgacgccgcccgcgaatgtccccacgagcccttcttccaccatataggctgtcggctcctcaccgaaattcaccaccgttctggagcggacaaaggccggcctccccttctcacggaagagtgtgaggagttccggggcgtccggcgggacgacccagggacattcagcgtaaacgtgatccattcaaaacctctgcgggctaaaaccacaggctctatttgcctgacaactgagcgagacgcgtttctgccattttatagcccatctccgcggcttcccgataaagtttcttcgcatcctttacattcaccctgactccataggcgccggtaacgtaaatatcgccgagcgtcacgagtgccaagggatcccccgtttctcctgcaagcaaaagaaccccaaggataaattccagttggtgctcttccgcgtcatagccatgttcagggagaagggtaacaatgtcatttacggactcatccgcctcagccaatccgtaatagcggattctccagtcgaacgcttctttattaaggcccttatcaaagcaatcaagagaaagcctatagactgcattcggaagaccgttctccgccgcttcacggataagcttttcgccttttcgttcgtcctttttcagcttttgcccatcagaaagcaacaccccatagtaaaaccgcccacggtctgacccctcatcaatcgctttctgcagccaccggagtccggcttccaggttttccacggttccaaaccccatagcaagacaccaaccgaaagatgccgcaccatccgggcttcccatcatggctgcgtcttcatagaaccgcactgccgttttgacgtcctgaataaagcccttctttcctgcgagcagcgtatccgcgacttgaagtttctgcctaatgcttccgttttctcctgcctctatgagcagctgattcgctttcttaggatctctctttcgtccaaaaccctgtgcgtagtaaagagccagagcagccttcggaagcgagtccccgccttccgccgccagctccgcaagatccgcgatgagtttcgcgtacttcctgagaccttcatcactgagcatctggctcacggtgatcagtgtcacaggatccgccccggtttctctcagatccatcgcgaactgaaccgcgcggggatagtccgacgcaaaattatcggattcgcagccaataagggcattggagatcaatgggatataggccttcaccgcaccaagcgacaccgcgcgctcataaatctttctcacccggcgcgcttccttcggagtaaccgcgtccagatccagaatgtcagcaagcttcatcactgcgtccgggtagtccttatccgcgagagcccggacaagtttcttcgcttctttgcgattctttttgacacctgtgccgttcaggtagcagtccgcaagacccaggatcccttccggattctccttttcagccgccttctgaaaccaggtaaacgcttcgaatggggcctcatagaacgggtccgaaagataggccttcgcgaccttgaccatggcttcagcgtcgcccgactgagccttttcaagatctatcggatcgtcaggattgagtctccgcgggggttcaacttcctccgcagggataaaacgcgcgaggagccagatcgcggcgagaatcctcattcctgctttcggagactcgccctcccagtctttctcaaagcagtagacaggaatatcgatgcctgtttcgccgagaaggggttccttcatggtgaccacaagcttccagacatcctccccgtaaagcgtcacgagttccgtggaacggataaccgaccggataaagtagcagctcgcgtctttttcaagaaaatcatcaagccctttttctttcttccgatcttcccatggcggaagaaaaggcattacggtgtaattttcttgatccgtcagatcctccggagccggtccatcagtaagcaccgtgatgctgtgagcccaggcggaaagcgaaaaagcccgcggtaccggatccttaaaccgatcttcaaagacccggaggccgggaactgcgacagaaatcgagaaatgtccgccttccggccgcataaacacttcaccgtcatactgattcctgaaccgtcggaaattgcttacgcggaaaaatccactgatccctggcattacgggtgcggtctgttccgtcgtcattccctgattttcaggtccgtgcgacgcgtaaaacgccggcccttcacggctgtctccaaggagagccacgccccagccgtattttttgtcggcatattcaggcagttcgtagtgatggcactcaaagggatcaaacgcttcctgcacgcggtcaagagtcagttcgtctgcccaggcatgcgtgaaatttccaatggctttctttccgaaaaacggcgtattgaaacgcgctttcgcttcgggcggcagcgcctgcccttgagccgcgggattcgtacgtgtgtattgtgatctcatgatgtcgttctccgttactccagcctctgaataaaagtgcgtcagagccgctttttaaaagagatttcagagaaaagcccgaaagcttccccctgcggtttcgtcattgatcttcgtattttgcgttatctaaataaggactttattgcaagaaatattttgttacaattagagcagatgtaacttttcacgtatcggcgatgcagcttacggatgaccagataaaacaaaaccccgaggaacctaatccacggggttttatgcgaaaagctcagccttgagcgctcagttcaggaacctgtccgattctctgatccgcttactcagagctggtttccgaggcagacgatctgtcgccagcttaggcgaagtacttctgcagatgggcgagatagtcctcgctgctcttcttcagggtttcaggcgtctggctgagagcaccgaaaaggaggaagggcggctgccactcagtctgaacgaaattcgccatgagcttgaagggaaggagaatttccggaacttcagcgccaacggaaccggtcttcgtgtagacctcagcgggagaacccaccgacacggcaacgcccagcttcttacccttcagcgcattgcccttagaaccataggcccagccataggcgagcacgtcatcctgccactgcttgaggagggcgggagagctgtaccaatacatcgggaactgcaggacgatgttgtcataggattccagcagcttctgttcggcggcgacgtcaatcttgccgtccggatagagcttgtagatttcgtgaacggtgtaaagctcaggatgcgctttcagggcttcaacccagctcttattgacgtgggactgttcgatattcgggtgggtaaccacaactaaagtcttgctcattgttctttcctatcgggggttaaaagttatgtgtaattagttttatcagatttaaaaaattgcgatgtatttttttgtaaccgaagtggttacatcaaaaattaaacgttttgacctcgttttgcaagacctttttttgatttttctgagacgccttcaacggcggtcccggatttcaagcaatcacttcagaaatttcttcagattctcaatccgttcctcggcttccttattcccgagagaggcggcttcccggtagtaccggaaggcttcgtcgtgatcctctttgaatccgtggaaaccgagcatgtagtagtcgccgaccgccaccatcgcttccggaacaccggcgtccgcggctttctcaacgacttttgcgagttccgtcatctgcttctcggacgccttagcgaaacaggcgtccatgaagttcagaacatcttccgccgcctgttcaggcggaatcgcggcgtagtagcggagacgccaggagatggcctgcgaaatgctctgcttaaagacgtccccatagaagtagccgtctgagagatagaggagcgccacgggaaagttctgttccgcggcgcgcctgatccactgctcgccgtccttccggttcttacgtacgaagcgcccatccatccgcatctggccgtactcgaaacacgccatcggggatccttcgtaacgggctttcctcagccaccggaggccaagttcaatatcctgtttggttccatagccattcacgaggcagtagccgtatgcccccgccccgtccgggcttcccatcctggccgcggtttcgaaaaatcggcacgcggccttcgtgtccttacggaacccgccttcaccatagaggagcttctgccccgccttgaatttctggacaacgtcccctgatttcccaaactccttcaggagctgggttgccttccgcggatcccgatcacgcccgacaccattggcatagaaggcggcgagtacgtaaaacgcgactgcttcaccgctttccgccgctttctccgcaagatccgccgcaggcttcatgagccgcggatcctcaatcacagtgaagagatgcgaaatcatcagaagcgtcgtgggatcggtatccgctttcaacgcgtccgccgtgtacttcagggcaagaggcaccggatcctttttctttctccggaagcccttcccgaaacacccgatgatgaggggggcataagcgtccgtcgcgccgagcttcagggccttttgataagcgtctgccgcctgctttttttcttcatccgtccgggcgtattcgtgaatcaggtctccgagctccttaaacgcctctccgctgcctgcggaccccgctcgaagaagcagcgccttcgcggcctcgcggtccttttccgtgccgcgaccttccttatagcagtccgcgagcccgatgaggccatcaatgcttcccgattcagctgccgtcttgtaccagcggaacgcctcggcatcatcctttccgacccggaaaccttcggtgtagatatccgcgagctcaatcatcgcctgcacgtcaccggactccgcccgggtgatcgcgtcagcgaggagatccgccctggagaggagcggctcgagcggtccctcggggaggaaccgcgccgaaatccagataaagcctgcaaagcgcataccggcggccggcggcacctcaccctgccagatcgattcagggcagaaaatcggtagcacggtatcaaccgcggcaggatccttctcatccaccgcggcttcgatcttccagtacttttcaccgaggagcgtcatttcctcgacagaccggatcacggagtgcagcgcgtacgtgcaggcgttcccgttcacatagtctttaagcgccttatcgcgtccgtccttgaaaaacgacaccggcatcactggaatcagggcgcagctcggttcctccggcttaaacgcgtctttatctcccatccggaaatgattccaggcggcgtccgcgagcacttcctgagcgctttcgttttcgggcaccggcgccgggaacgcgaagagcgcccaggcattgaaggaaaagcggtggacacctggtctcgcgagtgtcttttcgaagacccggagcccgggcaccgcggcagcgagattcatgaggctccccgcgggctgcacgaacacctcgccgtcatacccattgatataacggcgggtcgcccggacgtcacatgggatttcggctcccggcatcacggggcagagcgccgggggcatcagagggacgcccggagcgccgtgcgaaccgtagatcgcgggtccctcgcggcggcttccataaagccccacgccccagaagttatccacatcggtgtattccgagagctcatgaaattcagcgtgcggatcccggacgaattcaagcgctttcgcccggatctcgtcagttgcccaggcctgagcgaatgagtcgcacgggggcttcccaaaaaacggcgtatggaggagatgctcaatcttggaggccgcgtcaagcgcttcctccgacgtgaattcatccatcacaaccgttttctttttagtcacagcctggctccatcacccatcaggccgcggcctgggtgaaaaatcaatcgttatgccgttattatttcggatctatcggggaatttcaatcgcaactgacggttttcctgtctcacacggatcgtttcatcctgtctttacggcaaagctagatttcaggcaccccgaaggtggatcccggtttcaggaatcggcagatcctcttccgcacagaccgcctatccgcagagcctctcaaaaaacacacccatacatgggatgcaaggcgttgacgctctcggctttgcagatataattagctacctaattattagccacgaaaactattttcatgaattacaaagtccgggtcctccctacacgtgatgttctcatgaagaccgcagaggccgcgccgattccgttttcaccggaagcccccgcgctcgtcctcaatctgatcaacgcgggctatctgatcaatcaggaaatcatctcctatatggagaatgagttcgggatcagcgaggggaagttcgtgcttctcatggcgctgaagacgattccgaagggctgcagcatcaaggagctcgccgcgcgggtcggtgtttcggtacccacgatctccgtgatgctttcccgcatgagagctcagacgcacccgctgatcgctgtccgccgcatgaagggagacgctcgcgaaaagcgggtcacgatcacgaaggacggactcgcgctgctcgatcagctcctcccggggcatttcaagcgcgtgatggactttgccggacgcctgacgccggacgaacagaaagagcttctcgcgctgctcgataagctccttccaaaacccgaggctaaataatccccccccactttctcaaccgaccgaagcgctgaggcgcgttttctgcccctgcttccggccggtttagtttggtttgtgaaaatagttagtcagctaaacaattgaatttttgggttattgattaaaaaagtgattcatcatgagtgaagaagaaaagaagaacgcagcccctgcccccgcggccgaggcagaatccggagcggcggctgctcccatcccgcagtcgctcgggaagggccccgggaagaaagcgctcctgaaacccctcattgtctttgccgtgctgatcgcggtcggcacgaccttcatggtgctcgggccccgccgcgacgcggatacgctcgcgcagagccagaagtacgggacgctcaccgctgaggacgtcaacaccgcctttgaaaaagtgtccgggaagctcgtctcccgtcccgcggtcgaaggccgcatggtgaaggcgggtgacgttctgatggaactcgattcgaccgacaccgatatctcgatcgcgaagacaaaggctcagatcgcggagaacgcggccgcggttgaagaggcgaagcggacgattgaaggcgcgaaagcgaatctcgact

SEQ ID NO: 1387 - DNA, 5084 bp, Unknown
  gut microbiota DNA sequence
tcgcgaccgagaagcgcgcgaaggcggattatgaccgcgcgaagaacctgatcacgtcgcacgcgatttcgcaggcgtcgtttgactccgcgaggaacacctgggaaagcgcggcttccgcggtgaccaccgcccggaagcagctcgacgcggcaacggtcggggcgtcgaagtcggatctcgcgcgcctcgcgaagaccggctccgctcaggggatgaggcttgccgcgatcgcggatacgcgcgcgagcatcgaaacgcagaaactcaaggtgaaacagctggaagccgcgggcgaacagctgaagcaggcgctcgcagcgctcgaggtcgagaagtcccgcctcacaatcaaggcgcctgaggacggcaagatcctcaaagtcatgtaccaggtgggtgaaatcgttcccgcggggagccccgccgtgctgctcgagtctaaccgccagtactacgaaatctacgtgagcgaaaaggacgccgcgaagttcgcggaaggaaagaccgtgaagggtgaaacggcctccggaaagaccgtcaccgggacggtgcgcgtgctgcacgaagcgcccgccttcgccgacctccggggcacgcgtgaacgcggccaggcggatctgaaatcgcttgtcgcccggatctatgtgaccccgcagcccggcgtcatccccgggatgtcgatcggagtgaagatcaatgactaaagaggccgcactctcgggattcgcgaagtggcggcgcgatatcgcggactcgatctacgaagagatcagcgcgatgatgagcggccacttcatcccgtaccacaagctctgcttcatggccgcgtttctcacggctctcattttcagcatcctcttcacccagatgggggtgattgaggcgccggtcgctgtggtcgatcttgaccactcggcccgcagcgcgaagtttatccaggcggtggactcatcccgcgatatccgtatcgcctcggtgttccacacgcccgtggacccggtttacctcacgcggcacgacaacgtggtcggcgtcatcgtgatcccgaaggggtttgagaagggactgctgaacggcaccacgccctacaacatcggttacgaagccgacatggggaacccggctcagaacggtgaggtctttgagtcgctgaaccagatcgcggcgcaggaaggaatcccggtgaacgccgagaacctccaggcgctcggtcccgcgagcgctcagagttccggttcctcggggctcacggtctcgatccgccggctctttaacccgacgaattcgctcgtccccgtgacgatcgcggggttcctttacttcttctccgggatcttcttcggcatcacaacgctgatgctcacgggccgcgtccatgtgatgggacagtgggagaacgcgatcctgaaccggggaccgtccgcgatgatcgcgcggcttattccctacgcccttgggtacacggcggcggtcaccatcatgacggcgggcctcgtgctctttaactgcatgccgtttaaggggaactacctcgcgtacctcccgagtctcttcatgctgcctttttcgatcggcctcatcgcgatgctgatcacctggagcttcaagacaccggcaaacggcgcgtccttcatgatctttgtggtgccgcctggcttcatcatgggcggcatgacaatggcgatgggggaactgaccggctggggctggtacttcgcgcacctcttcccgctcacgtggcagtactcgatgtaccgcgacttcgcgttccgcggcatgacgctctcgcagatgatcgggccttacggcgaatacatcctctatgtcactgcgctcatgatgctcgtcactctccggttctaccttgagcgccggaggcttctcaggatccgtgaccggcaggtcgcggcactcgctcaggtgccgggcgaagcggcgtaacggcaaaagcttcccgcgggttcgctttttggtaacataagaagcgtcaccgcgggagcttaatctcccgcaggctaagtcctgcctcaaaaagcaggcctctgcggagccggggatcaatccccgtccgcagcgacagaaaaccccgaaagattcacgtctttcggggtttcgttttttctggatatccgttccgctctgcttcagacaaacaccatctgcacgaggaacatatagaccgcggtgccgcccgccatcgagatcatcatgttccgcttccaaaggtgaagaaggacagttgccgcgatcgcgatgaattccgggaggccgtgggtgcccgagaggagatccacgtccttcaggcagtagaccacaagcatcgcgaaaatcgcggccggaagcgctgccccaaggtactggatgtagcggggagtcggccggcgggacgaaaagagaataaagggaagaaagcgggaaagcatcgtcgccgcgatgcagagcgcgaccgtgatgatttgttcccaaagcggcatcgtcattcttgataccctcccttctcttcaatcggctttcggaaaacggtgaggagcagcagaatcaccaccatggtcgggatcatgaagaagtcgcgcccaaaaatcgcgaggcacccaagcgacgccccgaacccgatccatgcggtccagtgatgcttttctttgaggaactgctcgaggaaaatcacgacaaacatcgcggtcatcacgaacgacagccccttcgtgtcaaaggtgaggaagctgccgagcgttgccccgagcaccgcgccgccgagccaatacatacggtcgaggaacgtaatccacatcatgtaccagctggaatcgacccccgccggggccttggtcgcgaattcgagcgcgaacgtttcatcgctcatcccgaagatgagatagaacttcttccagccgagccccttgaagcgatccagcatcgcgaggccgtaaaagaggtgccgcgcctggatcatgaaggcgacaaagaacgtcgtcaccggagcgaagggggagagcagcatcgaggcagcgacgaattcgagcgaccccccgtaaatcagccacgccatcagagccgggtaccagacggagaacccgttcacatgcatatagataccgtacgccgcgccgaggaacaggtatcccgttccgacgggcagcgtcactttcgcggccggcgcgaaggctctgaggattgaattcactgccatgactgtgtgtattaagcgttggagccgctttttccgccgcggccccgtggattgtcaaagccgcctttttatccccggcggcccgtgcggttcagtataagagaacgaaaccagggcgaccccgaatcccgcttttgaatttcggtctctggcgtaataccgcaaaaagaggcttaaagaagcggcgaaatcactttcagcaccgcgcccgctccccgctcgaagagactcacgcggtggagccgatcctccgaaaattccacgcagtcctggaatgtggcctcaaagtcccgctcgatctcctcaatgcagggcgtgcggtagcagtagacaccgcattcaaagtggtgatagaggctgcggtagtcaaaattgatgcttcccacgatcgctttttcggaatccgacaccatgactttcgagtgcacgaacccaggctgccactcaaacacccggacgccggcgtgaatgagctgccggtaggtgttacgcgcgagcgcgtggatcagatatttatcggaatgcgacgggcagatgattctgacatccacgccccggtccgccgcgaattcaagcgccgcctcaagttccccatcgaggatcagatacggcgtcatcacccagacatagcgatcggcgcgcgaaatcatgtcgatatagaggttctccgccaccttctcctcatccatcgggttgtcgccgaacggaatgacgaagcccccttcgatgagattcacgcgggcgtcttcgcctttcaggagatcgccgataaaaatgtccccgtcatccgcgtgccacatctgaaggaagaggagcgtaagcgacttcaccgaccgcccccgcagccggatcgccgcgtctttccagcgcccataggggtggatccggttgatatattcgtctgcgaggttcgcgccgcccgtgaacccggtttccccatcaatcacgacgatcttccggtggtcgcggtagttgtactttgtggagacaaaggggtagatcggggaaaagaccttgcactggatcccaagcgaccggaggtaatcggggtagccgctcgggagacgcgcgaactcacacgtcccgtcatacagcacccgcacctcaaccccggccttcactttttccgcgaggatcttcagcacctgcccccacatgagtccctcatcgatgatgaagaattcaagaaagatgaagcgccgggcttttgagaggtcatcaaggagggacctgaaaaacgcttcgccggacggcagataatccgccccctcgttccggtacaccgggtagcacccagtcttattcatataggacacgagccccgagatgtcggaacccgcgcgggagagcgcgtcgagatcccgcgggtcctgcgggatcgagtgtttcgtgtccccgataatcttcgccgcgcgccgtttcagtctccggtggccgatatcggtctgcgtatagatatagagcgcgataccgaagagcggcatcagaagaatgaggaagagccaggtgatcttcgcggtggagtctgagcggctattgatgatgtagagcaccacgagcccgccgatcgtcccggaaatcatgaagtatttcgaggcgtagggctggatccagagtgacagcgcgacaaagaggatgagctgcgcgagcagcatcaccccgatcagccccgagcggctgaaaagaatggaaaaaaagccccgtttcccgcggctcgcgatgcgttttccccgtctcagggtctcacgcttcacgcggttaaatcggcgtctcgctcgttcggtgtccgtttccattctcagtccggtctttttctgtgatgcatctctattaagaataaccgttccatgagtacctgtttatgttctcggaagcgaagagtgcgtacggtctc

SEQ ID NO: 1388 - DNA, 258 bp, Unknown
  gut microbiota DNA sequence
gcgattgaccgaaatcgaccagtgaaataatttcctgacgatcctgggcactgatcagttttccttttccccccagatcgcctcggctttttttgacagcatcagcatcgtcgcagcatcagccaatgctttgtcttttctggaaatttcctgggcctgtcttgcgttttccttcttgagctcggtaatagcggaagcctgggcttcatgctgtctcttgtctacggcatccgggtgtttgctgaaccattcggccca

SEQ ID NO: 1389 - DNA, 22008 bp, Unknown
  gut microbiota DNA sequence
aatcaatccctttctatcgccccttaggatttttatttaacaagtcctaaatttggggagcagttcacttaagttctccttttttgttcctgacgaggcaacagagcccccgttactgagaactactctgcgttacctgacgtatcgaatccggctttcttcgcataatgcaccgtagcggtgatgaatccctgcttggaaccgcagtcaaaacgccgcccggaaaatctgcaggcagtcatagggacactttcgagcgaagcctccatggcgtctgtcagctggatttcaccgccggccccaggagtgacgttctccagatagtcaaaaatggacggttcgaaaacatagcggcctattacagccagcgtggaaggcgcctcttcaggcttcggcttctcgaccagacctgtaacagactcaggggcatccgccttaacactcgcgataccgtagagatttgtcttttcacgggggacattctgcacagcgacaacgtttccgccgcctttctcttcccgcttggcgatcagttccccaatgcaggagctcggggagtcaacaagatcatcgggcagaatcacagcaaagggggaatctccgataacaggctttgcgcagagaacggcgtcccccagccccttcggggaatactggcgggtgaaaatcaaatgaacgcctggcgggcagatggaacggacgacatcgagaagctctttctttccctttgactgcagctcattccagagttcataggaatagtcaaagtggttcatgatggcctctttccccgcggccgtcacaaaaaccatgtcagtgatacctgccttcgcggcttcttcgactgcgtattgaatcagcggtttgtcgaccacggggatcatttccttaggaaccgcccgggtggctgggagaaaacgggtcccaagccctgccacggggaaaaccactttgcgaatcggagaagccataaaaatgcctttaatgaaaaggagaaagactgattaattgtatcgattgaaaacgaaacgggtagctcaggatgcccctgcgaaatgattcaaagtttgaagcaataggccgcacgaggctgtaaacgaaacgttcaggacggctctatccggttgagttcgaagattttgtgccgatcggtccctcaagcggcacgatgccttcaaccgcctcttcaaagcttcggaagagttttctcagttcagatgcgaaccattccgcgaaaatccggcagcgtctgatatgccagctggagcgagagagagcgacaaagcattccgcctgcgggcggcgccagccgggaagaatcggaacgagagtcccatcgcggatcgcttcccagcattggacaagcggcatatcgagcgatacgccaagcccgtcaatcagtccctgacggatcgacagaatatccgggctgagaagagtcttccctgccggcaccgaaacctcaagagttcctttcctcagagttcttgtctgctcacggacggggcccgaatagataaacaccgtgtggtgagcgagatccgcgggttcaagcggcatgccgtgcgccttgatgtaggcgggagaggcgagtggcaagtaaatattccgcccccgggggaatgtcacaagcttcggatcctccggattgccggtaataatcgcgacatcggttttctgcttcttcagatcagcggcacccatgccaacctggatttcgaacgtgatattcggatagcgttcggaaaagcgggcgagcatcggaacgaggtatcgtgtcgcgaaaccaggggcaacggaaacccggatctgcccctcaagccccgtgctgtcctctgtcatctcgttaatcagcttctcgtgagagcggatgatcggcgcgatccgtttgacggcccagagtcccttgggggtcagttcaagaggcctcgcggagcggtcgaccagtttctgaccgagcgaattttccagtgtcccaagagtccggctgatggttgacggctccaccccgaaagcctctgcggtgaccgaaaaactccgggactccgcgagtgaaagaaaaattttccagctgccaagatcatcgtatttaggcatggttagcagacccgaagatggaaattcattttcgcacagtttgcggaaaacgcaaaaatgaaccgcaaaaaaacgcggtttcagaggcctggctctgaagccgcgctgaatgaaagcggcagacctgttacttccggccgcagatcttcttcaccatgcccgcaaacatcttgaagccggtgtcaagcgcctcttcgttcacgtcgaagttgaactgatggtgaccggcttcgcggtctgcgccgttcacaaagaacgcgactttgccgccatgatccttcacgcggcgcgcgaggagcgaggcgtcttcagagccgccgaagttcgctttctccgtgatcgtcttgatttcggggattccctttgccacttcgcggagcgcatcgatcatgtcgggatcgttcttcatatcgcaggccgcgcccatcttgcggacgtcataatcgacgccgtaggaaatggcgtttcccttgatgattgccatggcctgatcagccatgtagtcattgatttctgcggtttcgccgcgtacttccatcaccatggtggcgttcggcgggatgacgttccggcccttgccggcgttcagcataccgacattcacgcgggtcatgccggaaccgtggcggggaatgccgagaagctgaagcgtcgctgaacaggccgcggcaagagcgtttctgccggcattcggctcaataccggcgtgagcgggtttcccggtgtaggtgacatcaaacttcgtcgtgcagaggaagccccagggatcaatcacgacttcaccgtacttcgcgaccatgccgatgtggcttccaacgaagtagtcgacatcatcgagaacgccggattcagcgaccgcgttagcaccgcggacaccttcctcggccggctggaaaacgatcttgatccggccgcagagttcgtctttatggtcaacgatgaatttcgcgacggtgaggccgatcgacatatggcagtcatgaccgcaggcatgcatgtagccgtcatgctttgagcggaaaccttcttttgtcggaatatgagcggcatcggcggtttcctggaccgggatgcagtcgatatcaaaacgcatggcaagcgtcgggcccgggcggccggagtcaaagataccgacagcccctgtgtagccctcagtggctttcaggaattcttccggaacgtgatgatcacgggcggcctgaagaccggcctccacgtctttttcggatcggccgagaacggcatcaggattcacgactttcgtcccgaggaggacgtcgtacccccactccttcagttttttagcgagatagtaagtggtcgtgaattcagtccagccgggttccggccactgatgaagttcacggcgctgagagacgagctgcgggtaatacgaagaaaaagccattttcctgatctccttcacagaaaagagaaacacatggaacttcgaatgaatcggtttcggacagccttccggactgcgtccggtataccgccggcacgatcgattataggcgaataggtttcagggattaggccggaataggtaatgatcagagccgtgagaaaagatatacatcaattgcgtcagggcattgactgagcggggctttggtgctttcaggagcggaaacgcggctccaccgcactgacagaaaaaaagccggaagggggggacccttccggcctttgcatcagtgaagaggaacggaattcagtcaggccccgttaaacgggaacttcgcgctgatcttccgggtgaggagcgtcatcagctcgttctcaagcgcgcgggcccgggtgagagcatcttcgagaatccgatctgactcgagctgcaggaagcggtcagcttcttcagcactcttctctacgagcgcggcgtagcggatctggatccggttcacgcgctcttcagcctcccgctcccaggcgtcccacacgcggcggacaatcggctcaaaggcgcggtagtccgtcatggcgagcgtctgcaccttccggaaggcccagccggctgagacactgtccgcgtcgtgcgttccaatgccatacgccttcgggaaccacttggctccctggaagaccgggacaaagacgccaagagacggcattccccaggacacccaggtcacagcgccgaccgcgagcggcagccagggtttcagctgcagaatgtggctctggctgcagcggaagaccgagatcggtctccaggcggtgtgcgggttatccgtctgatagggatcggaatccgtcccttcatagcggttccggagaccggacgcgattgaggtgagtgtgagtttggactccggcttcacgaagaccgggaaggtgaggtcctcctcaggcttcagacggagagacgggcagtacttctcgagaagcacgcggttccgggcgaagttgtagtacgtatcccgggcggtgttctcatccacgtaagcctttctcacgttgaagggacggacaccggttttccagagaccgttctcttccgcgaacgaaatgagatccggggagccaaggcagttttcggtatcttccgggtcaaactcctggagtctcgcgtgattcgctgtgacatagcaggcatcgtccggaagccgcaccgcagcccagcggtgaccggaacaggtttcgaaccaccagatttcctttgagtcgacaaaggcgacaccgcagccctcaccggcaccggcagtctctacctgtttcccgagcagcagtacgccttcgcgcgctgaatggataaaggggagaacggagtcttcgagcgaatcctcgatcacaccggttttcgggagataggggtcgatcgcgagtgaggcagcgctcgcgaagatcgtttctgtcgcggtgatgccgacgcccgcttcgttaaaaccggcttcgccctcggatgcgccgtccgtcgcggagtctgagaccgaaaggtacgcgagtgactcaggcggcagaggccaggtgaagtcattccggaaggagcggaagacagctccttcagcgtttttcattgccgggtgatacacgagacgcttcgcgtcatccggtgagcagtcttcgttccgcgaaatataaagcgcgccgtcctcagtcgctttcggaccggcaaggatcgtggtgcagggcattcagtttcacctcgaattaagtaaaaaaacaggtgaaaacagtttagccgcagagggctgagccggaagggattcggggcagaaaaaatccggcggctcgggctcccgaaccgtcggatctgaccgttatgatgaaatctcagcgattaaccgagatgccggagcgcgaacttcacgaagaccgcggcgccgagcggcagaagcttgtcatcaaacgtcatgttctgcttatgaagccccggcgttacgccgacaccgacgccgaagtatccgttcttcatctcaggacgcgcgatcttatagaagtggaaatcctcaccgcctccgccgcaggccggggcaagcttgtcgtcaccggccacctcgcggatgcattcagcgagttcatccgtgatttcggggtcgtagttcgcggcagggcagagcgtcgcgaatttcacttcaaccgtggcgccgaacgcggcggcggaggattcagccgcgcggcggacttcctcgatcagctgcttcatgagctccgttgtctgagcccgcatatctatcccgaggtgagcggaagcggggatgatgttgagggcgccgtcattcgcgtcaaactgcgtgggtttcacggaccaggccatattgggcggcagctgaatctgggaaatcgcgttcacgattgccgtgccgacatagatcgagttgatgccgagatgcgggcgggacgcgtgggcgcttttcccatggatataaatgtcgcaggggcaggatgccgtgtggttcaccgcggggcagagcgtcccgacttcgaggtcctgaatcgggcggacatgagctccaaccaggtagtcgacgccgtcaagcacaccttccttgatcatcacattcgcgccttccagcgtttcctctgcaggctggaaaagcagtttcagcttgccctttttgatatttccgacgaggcggctcgcagcttcaagaagcattgccgtgtggccgtcgtgcccgcaggcgtgtattgccgttttctttccgtcaacctcaaaggggagagcgtccatgtcagcacgcagcatgacggtggggccaggaacgccggaatcaatgacgccgaggacaccattcgtgtttccaacccgatgagcctcaacgccgattttttcaaggtgatcgagaacgtactgcgcggtgtttttggtgttgagtcccagctcggcaagcggatgaagctcgcgccgcagctcggtggaattgaaaatttccgtcatgagaagcgtctcctccaaataagtgactgcagggagaggcggccgcgtaccgcgcagaccgcctttatttcagccctgaatcataccgcccgggaggaagacagaagagagactaggcttttccgttctctttcggggccggggtttccgtgtcccccttataaatccggaagtagtcggatacggggagctcctcggggttcggcggcggagcctttgcggcttccttcgcaatttccttcagcgcttcttcctgagccttcttcgcggcagcggatgccggatcaagcgtgtcttcagccggagcgtcagccttcggagccgcggcatcggatgccggatcaagcgtgtcttcagccggagcgtcagccttcggagccgcggcatcggatgccggagcggtttcttccgggctcttatcctgcggcttggtgcccgcggcaggcgcttctgcggaaggtgcggccggctgcgtctctgaggcaggcaccttttccggttccgctgccggttcggacggcggggtgaccgccggcttttcctcttcgagaggcggccaggcagcgagagcatcctcccgcatggaagcctgtttcttttcctgagcgggatctgcgggagcgggttccgcgggtttctcgtcagatgaaggcgctccggtttcaggcatcggccccggagtttccgcgagatgcatggatctcgagcggatcgcggcgattcgctcccggcgataggtccggatctgtttcatcacggattcaagcgtctcatcgtttgaacggtaggccgcgacagcctgatcaatatcgcccccggtgtccaccatttcccggatgagtttgacggtgtagcgtctgaaaatatcgccgatttcgcgcgcttcgtagggcgaaagcacattcagtctcacaaggcacgagcgggcagcttcgatcgcgggctcaaaattgacgaggtacccctcgatatccttcgcgaggagttcgagatgattttcgatcgttgatacctgagcaatgatgtgcaggtgcgggaatgcctcgcgggcgagatccgcgatcttttctgtcatcccgccggggccgacggcaatgacgaggatcttcgcttcatcagcgccggcggcctttagcagggcgagctggcttgcgtcaccgtagtacaccttggtgccgaagtgttttgcctgccggatgcggtccggatcattatcgataatggtcggcgtgatccccatggcaacaagcattcgggcaacgatcgcgccgaaatcaccgtagcccgcgatgatgacagagagatccggagccgcggcgagttcctcacggtcatcctcctcatcatcaagccgccgggcccggcgctggagccacttggacgcgagctgcatcaggatcggtgtcgttcccatcgagcaggcgacagccactgtgagaatggcggcccacgagttcgagagcacgccctgcccttgggcgagggagaagacgacgaacgcgaattcaccgccctgggagagcgagaccgcgaaattcattttgttcgcgatgcccttcagccgcatcgcgaaggccaggacgaaaagcatcccggtcttcacaatcaggaggatcgcaagagcgaggatcactttcaccggctccgacatgacgagatgcatgtcgatactcatgccgacggtcacgaagaagagaccgagaaggagctgcttaaaggtcgaaatctcggcttccagctggtgccggaaacccgagctgccgagaagcagaccgccgacaaagccgcccatggcggacgagagccctgcggcctgcatgatccaggcggagccgaccgtgaggagcagcgcgaaggccgtgagcatctcacgcgcgccgctacggatcgtgaaccggaggaagggcacagtgaggaatcggccgacacccaccatgaagataagggcgatcgcggcgcggatcaacgtgtcaaccgcgccggggtttgccgcgccgtttgaatccgaactccccatcgtgagcgcgagcaccggaatcgcggcaatcagcgggatcgaggcgagatcctgaaagaggagaatcgaaaaagccttctgccccacgggctgccccatcatgctgcgggatgagagctcctgcaccgccaccgcggtggagctcatcgcgagcgcgaagcctgacagcacggcgaccggccacggcattcccgcgagatcgaggagcagcgcgaagggaagcgcgcagaggatcatttgaagcggcccccccgcgaacaccggcagcttcatttcccagagacgcttcggatcgagttccagaccgatcaggaacatcatgagcacgatcccgaactcggcgaaattcatgatcgtctcgacttcttccacgaggccgagaccatagggacctaccacgataccggcgagcaggtacccgatcatggtgccgagaccaacccgggacatgatcggaacgaggatcaccgcggcgatcagcgcgaacgatatacccgccgcgatggagtttgtcgggggaaggagcgcagaggcgtgcgtcaggaacccgccccagaattcaaggagcttcgaccaggcgagttcaaacatggtaggactcccagtcagcgatgcggtcagcgagcgaatcgatgattgaagagaactgctcgggggtgagcggctgccgggaatcgataatctcgggatcgagccacttcgcgccgcagaaggtccacatgcggcggatcggggcctcaacttcggagatttccacttcccccgggaattcgccgtcgcggtacccggtgccgagtgacggaatccagaggaccccttttccctttacggcatcgcctccgtttccataggcaaagccataagcgagcacttcatcgaaccacttcttcagaagcgcgggcacgctgtaccagaagaccgggtgtacgacgaggataagggacgaatgagcgactgctttcctctcttcccacagatctattgaactgtcagggtaaaggtcataaagcgcccggatatccatttgagggaattgttctttcaatccctcaagcagcgggatgctgattacagagaaacggggataggggtgcgcgagaagagcagtgatcatcagtcagtcgatatagggtaaaaagtccaaagaaatgaaaggtgagggcgatattttacgggaaaacccacggcctgtggagccttttcgttcctatttaaagtactgatagagatatttgttacaaaattccgaattcgatcggtgttttcacacagaaaacaccgagattttcagaccggatccgctcgatcaggcgttccgcgtccgcttctgtaacggccacgcggacttcgacgctctgctcgccggactcaaagaaagacgcgcttttaagccatccgtcccggccatagccttccgcagccgggaaaagggttgcccccggaatcccgagactcttcgcggtttcgagaatccagttccccatgggacggccgtcctttcttctgctctgctcagtgaaaaacgaaatctgatatcccttctgcatggacagctccttctttaaaggtgacgaagcatggcaatggtgcccatgccggccagcgtggcgataagggatccgccgacatgaacgcagacctccatcgcggcgagcgtgaattcgccccgcgtgaggagagtcacggtttcagcggaaaacgtggaaaacgtggtgagaccgccgcagaaccccgtgacgacgagcagcctccactcgggtgacagttcaggaagcgctgcgaagaacgcgatagcggcgccgatcacgtagccgccgatcaggttcgcagcgagtgttcccggcgggatggcagggaagaggctgttcagccagagcccgagcgcccagcggagaacggcgccgcacccggcaccgaaaccgatcacaagaatggagagcagcaagattcaatatcctttgagagacgcggttaagcgccgggcgcttaaccgcgcggaaaatctgtctacagtaatgattttatgcccggtgagactggcggcggatagcaaaaaagcgcagggatcacatccctgcgcttctcagcagcatcctggcagatgccgcggcagattcagaccgtgttacggccagaggatttcgaccttcttatcgatcttatcggaaagggcgagaccgaccgggcaggcatcggcgtacttctgaatcactttcttctggctatccgtgtattcagcctgcggcatgcggatcgtgagcgtaatggaggcaatgcgatggggacgttccgccattgtgcagtcgcactcagcggtggcacccttcgcatcagcgccgttcgcttcagccgcgtaggcaatcatcgtaagcgtgcagcccgcgaaggcaccgagcagtccctccaccgggtcataggattcgccgagcccgtcaggtttcccctgatcaaaagtcagacggccgccagagcggggattttccgcttcaacacgcttgtttccaacgtaacgggcaacgatatcagccataaatgcagctccttagagagataaaaagaggagaaaaagctgagggtcaggaaccgacagactctcccctataatgcaaccggcgcgccgatggagtattccttcgcggcgcaggtttactgataactctaagcatacggcgttgcagaaaaaacgtgaggcagattccccctcttcctcagacgccaggaataaggagcaagtgatggacgcggcaaagactcttcagggcactccgtactgcgactgcctcgttattttcgaccccgaatccgaccggagtgtcgaaatggccggtgtctggagcgaggcggcaagaaacctcggcgcgattcctgtctgccgtccgctcgaggatctggaggcgggagagcttgccggaaaccggctgtccgccggcggctgcctcactgacgccctgattctttctgaaatccggggctacagcgcgccgactctcgatctgcttcttaatttcgtgattttcggcggtgcgattgcggcttcgggtcccagactttccggctcttccgcgatccggaatgcggagggacggaactcgttcaccgtccgatccgagatcgcccgggtggagcagtacacgagccgcgccgatccctgggatgagatcaacgcggatctgcttcagaaggggattccgtcacttcgcatgcggcgcccgggattcttttcggaaacggcgatcacccgggttgaaaagggtgtgtcgcttgatctgtcatccgggcgtgaagtctggcagatcgagctttcaccggatgagccgggctgggacgggattctgagactcccgttccccgcgaaatcgatcagggctctcacggaagaaacgcttgaactcggttccgcgattggtcccgttctgatggcgaagatcacgcgtcccgcggtgattgaggtgacggccgcggatacacccgagcgtttccccgcggcgtcagaagagggatggtgggtgaagcggggagaggaacctgatgcgctgctttcagcctctcaggactgggactcctctgccggcgaaggcccgcttctctacagcaccgaggcggatcgatcggacttccctccggtgcctgagggcggcacgctgatgctcgacctcgggaactctgccgggcagctcgcgctcgcgctgaacggaaaacttctgcagcccgctcaagggagcgatgggacgattttcccggtgaatccgaaggacatccaggataaaaaccaggtccggatcgcggtgaagcggacgaaggaagacgcggggacagaggatcacacggtcggcattttctcgcttcctgactggcaggtctcagaggcgggtcagatgaccgcgtttacgatctgaaaccgattctgaccgcctgatctgtgcaggaggtcccggatatcagagaaaacaaaacgcccccggattccttttggaatccgggggcggctgcattcttccagcccgggagagggcgggggagccgcagcgaggagagactgttacttcgcgatgttttcgcccgcgaccataccgaaggtcagagcgtcaagcacagcgaccgttccgaggcgggatgcgccatggacaccgcccgtgatttcgccgccggcgtagaggcccggaatcggctggtgggtcttcgagctgatcacctgagccttggtgttgatcagcaggccgcccatcgtgtgatggatcttcggggccacttcaacgccgtagaacgggggcttcgagatgttgaggccgttgttgaacttcagaatacggtggaagtccttatcctcaccatccttcacgaagccattgaagcgcttcacttcctcaaggaacgcatccttcttgatgccgaagtgatcagcgagttcaggcagcgtctgagcgacaaagacggtcttcgcggcgagcggagccttcacgaaggacgggttgatcgcgtgaacgatagcgtcgtcgcagatggcgatcgggtagttcttatccgtgccgatcacttcgagttccgcgtcgctcttgatcttgcggccggcgtgttcatccatgaagcgcttgccggtcttcttattcaccaccatgccgaggtccatgcaggcgtggttcgtgaagttcaccgtcacgccgaagccgtcctcatgcgggttgcaataggggaggaactgcagccaggagatctgaagcggggtagcgccgatttcgagagccttcaggagcacgccggcagtggcgcccggctggttcgtggagtcagtggacggcacaacgcgcggatcctggacctgacggaaccagatgtcgcgggagaaaccgccagccgcgagcatcacagcgcggcgggcgccgtagaccttacgcttgccggtcttattctcgacgtcatcgctcgcgagattgcggttgaagcgatagccttcgcggcagacaacacccaccacgcggccgtccttattcatcacgaagtcgtcaaacttcgtgcggctctgcatcttaacgttcttcagcttcgagagggtttcatacatcgggacgatgtacccggagccggaaccagccttgatttcataggaacgcggaaccgagtggccgccttcaaacagcatcttgttcggcacgaattcagcgccgcagtcctgaacaaacttcaccgtgtcgttgcagcggtcaacgagaacgttcagcagttcggtgtggttgatgccgaggccatccttcaggcagtccttgatgaagagctcgcgggagtccttgatgccctgagccttctgaaccggattcaccgggcaggccatgttgccgccgcagatcgcggagttgccgccgaagacgcccatcttctcaatcatgagaacggaaaggcctgccttggcagccttataagcgcaggccatgccggcgaaaccggagcccacgaccacgacgtcatacgtggcatcaaacttggtgttttcagccgaaacagcggcctgagccgtgagcggcgcagcggcaacggctgcggcagcggcggtgccggctttcagaagatttctgcggctagtttccatagaacccatgatttctctccagaaaattgatgagcggctggctgcgtacgtccaaccgtgatggaaatatagcactttggtcctaaaaatcaagactaaagtcctagtactttagtttatgttttccctgagttgttttttgtggccggaaatacgcagaaaagcccggtctgaacaggtatttgttcagaaaccgggcttcggggagccttctgtggccgcgttcagtaattcacggtatcggggtctagccccgtgaaggccgtgagcggcagtctgtcgatcgcgcgcatttcgtccagcggcagcgtgaagtcaaagatcgaggcattttcctcgatatgggctttcgatgtgctcttcggaactggcaccaccccgtgctcaagcgcccagcgaagggcaacctgcggaaccgtcttgccgtgcttcgcggcgatgctctgaaggagcggatcctccatcagcgcgccgcgcccgagcggtgcccagcccagcaccttcatgccgtgttcgtgcgaaaagcgaagcgcctggaactgcgggtagccgggatgaaattcaagtgaattcaccatcggcgtgatttccgcgcgggcaaggagcggcacaagatggtgtgggaggaagttgctgacaccgatcgcgcgcacagatccgtcgcggtacagcttctcaagcgcccgccacgttcccgcgttgatcgcctggcaggtaatcggctcttcatgcgtcgcgggccagtgaatcatgtagaggtcgaggtaagaggtgccgagaagcgccgtgcttttcctgaaggcctccagcgttttctcgtacccccggtccgcgttccagactttgtcgaccagaaaaaagtcactccggggaacaccggaattccgcatggcgatgcctacggcacgctcgttcccatagatcgacgcggtgtcgatcagacgatagccggcatgaatagcgtcgctaagcgaattgaggagcgcgttgccctccgggacctgccacgaaccaattccgaggcagggcattctgacgccgttcgatagctgaattgtgtctgctggcgacctgagcacggaagagaccctgttagagaagacaaaagcggattggccgccccggagattcagaccgcaatacgaggaggctattaccactatcgccccattttaggggatgaggtatgcgcttcatcaaaatcgccaaataaatcctttagatgcgggatggccgcatgaagtaggaatttaattccttcggattatttcttctccgtttcaggtcagaagcgggagaagaaccggtaaccgtacttggcggctgactcccgatggcttttagagataggggacagcagacagtggtagcagaacttcagcagatcatcccggtgatgaacattcgcggccgcgcgaagcttttcatagaaaggcgtttccttggcagctttccaccacttgtcgtgatagggatagagtttggagcgccagggcttttccgcggtggtgtagtgaatgacaacaggagactgaagcgcggactcaatcgtgcgtctcagagtccggtcaccgatcagcggggggagcttcggccaggtgtgcaccgtgaggttatagcggatatcgagcatccgaacccgggtgttcagaatgatattgaggcagtcctgatccagcattgggaggtttctgtgcgccagtgtgtcagaaacctctgcgttaaacgccttcgcgtcgatatttcggggataaaaaaccaccatgccggcattgaaatacttttccgggtatttcagatgcagagtggcattctgtcggtcaatgtcgtttttcccataggaacgtgagaaagtcaggctttcaggcacacaggccgcgggctcatctccctgcgcgggctgaaggagaggatcaatgtctccagccacgattgtgtcagcgtccagatagagaacagtctggtactcctggcagagtgtgggaatcagcatccgatagtaggtcgcgataggccagttgccttttccccgaaaactgttcccgggaaagtaagcgcttactgcttcagctacgttgataaagcgtaatgaaatattctgaggacactgtcggcgaagttcctcttcactctctgctggcaaatcgacatggaagcaaaggacatctcgttttttcccggatgcctggtcaatcagcgactgcaaagctaccgagaaatacgggacaaaacgtttgtcaaacgtatagacgatgcacgaatttacgtctgggaaagctttggggatagaggtgataacagacataacagtgaagacattccggggaattggagccgcccggcatccatccggggaagcgctctgaagatccgttattctacggcatcagagagggctcctcgccatggtttacccggcgcagaggcgaatgaaaattgccagtccggcaattgccggcacgggtctgcttgaaaaatcaaccggactatacgacactctaccgataagacggaatatcagcagttatgagcctcattcggaggcggaaggaggggaatcgtgggagatacgtttttttggatcgccctgggcgtggtactggcggtggttcttgcgattctcattatccgtcgggtgaggcgcggtatccatgcagtgcagggagcggcaaaagcggaaagctaccggccgtcccgcgaccgggtccgcgtcgggaaacgtccggtgcccgcggttccgaaaaagacggttaagccaaagccggttttcaggggaccgctcggtcccgcgctgatcgcgtttgggtttgatgatcctgccggttttatcacgctcttcacctgtcagccaatgaggacaggatcccttggggcgtttacacctatcacgggcgcacttcccgatatccggattcccttcgcctggcagctcggtgcagcctccgggatcggtgacaggggaaagaactcggaccgggcttattttgaattcgcctatccgccagaagcgaccccggaacagggaaacgccgtgctcgcaaaacacgcttctgaccctgtgactcagattttctgggataaaaacggaaagatgatccgaaagagcgctctgccgcccgaagactcttgtcagatgacagacgcgatccccaaagtgaaaagcgtgcttttcactaaccggctgcttcccgctctccgccgggtttgccttgaagagtccacccgtttcaaaggcctgattgaagcatcgcccgatgtgccgccagagtggcgtgagaaagcctcacgccttgaagcgttcgcgaagcagggcgaaatgccgcctgaagagaagcttcgggctctgatggatggggaaaagtcactgccgccgaaattccggctgccgcttcttcgcgtggcggtcccctttctgatcgcggccggtatcccctggagtgaggccgtgacgctcctctcccgcattgcggatgatgagagcggcgccaatggggctccggcgaagcatctcagcacgttccttacccgggtagcggcttttaacggccatctgccgaggtttggcgccgaggtggatgagacgggccgcgtgacgcagcttttctgctacgaagaaaaagatctgacaggcgcacctccggcagccgcccggagctctttaaaataaacaggttatctgaacaatgccctgactcaggatgccgtacacggtctgtcctgaccgcttatcttttcctcagaggaatttcccgctttgcagcaagctgaactgaaccccgagcagcgcctcgccgttgagaccacggaaggcgcggtctgcgtgattgcaggtcccggtgccggtaagacgcggacactgacgagccgctatgtctatcttgtgcgcgatctcggcatcaatccacagaatattctctgcgtgaccttcacgaataaggcggcccaggagatgaaggcccggatccgcgcgatgacaggggatctcgatctggggcagatctgtaccttccacgccttctgcgtccggttcctgaaggacgagggctatgtgatcggtatcccgaaggacttcatcgtgatcgatgaagaggatgagcttgagctgctgaatgaggtatacgaaacctttgggattcccggaaatctcatgaagttttcggccgcgatggatgtgatcggaaacttcaaggacgactccaattacatccgggatctggtgctgacatcccctgagtcgcttcgggagaaggcgcttcagtcaccggatatctcggataaggttttctacggctacctttgggctgagcggaagatcttcggactcgactttgatgatgtcatctgggcggccttctatatcctggaccactttccgtccgtgaagcagaagtggcaggaacggcttcagtacgtcatggtggatgagtaccaggacgtgagtaacgatcaggcggcgcttgccaatattctttccgaactgaatggcaatctcttcgtggtcggtgatccggatcagacgatctacacctggcgggggtcttcccctgcgatcatgctccggtttccgaagagtcacaaaaactgccgcacgatcaagctgatgcagaactaccggtcgctccccgcgatcatcggcgcggcaaactcgctgatccgccataaccgggaccgcttcccggtggaaggcgtgccgatccggcgtgacgcggatcccgcgaatccgagcctggtcgtttttgacggcgaaaagactgagaaagagtcactcgcctggttcgtcaaggcgctcctccatcttcataaggcgggccgcggctgggaagagttcgcggtgctctaccgctcgagacaaagttcgcgcgccgttgaggaagcgctcgtccgagccggtatcccgtatcgggtgtggtccggtgtcgctttctacgcgagacgcgaagtgaaggactcgctctgctacatgcggatgctgacccggggggacgacgcggcgttccttcgtacggtgaattctcccaagcggggattcggcccgaagaaagcggatgccctcaaagttcttgcgatgcgggaaggtatctcgtactacgaggcactgaagcgccacattgacgagaagcctttcaacacgaaggcgatccgggagtatgtggcggtcattgagaaggcgcgcgcgagcgctgccgcccgcaaggtgagtgatgtcttcaatctcatcatggcggactcggggtacgaggcctctctgcagctctcgggcgaagatgagcgtctcaataatctcgcggaactcaggcaggcaatcgcgaactacgagagtgacgcggatgatccgacgtcgctcccggaattccttcagcgggcctcagtcttcgcggaggatatcggagagcagaaggggcccgcgatgaagctgatgacgattcacgcggcaaaggggcttgagttcccggttgtgttcctttggggattttcagaaggtatcatgccgagttcccgcacgagcaccatggaagagatggaggaggaacgccgggtctgctatgtcggcatgacccgcgcgaaggatcttctgatactctgccactctcagggaacgagtgaggccagcactttccgttatccaagccggttcttttttgagcttgaccggaatctcgtgaagctggtacgcccgcttgaaccggggttggaggagagcgcgaaggaagccctgatgtataaggacaagttccttacaggggaaccgcttgaaagcagctcctggcgtcccggtgaccaggtcagacacaaggtgttcggagacggggaaattattgctgtcgcgaagtcaggtgccatgacgatccggttcccgacgctcgcgactccccggactctgatggcaggggcgcctcttgagcggatttcgacggccggggcaccgaccgtcgcggactcatccttttcaggagctccggttcccgaaccgtccgctgagccgggcgtgaaagatcagaagtaaacgaaacagattccagcagcaaggagatttagcgaatgtcacggaccgcagtggttcttttttccggcggacaggactcgaccacgtgtcttgccgccgcgctgaagcagtatgacgcggtgtacaccgtcggtgtcgattatggacagcgtcatcgggttgagcttgagtgcagagagcggatccgcgcaaggatcgagtccattcttggcacgcattccctgaaggatgatctgcttctcgacctgaaagccttcggacagctttccgactgcgcactgacgaagcccgaagcgattgagatgaacgagaagactcatcttccgaccacctttgtccccgggcggaatctgattttcatcacctatgccgcagcgtatgcctggaagcttggggcggaagcgattttcacgggtgtcggccaggcggactacagcgggtacccggattgccgcgagaacacgatgaaagcgcttgagctcgcgattgatctcggcatggaaacgagtctccggattgagcggccgctgatgaacctctcgaaagccgaaacctggaaactcgctgagacgatcggtggcgacgcgctcgtcagctttatccgtgacgaaacgcatacctgctacgagggcgatcacacgcactttcacgactggggctatggctgtgggaaatgcccggcctgcgttcttcgtgaaaaaggctgggaagagtacgtcgcaaaccttaaaggacggtaaccccttatgcggatcgggatcatcacaaataagttcgccccgtcgggcggcatggaacgctacgcccaggatgtggtgcgggagcttctgagacaggggcacgagatcacggttttcaccaagaaagctgatccggcgctcgatctcgtgccgatggtagagcttattgtctgcccgctcagtttcctgccgaataagattcaggatgagtcatttaactggtggctgaaccgtgaatgcccgaaacacgcgctcgactttatcctcagctgctcaagaacggatgcgggcgatgttgtggcctgcggcgggacgcatatcggatttcttcacgatgccggacggactcccaccttctttgatcgccgggcgatcagactggaaacgcggtcctttgagcgtgcgaagctcatcatcgctcactcgcagaagatggcgggagaaattgaggactactacgggataccgggtgaaaagatccgcgtgatctatcctccggtcgatactgagcgttttactccggtatcagcagagaaaagacttgaactgaagcggtctttcggtctgccggaggatcggattgtgtttctttttccatcctcaagccacgaacggaaagggtacccattcctgtcatccttcttcgagtccactgatctcccggtccaccttgcggtggttgggcgcccaatccataacgagggtgagcacatttcgtacctggggtacagcagggaaattgaaaactgctatcgggcggccgactatacgatcatggcttcccagtatgagccgtttgggcttgtgggtattgaaagcctgctctgtggcaccccgatcgtgatgacggacgagaccgggtgctgcgaggtggtgactccgcccgctgtgaccgctttcagaaagggggattcagcagatcttgcggccaaaataaaagagattgtcacccggggagcaaagcctctgactgagtcagaagtcacgcagagtcttcggtatgatccgcacgtgcagacccatgtgaagctcctgctggatgcctggaggcgcctggggaagagtcctggcgtctgagaagacgaatcacatcggatccggggaaagggggccttctgaactgactcccatttttaggacacacctaaaaaaagtgggagtcagttttttatgaaccgaaca

SEQ ID NO: 1390 - DNA, 2066 bp, Unknown
  gut microbiota DNA sequence
ccacaaaattttcctcaccctcggggcaatgctcgcggtaatccttcttaccgggctttacgcttttctccgcaagtcggcgatcacagattactcgaagaaacttcgtcaggcttttctcacacaagttcaggcggcagacatcgatacgtcgaacgcaactcctgagcagctcgcggaaatttccaagagttacacacttccgaaaaaaccgctccttgctaaaacggaaaatgacaaattcgttctcccgttaatcaccattgtcgccgttctcgttaccctgattccttctccgcaaaagtctcgtcccacttctgaggtaacggcgtctgcccctgctgaagtaccaaaggcagcggcggttagtgcgacgaatagcactccgactacagcggggcaggatacaaactcagggagtgagtctgcctcccggcctgggggctatgtgatgacttcgaatattaaggatgcccttaaaccgtatcgtttggatgaaactacggagcatgtcacgcagatactacaggccatgtatgacgggtctccctctcaagccgttgagaactcaatacgcaagcagcagagaccgcctaagggagatcgcggggcttcgcgcgctctgaataatgaaggtctgaatcttcttcataacgggaatatcagtgccgcagtggataaatttgcagaggctgtcaaggctgatccgactgacgtagaggcagtagataatttaggtttcgcgcttcttaaagttgaccgcgtaggcgaggctgaacgtgttctattggcggcactgtcacttgatccgacccgggctggagcttggtttaatttcggagatgcgatggcgagggatcaggtaaataccaagattgcgtatttgggcctgatggttggctaccactattgcaacgcagatcgcagggaaaagacgaagcagctttggaatcgtatgatttctgatccgggcactgaccctcaagtatcagcgacgatgaaggaagcgcttagcagtattcagcagcgtgaaagtgccggtaaaagtagataacggtaataaagtgagactctgaccaagggaggtttgaactcgttttcagttgtcctctagaaagccctgatgttgtttcagggctttttcttgtcggatgcgattagttttgaggcttcagtaaagctttcgtgcatcatcagttttactgaaatttaaattgcagaaaaacaaaaccccagccgtatttgactggggttttccgttcgattaacgaattttattagagcggagagacgctagagaagcggaagatgaattctggttcatcaagcgtgccctggagagacaggctggattctctcacgcattcattttcgataccgcgcaaaaaggtgccggagaacttgatgatttgaccttcagaaaaattggaagcggtattgaagaccgcagaccccggttcaatcagagtatggtctcccatgtcagagagggagttattccaagtcttaatgataatacccttcgccagttcaacttcgagaataccctttccgtcactgttagcgcctactttagtcacctggccaacccaatcagtaactttgcgggaccctatcgccttacacagcttcttatcacgcgcagctttcacaccgccacgctgcatgtcattcttagcatctttggcattctgttgtccctctgccacgatggtcacgaaattagcttctgaatccggcatctgaacagtcttctcctcaggagctggtgtgggagccgcattaggggcggcggtcaaagcgccggaggtgccggaggcgctagaagcgagcactcccgagtttttggtgtctggcgtcacaaacccaaagaggcacagagcggcgagacagccaacaccgtaaaccactgcagccttaccgcgggtgcagtcttttccaagaaacacctttccaggagcgataaggccaatgacaaacatcactaacagggccagaaagacaagggccaaaattcctgataagacttccatagtttttactcctgtagcaaattggtataggtg

SEQ ID NO: 1391 - DNA, 1449 bp, Unknown
  gut microbiota DNA sequence
ggagagcaacgggaatcagtggagcaatggcccaaagaaagttgatatggtccgggagtacaacttgagtatcagtgttgccttcaaactcaaatcctccctttttatagtcacggtagataaagcaaacagcagtcagaccaaccacaatggccagactgaatccaagaagtggaagtccgaacattccgatcagatccatgatttccatattggctagtttggcaacaaagacgttatgagccacaccgggattaaacaaggcaggggttgttgaacagacaatggcggcagctgcaatagctggtctgaatccggcgcgtatcagaatcgggatcattgaggggccgaccgcagcgcagagccctgccgttgaagggatagccacagcgcataatcctgtcaccagcatgcacgcaggaagtaggaagacccccagttttttcaaaggcctcgtcagaagtgctaccagatgaacatcacagcgtgtcagcgagacaacagccgcaaatcccattgcagtgcagatcgcaatgatcagagatccgcgggtcatggatgcgtcaaactgtttaaaagctaccatgggtttcagagaaaaaaccgccatggcaaggccggcagttatcaatgtgagccttgtttcatagcgttttattaatgcatagatcgtcgcgattacgacgactaatgcaaatccaatagtgatagtcataacgtctccttttttgctctttgtactcagggcttaattcaaaagatgaatgaattttatcaatacaaataaattcattaaataagtcaaaacgttagaacttatatccggtatccgatatcggacttcgaatatggggttgtcctctgtggcaggcgtatctgaatggggtagataatgggaaaagtccagtgactaaaccgaatggagtgtttgatggcgagttatcaattgaccggaaaaggagtcagtcgaggtgtggggttggcaacactatcgatcgtgaatttttttaccggtgggctttatatatggagtgtttttgcctcgcctattgcccagaaactcactcagatctccggcgtgccgacggtggcaacagatttgggaatcgtctttggtattgcttccgggctaactccttttctgatgattcctgccggttacctgaatgacagatacggacctaagccagggattctcttggggggaatcgccattggacttggctatatctttgcctcagccgctacatccacagcaatgttgattgcttcttatggaattcttgttggtggaggaaccggccttgtgaatggatgcacgatcaattcatctgtaaagcttttccctgataagaggggactagcgggaggggttgtaacggcagcttttggacttggaggagcagttcttccggctgtggctaatcattatctgtcaaaataactttc

SEQ ID NO: 1392 - DNA, 11332 bp, Unknown
  gut microbiota DNA sequence
aactttgcacttgatttgataattcacccgagaaaataattcacctcaaataaaaatgcccggacattgccgggcatttttagatcaagcgaggatttcctcagactccgcggatcattgtcacaatgacaagcgccgcaatgatgaagaagaaaaccgcgcttgtgcgccgcaggatgagagatgcctggggtgacttgaagaacgtccgggcccgggcaacggcaaatgtgtagatcgtcatcacagcgaaaacgaggaaagagtagacgatcgtcatgatcacgacctgcggaatataggcaagtttctgatcgatgaactggggaagcagcgagataaagaagacaagcggctgcggattcgtgatctgcagcataaaggcttccgcaaactgcctgcggccgttatgagccgggatcgctccgtcagcgatgagagacgtggcaggcgctctccaggccttgatcccgaggtaaatcaggtaagcaataccgataaaacggagaaccgtgaaaatcgtcgggctgttcgcaacgatcaccccgagacctgaaaccgaggcggtcatcagtaccagaatgccgacagcgagtccgacccgacaccagaagtttcctcttagtccgccttgaattcccgttgtgatggcataaacaacacccgcccccggagcaaaaatgttggcgagtgaaataacgatgaacatgctgaaaagggaaagattaagcatcgggcgtcctgtaaaacagtttcagccggaatctgaggggaaaatccggctgtacgatggaaattctaacaaagcgttacaggaaacgcctcacctcccgcactcccggtaatggggcgtgcatggcgggtaaacagcggttcttcagacttcattcctctgataagctcacttcctcattctgaaaagcaacgcattcatggatttcgcctcttactttggaaacctcggcctgtttggcgtcgcgctgagtgcctttctctcgtccacgattcttccgggaacgagtgaagcggcggtgattgcctatgaggcggctttcccgggacgcacggccgcgcttttcctcacggcaacgctcatgaatactgcgggtgccatgacttcctgggctctcggacggtttattccggagggaaagaaagtgtccgaaccgacgctcgcgaagctccgccgcttcggaacgccgcttctctttttctcctgggtgcctgtgatcggggatgcgctgtcgcttggcgcggggctcatccggacaccatttattccagcgcttcttttcacgcttcttgggaaaggagcccggtacgcggcaatactcggactgttttctcttctgaagccctgaaaaaaacggcagagatgaactctctgccatttgtttataccgatttcctgttttactttatgaggttaagcagggaaccggtgtttgggatttctgaactgttttcgacgggacgctcaggcgccggaaggtcgcctagcggatccgcggggaccttgctcttagcggctttggcgggaacggtcttgttataggcggcagcgacgcgtctcacatccgcgagtccctccggatctttcgcttcagccgcgacccggtaccagtcataagccttacgaagatcttttgccgttccggttccgttttcgtagaaggaaccaatcttcttgatcacggcaagacgcggcgggacattctgagccgcaatttcaggggagggcgctgcgatgaggtaccactctagcgctttcgccggatccttcttgaagtacacgccgttctcatacatttcgccgatccggatagcgcttgtgatgtcacccgccatcacgcccttctgataccagtcaagcgccttcggatagtcaggcttcgcgccgttcgcggtatccgcttccatctcagcaaggtagcggggggccttgaagtttccgagcgtccaggccttttcataggcttcacgggcgagcttcagattatagaaaccggaatcgtggtttctgtagatatcacccatcaggacgtaggcgtcatcatcgccgcgggccgctgctttcttgaaccagtcaagcgccgtcgcgaaattacggcgcatgcctcggccttccatatagatcctgcccacaagggtttccgccggaccgtaattctgatctgcgcttcgctgcagaagattcagaccatcctgtcccttagcgagaagtgaaacaccgccgaggaagaagcgacctttataggtgtcgttccggttttgttcgaggagccactcacggatcgccgggattttgtaggcggcgtcaaacccgtacatatggtcgccgtacgcctttccccggctatcagcattggccgggatcacagttccagccgtaaaccggatgaaattgattggtttcccttcgctgtagagtgacttcacagcggcgttctgcgaggcaagggggaggcgggccgaaaactccgtctctccgatatccgcaccttctttctgaagcaccgtgcggagcgctgccatcccaaccgaggccttcgggtctccggcggaggtcacataggtaaagtgatctgaggcaagcggcttcaggagatccgctccccactggctcgacaccatcagagaacccgcaaagagatccgggttcacggtgttgaaatagaaggagagcatcccgcccatcgactggcctgtcgtatagacgcggtcccgatcgacgttatagcgatgcatgacggttttcagaagccggtacgcaatcatcgcttcaggtgaaaccgttgaatcatcccgggttgcggcttccggtcccttgaatgatgggacaaggacaatgaccggcccctttgcctgggtttcaggcgcggcccagataatgccgccccaaccctgcatcagaggggctttgacgcccttgccgacagtgctcgcgtccgccataaagagaacaagcgggcagcgttcctttttgaggcagacttccggaacgtaaacgctgtagtccatttgctggcccgagacaccgtcgtggaaagtgccttccgtgaagagcgaggcaagagagtcgcggcgggaaagcagttccttatcgaaggacttgtccgcaccgccccattcgcctgaccaggcggagcctgaagtctgggaggcagaggcagtgccggcagccgatgcagcgccggatgacagagcaagtgcgaggctgaggacgaaagcaagttttttcatcatggatctatcgtctgaaactcatattcttctgagtctaacgcggaaaagctctggcgaaggcagaaaagccgctcgcccagcggataaaacctctcgtggatcccctgaataaggcagtcttcagcggctcgcctgacagatctgaaggagatgactgctgagcggagtcttcagccgccacacaatattgatcggagcggatccctgatgactgacgtacaccgcttctccgaggcacgtatagctcatagcggatttcgtctccggatccgtccttcgttcacggacaaagaggaaaacgcggcttcccctttcctcatgatggaaatagcgatccgctgtttcgctcgtgcttctcgtctgagactggctctgccagtggaactcccggtcgttgatcgcgtagtcctcataccgggtagaagaggtaaagtcgctttctgacttattgattgtgatgaggaaaacgtcagccttccggtttttgaagtacttcacgccttcgcgccaggtgcagagccgatccatcgcgatcaggatctggtttcgggtataggtgcagcccgtttcaaacgggataccgtccggagccgggtcgcagatcactggaaccgcgtttcgactgtgttctgaaatcgtgagcagatcaagaagttccgaggcgatcacggggttctctctcagttcctctatccgggacaccggatccgcggtgtccttttgacccgagcggaggagttccgcgaacatctctgtgagacgccgctcccgatcgctttcggtttccacctccatccggagatccggggtgctgagaagcagcctgatctgtcggatcagttccggagagtcgatatcggcccaccagcctttcgcaagagctttattcgcggaaagctcaaagtcggtcagcgggaaatcttccctttttccagcgtccgcgcagcatcgggcaaaagagcgttttgcctgaatgtagaaggatttcgcggtaagacggtaaaaacgcaggaaattctgaagtgtcagcgcttcgcccgagtcggattcgaagttccggatcagagactgcatccgcgattcgccgcgcccaaagaactgccggatgttttcaagaatgaccgcctgagcccgtttctcgatttcaatcacacagccgctcgggagtcccgggaaccccgtctggatctgcttcaccgtgccgccggtcgtgacggagaggagagctcggaaccgctcttcgaagttgtaccgggcgtttgcctggccgacaaaatcgagcaccgtaagacagtccttctgatcgccgtatttcctaagtccccggccaagctgctgaaggaaaactgtgaggctttcggtcggtctcaggaacaggaccgtattgatgcaggggatgtcgacgccttcgttaaagacgtcgaccgtcattagagccttcagctttccggtttccagatcagacgctgcactcgatcggatcccgtccggggttgtgccatcgatcacttcagaggagatcccggcctcgttaaatagcgctgccatggcgcgcgcatggctgacgctcgcgcagaaggcaaggcacttcatcgaattcaggtctccgacctgtttctctaaagccttcagaatgacgttattccggaggccagccgcgcgtccctcggtatagagctcggtgagtgcgtttgagtcatagcggccgttccgccaggtgacgttctcaagcgacacggggtcatacaccacgtagtactggaaggggcagaggagaccatcctcgattgcctgaggaaggcggatttcagcggatatcccgtgatcgaaatactgcagaatgtcctttccatccatgcgctcaggagtcgctgtaagaccgagaagaatatccggtctgaagtgaccgagaatagcctgatagctgtccgctaccgcatgatggaattcgtcgattacgatgtagtcgtaatagtctgtgggaaaacgagcgaccaaatcccgattcaggctttgtaccgaagcgaaaagcacggactcatcctccggcttccggccgttcaccaggagatctccgaactccggttttccgagaaccgccgcgaaggcaaactggctctgctccagaatttcccgccggtgcgcgataaagagaaggtgcggctcacgccccttctctgaaacgaagtgcctccggtaattccggaagtcaaacgccgcgatcagtgttttgccggtgccggtggccgcgacgacgagattcttccggaagccaagggcccgctcggactcgagtttctcgagaatctgtttctgatgctcatagggctcaatatcaaacttcatactgagcttcagtggtttcccttttgagagactccccgcgtctgagagcgccgcctcgactgccgcgtcatcctcttttgttccccggtacggcgtaaaactgccgctttcccagtaacgttcaaagttagacgcgatctgacggaaggtgtccccgagctcagtcttcgtgattttgacgttccactcacggccggagttcacggctacccgggtgaggtttgaagaaccgatataagccgtgctgaaccctgtgtcgcggtggaagatataggccttcgcgtgaagccgggtaaggccggggttcagctcaatccggatatccccgccgatttcctgcagccgcctgatggcggcgagttccgtgcagccggtgaagcaggtcgtgatcacgcggagtttctttcccgcctggcagaacgcggtgagttcatcgagcatcggaccgatgccggaaaaccgcacaaaggccacgagaaggtcaatccggtccgcggtctggatttcggccttcagttcatgaaggagattcgcggatccccggtcagaatcggtgatcagcgtcgcgtacgtgacggaggtggaaggacggggaagggcagcccgcttttcggcgattggatgcgcgggatccgctttcttctgaagggagagcagttcttttggcgggattgcaaggagcgcgtcgtccgtgactgcgggtgtcgagtcggaaagcatccggatcagacggttcgcaaggcttacctgacgctcggccgcggtttcgccgatagcctcgtcatcgtttgccgcgtcatccgccgcggcctgcagagccttttcaatcagctctccaaggtaaacacgaaggagcctcgggatgccggccgggtccggcgctgtttcttctgtcaggtacgccccgctgcttcggattttctcctgcagcacttcagtcatcagggattcataaagcccgcagggcagggcgggaaggagtggcttcgtatccggcatggaaattcgtaacgtcaggtttttcctgcagcttaccagggggacaggggacaggatcctccaatacgggaaatccaggagactgcgcgcagaaaacccgaaactctctgaaaaacgactgaaaaaatgccggggcagattaaagccggataaagttcaataccaaatacttcaataatcgttattgtcacacgctgaaatcagtctaatgccgtgcggatttgtggggaacgtcggaaatccgaaattctgaaacacgttttaacagaattgaaaatgctaccctctccaatccgctaaaattctgcacaatccgcaggaacaggccctgcggctttttgtgctgaataaaaggcatagcggacaaaagctctgaaacgcgttgcgaggaaggaagcagtggatattggtaaacaaaaactgaggaaatgggcgtcgctcctgctggatacgggaaaacggagcaacctcatcagtttcaaggattcgaagtcctcgaccgttgaagtgctttcgccgtcgccggatgaattgtttgtgaaaattcagaaggacgcgacgtttgaggtgtttgatccgcggctctacggacagctgcttgaagagccggcagaagagaattcgggtgaggacctcttctccgaaaaccctgccccggcaccggtaaagaaacccgcggaccgcaagaccgcttttatggagctctatcagaagaagagcgagaccgcgcggaaaaacgaaatccttgtatggagcaacggctctcccgctacctttacggcgctcaaaaatatccgccgcaaggcgaagaccctgcttgaagaaaccggcgttaacgtcgcctacatggcgtttgggttcatccactggcgggagagtgagtcatcgtccgaatttttccgggctccggttctgctggttccgatccagctcgatcagtcgtcagccgtttcaccttacgttattcatacgaccgaggatgacgtgatcgtgaaccccacgttcgcgtacaaaatgcaggaggagcaggggattccgctccccgagtatgacgaggagacctataagtcgctctcggactatctcgccgcgatcaacgaaatggttacccgtctcggctggaccgtgacgtcagactgccgcatcgggacgttctcgtttcagaagatcaatatgtatcgggatctctttgataacgcggacgaaatcctctcgaacgacaacgtgaggatactgattggagagggcggctcatcagacggcaccgcagcagaagaggagcctgaagacgctgatatcaagaatccgcttaccgaactcacaacggtgctcgacgcggactcaagccagatcggcgcgattgagctcgccaaatccggccgcagctttgtgctccaggggcctcccggcaccggaaaaagccacacgattaccaacatcatcgcggaatgcctgagcgatgggaagaaggtgcttttcgtatcagaaaagctcgccgctctgaatgtcgtctatgaaaaactccgcgcggcgggtctcggtgacttctgtattcagcttcacagccagaaagcgaataagaaggacttcatcggtgacctgaaccggacacttctcacgccgaaaaccgaggtgccggctgaggcggcggacgaaatcgccgtaaaggaacaggcgcagaagcagcttgacgcctatgcggaagaactgcataaaacgcgccctgtcattgaaaagaccctttatcagctctacgaggtctacgcgtcgctccgaaatgcgccgaaagtcttttgggcggtgcctgacctgcagaccaaaggccgggacttcctcattgaaaccgtgccgcttcttgagcagtttgtggacttcgcgccttcgattggctatcgctaccgagagaacgcctggttcggctactcaaaaaccgatacgacttaccaggcgaaggctgagacgcagaagaacctcggagacgcttccaaagtcctccgggcactcgtgccgcttgccgaagaaatttcgaagaagtatggggtcgcctgttcgtcaattgaggatgcccggttctggcaggagttcttcgccttcgcgtcgaagtctgatgccattacccctgcgctcttccagaaagaaaacttccggaaggtgacagaaggactgaagacactcgaaacgatcagctccgatatcaagacccgccgcaaagcgcttgataccaagttcgatgccggaatctttgagctcgatggcgcggctgtcaatgagaagctgatcactcagttcgatggattcttctcgcggctttttaatggcgaatataagtccatcatccggaagctcagaagctgccggaaggacggcgcgaaaccgtctttcgaagaagcggtggcgcagactgaggcgcttgaggtttatcagcgaaagacacatgaattcaaaaccgcggagactgaaatccgcccgttcctcgggactgcctacgcggggctcgacaccgactgggcctattttggaaatcagcttgggactctgaaggaagtcctctccaagggagtttcctttgggaatatcgcgacttacagtgacttcctttccgaaaggaaggcattcgcggacttcgcatcagagcttcaaaatgttctcagcgcggaggccgagactgcactttcaggcgtatcagacgcttttgatccgaaggtctttgatcttgggaaaacggatggaccggcagcccttgataagctgaaccgctgcctggcgtctgcatcccagctcgacaactggtgccacttccgggcgcttctcgaacggctctcgacgcttggcattctgccttatgtcgatctggcgattgaaaagcagatcgagcctaaggatctcgtcagcgcgtttaagcgtcttttcgtcttccagtggattgattcgattctcgcgtcaagcccggttctctattcctttaaccggatttcgcaggacaaggcgattgaggtcttccgtgagaaagacaccgaacaatttgaactgaataaagaaattatcaaggcgaagctttccgctgaacgcccgtcgcttgatcgggtgccgcgcggaagcccggttgccatcattcgtcatgagggcgaaaagaagcgccgtctgaagagcatccgaacgcttctcacagaggctggcgacgtgattcagacgctgaaaccttgtttcctcatgtcgcctctcagcgtgagcacttatctcacgaagggatccgtgcatttcgatgtggtgatctttgacgaagcgtcgcagatcttcccgcaggacgctgtcggcgcgatctaccgcgcgaagcagctgatcgtggtcggtgactcgaagcagatgccgcctagcaacttcttcaacgcctcgattgagtctgatgatgacatggatgaggagactgaagacgtcacgaactttgagtcgattctcgatctctgctcgacctccatgcggcagctgcgcctcctctggcactatcgcagccgctacgaacagctgatcgcgttctcaaacaagaatttctacgataatcagttgattacgttcccgtcaaccaagactgacgccaagtggatcggtgttgactactaccactgcgacagtctctttgaccgcaggtctcacacgaaccgcaaggaagcggagtttattgtcgacctgatctataagaacttcgagaagttcccggaccggagtctgggtgtggtggcgttcagcgtcgcgcagcaggaactgattgacgatctgcttaccgcgcgccgtcagacgcggcccgagatggagcccttcttccggaatacggaaaatgaacctttcttcatcaagaacctcgaaacggtgcagggtgatgagcgcgacacaatcatcttcagcgtcgcttacggcaaggacgcccaggggcggctcctgctcaactttggtccgcttaaccgggcagggggagagcgccgtctgaacgtcgcggtgacccgcgcgaaatcgaatgtccagctcgtttcctcgatgcactacacggatatcgatctgaagcggacaaattctgaaggcgtgaggctgctccgcgaatatctcgactacgcggagaatggcgacaaagcgctggagcgttcgatcagcgttccctctgacgaccagttcgactctgacttcgaaatggaggtctgtgagttcctgcgatccaacggcttctcggtggactctcaggtcgggtgctccggattccggattgaccttgggctccggatgccggagagctcggactatgtgctcgcgattgagtgtgacggcgcgacgtaccactcctcgaagaatgcccgcgaccgcgatcgcctccgtcagcagattcttgagcggatggggtggaagttccaccgcgtctggtcaacggactggttccggaaccgggcagaggaagaacggcgcctccttgaggcggccacaaaggcggtccgaaacggtgcgtcctacgatcccctgagtgtccgggattcagcggacacttccgccaatcagaaaatcgacacggagaatgccgcagcctgaagtctggccgattttcagaaagcagaattaggtgcttccgcttacttaagacaaattgtctgaaacaaaagatccggggatattcctccccgggtctttttatatggcgaattatcacttcaagtgcaaagcctgagaaaagaatagtggcccataaagcttccataataga

SEQ ID NO: 1393 - DNA, 405 bp, Unknown
  gut microbiota DNA sequence
gctgcgttactgagaattttacttcccaacaactagttaacatcgtttagggcgtggactaccagggtatctaatcctgtttgctccccacgctttcgtgcctgagcgtcagttatgtcccaggaggctgccttcgccatcggtgttcttccacatatctacgcatttcactgctacacgtggaattccacctccctctgacacactctagtcgagcagtcacatatgccattcccgagttaagctcggggatttcacatctgtcttactcaaccgcctgcgcaccctttacgcccagtaattccgattaacgctcgcaccctacgtattaccgcggctgctggcacgtagttagccggtgcttattcttagagtaccgtcagcaacaccctttattcgaaggtg

SEQ ID NO: 1394 - DNA, 586 bp, Unknown
  gut microbiota DNA sequence
aaccggctgccttttgctcaggtcaaccaatgaatggtttatcagtgatgctcgtgcggcgagaaaacgcggtccgcggaagccactgtaatccgatagtccgagaacacgccttccatcgattcgcgctgcgctttgcggtgctcttcagaggtgaggaaggccttaacggattcgttatccttccagaccgagaggctcaggaccttgttcggttcggacacggactggaaacgttcagcgcggacgaagcccggaacatgagcgaggtgagactgaatctgctcggccttcgcgaggaaaccatccttctgtccctcaagcagagtgacttcgagcaggactacaacatcagccatgagtttctccttaactttgaaatggttcaattaaggagagtacatcacagctatctgaagccgatctgaagagaaatttttccttacgtttcgaccgtgcctcaaataccggcgattacttcttccggtccctgggtatcgatattgatttcagtccacgtctgatgagcgtattcctcatgcttcttcagcgcgctgaggtcagacggaggcggaatcgggcgtcc

SEQ ID NO: 1395 - DNA, 194 bp, Unknown
  gut microbiota DNA sequence
ttcatctttgcagagcgctgtgtttttagtaaacagttacagccaccgattctctgagacctcttcgccctttgggtttctctcccatcaagctacaaaggcacaccttcttccgaagttacggtatcaatttgccgagttccttctcccgagttctctcaagcgcctgagcatattcagctcacccacctgtg

SEQ ID NO: 1396 - DNA, 4508 bp, Unknown
  gut microbiota DNA sequence
gagtggcgaaagttattttgacagataatgaaacctgaccagcatctgacagttttacaggacgaacagaccgctgaatcaaattcacccctagctcagactcaaaatcatttaagcttctcgaaaccgcggattggctgattccaatccgttgagcggcctctgtgaagcttcgggtttctgccaacactaaaaaaatccgtactctgttttgaaagagtaagaatgacggattggatgatgtattgcagcttttcattcgtagtccctgaattattgttagctactgaattacttcagaaaatatcttatcccttgaaaaatcatctgacatgataaagaggctaacactaatcctgttattttactaagcattgctataccgttccgaccaagaacatgtttcacttgatcgctcatgtacagcaggactcctacgcacagacaagagagacttatagccgtcagagttaataacttcgatccgatcccttggatttctccccccataacaattaacgttcctaccgagccggggcccagagtaataggaatcgcgagtggaacgacggccaggtcaagtatggattttttagcgtcaggtacttgtatttttccatccaccagtgaaatcgccgataaaaagagcagggctccagcgccgatacgaaacgcgtctacactgattcccaacagtttaaaaatttcctggccgaagataaagagaatagcgctgatcaataaaacgccaacagttacgcgaatggcaagcgcatgttttgtttctgtattttcctcatcggtaattgtgagaaatacggcaataacaaaaaacggagttaggataaagaagaatttgctgaagacagatacaaaaaccggtaaatccatattccctccaaaaaaacgtggcagaggtaaaccctgccacggaagaggattcaaaccctgttttttagaagaaaatcgtccgaatcagtagaccagcgcaaaccgcgcaaaatgttgacactagtcctggacggagatatgagtggttgataaccgcttttccgatcttggtggtgccggtttcatcaaatgcgacccccgccagaagaacaccggttgaaggaataagaaagtaaccgcaaaccgcaggatacatcgccacaagaagcaacggatccaaaccaagagccagtcccaaaggcatcaatgcggcaactgttgctccctgagaatgtgtcaaagcagatacaaagaacagagcaagagcaaacaagtagggttgagaagaaacaacagacgctacagtttccttgatgtagggaagattgttagcgatccaggtatcactcatccaggccagaccaaaaaccgttacaacccccatcatgcctgctctgaaaaccgaagctgagataatgtcatttggcttggctttgcagaaaataaccatcagcgcgccagcaatcaacatgagaatttcaatcatgttagtcattgacacttgcgaggctttgcctgccgcattagtaacatgaggacgaagttctgggaatgtaccaaccagaaccacgaccaccgctgttacaaggaagatcacgactgaaagttttgcgctgaaagttgatccaccatcaacaccaattgctttcgccttttcagaattggcaaaaagtccttcctgaaccttctttagatattccgggtcttcagataattctttccctcttttgcaaactgaaagagcaccgaacattaatccaataatcgtggccggagcaacgattgctagaatggtcattacggtcactccttttgcacctaatagagcaaccatagcgactgttgctgcagaaatgggtgaagaaggaacagcatgctgtgaagctatcactgagattgaaattggtctttcagggcgtattccggcctcacgcgaaacttctgcgataacaggaagaaggctataaagtacattgcctgttccggccatgaaagtgaacagccacgcaattaaaggcgctacgaaagtaatggccttgggttgttttcttaaaagtttttcagcgatccggaccaagaacgccatacccccggctgattgaagagtgctggccgcaagcacaacactcatcatgatcagcatgaccgcgatagggggagaggcaggagctaggccgaatatcaggattaatgccatcagcccgacaccgcctgccataccaaagaatatgccgccatatcgggcacctaagatcatcgcgaggatgactatacagaactcggctataaacatttgattccctcggttacacagccgtcctcttcaggacggctgtgggagagttggaggaactgactacgcgcaggccttcgttacttctttttccagcaaatccttagcggctttaactttctcattacgggcagcaaggattgactgatctttttcaatggtcgcctctatcaaatccaactggcgggttacttcctgagcagcagagccgccaatgcatactttggactgagcattcttaacaggatcaagggcgttattaacgtcatcctgcgtcatcttggaagtgaacccaaacatttcctgacagaacccattaagttcctcaatggtgatttcgtcagcccgtttcttatgctcattcatgtatccgacaagatgagccacgatttcatgagcttctcggaaactgatttcatcttttcgaaccagataattggctaattcagtgacagtgcagaaattgcttttcgcgctctgcaacattctttctttattgattttcagatctttcagcgtaaccttcaggaggtcaatctcagcaatgaaatcatgcattgcagtccagaaatagcgcacggattctgtacttacatcacggcaatgcatgtagggaacattcttaagagctccaaagcaggaaacaaaaaatgcttccaaatgagctgccttcgacttgacatgctccaaagtcatcggatttttcttctgcggcatgatcgacgagcacactgcaacggaatcatccacttcaatgtatccgtattccggggtcgcccacagatacatgtccatagccattcggctgaaagtgcatgttgccatggacattgctgctgccatttcaagggcataatcccgcgatgcgacacaatccagagaattctgaatcggtttaataaaaccaagcagttctgcggtgtaatttcggtcgatatcaaacgtggttgaccccatggatccgccgccaaggggacacagattcaacgtattccaaacattactgaagcgggcgtagtctctttccatagcgttcagaaccgcggagcagtaatgcgctagcgtgattggctctgagggttgcatatgggtataacccgacattacggtatcggtattttctctggcgagagctaacagggctttacggagagcaatgtaatgctctgacaaacgcaggaagaacccccggctgtccattctggtaaccgtggcaagcagatcattgcgtgatctggctgtatgttgctgtccccctaccttaagcgaagtcttttgaatgagatagcgctcaaaattaaagtaaagatcttccacgtcgggagtgatttcgaattgcggatcgtcctgctgcgaagcgagatcctgagtcactctcagaatctgagccgcgacttcatgagaaatgatcccctgtttagccaacatgaggacatgagctttattgacatcaagaatggtttgataagagcgggaaagatctgactgaatcccaggccgaataaggtattcaacaacttctttagcgggggcctttttgatcttgccgcgctggatagcttctgccatagtgttgctcctttagatatgggtgagtagtacgttacctgccatgaacaatttaataattcgaaagaattagttctatttttattcgctgtggtacttcgctttatgataaaaaatcataatagggcttcatagcgctgaagaaatcaagtgattgtgcttcatataaaagtaaacttaatggttaaatatcaacacgttaaataattaaagagcccgaatttactgttaacttttattcatgattcacttaactgcatctagacgaattgcttgtaaagtgagtagatccaaagaaataaataagagtcaatttcattgatggttgacaaatttttttccaatattcgcatcagggattatttgtcactttgaggtctacgtcggttcatagatttataagtgccgcacgctgaacctcgggctcgcttatctctcaggcaccgtgatcgcgctggaccgcgagaaggggaaggcgctcgtgaagaatgccgcggacctggggctgatgacgccgcgtcgatgctggagagcctcgtctaaaggagagctggatcaggaggacaccgttcctccatccatcaaaggagggtgtgtaattttttgtgggcggctcgttcaaggttaatcgatgtagggggtgattcggtcacca

SEQ ID NO: 1397 - DNA, 1041 bp, Unknown
  gut microbiota DNA sequence
attgcctatagataaacgattctttaacatccaaaaatcacttcaatgttacggagatttattcaagtctggcgtactatctgcggaaaattctctcaggccgctcatataaccgcacatttaaagtcagatataacggaaaccgtacctgtttcaaacgatttatgaagtgtgatgaagagaaaacagcgaccattcttgtgatctggaaagtgagggaaaaagtgtaggtgctctgctgtgttcatagaaaaatgatagttgctatgagtttctaacagcatctattagtacctattaggaaatcatagaaatctggggggtctcagttctgacatcgactcttcctataatcaagggctgttggttggttacagaaaatcggagagaaatttcaatggcaatgactgaacttgagaagctcgacgcgggtcttccttatgactttatggatccggaagtggatgggagaaagctgcatgcgctttcctgcgcccagaagctgaatgccattccgatgcagaacgctgcggaacgcgaagcggctgtccgtgagctctttggttcctgcggcaagcatccgaccgtgctaccggtctttaattgcgacaacggtctcaatattcatgtgggtgatgagttcctcgcgaactacaacgtcacgatcctcgatatagctccggtcacgatggggaacaacgtgatgatcggaccgcacacgctgatcacgtcggtcggtcatcctttgtctcccgctgcccgtcgtaagcacatgggcattgcgaagcccgtcaagatagggaacgacgtctggatcggcggcaacgtgacgattcttcctggcatcacgattgggaataacgtcgttgtggcggctggcgctgtcgtcacgaaggacgtcccggataactgtgttgtcggcggcgtgccggctcgtattcttaagaacatcgagaacgatgtggatgacgccgaataaaacgacgaatagtttttattgagatcctatgtgtttctgatagatcctaataaatcctaata

SEQ ID NO: 1398 - DNA, 31158 bp, Unknown
  gut microbiota DNA sequence
ggctttctctgtggcgggaaaaccgcttccaagactgcggccgatgtgtctgccgtaattgagaaatccctgtcagataaggatctgcgtacgattaccgtagatcgcggaaaagaattttcctgggctgaaaaactggagaaagatctcagaaccaaagtgtatttctgcttgcctcatcatccatgggagaaaggaagtaatgaaaatacaaacggacttcttagagactttttcccaaaaggaatgagtatcgataaaatttctcaggcagaagttcagaaacggttcaatgctctgaatttcagacccagaaaacgtctcaattggaagtgtccggctgaagtcttttattcagtaactttgcacttgatttgataattcaccatataaaaatattaatcagacggttagatatattaacttcaagctttttcttagttgcaggaataagaatccgcttaggttcagttacaaatttaggtctctctctgagattttcagacaagttcatgataattttttgataaccggaagtagtatcggtacttaaactaaagtcgtaagttcaattcagttcaggagaagctgaaaatgacgatttccaaacggacgctgctgaagagcgtcggggcgctctcaattggcgccgctatcagttcgctcgaccctgtggaagctgccacaaagtcgctcgaacaggctccggttgttggcatcaagcgggtttctgccgcccaggctgacaaacatacggccaaggtttatttcacgagaaagatcgatgctgagcatctgatcaagctctatcacctggtgaatcacgacatcaccggccgtgtgggcatcaagctccatacgggcgaacgccacggcccggatatcctgccgcgcgatatggtgaaagccttccaggctcaggtgccgaacagcacgattgtggaaacgaacaccctttatgaaggtgaccgctacacgacgaaggatcacctcgaaacgctgaaggtgaatggctggacgttctgcccggttgacatcatggacgcggatggcggcgttgatttcccggtgaacggaaagcacctgaagaaggtgacgatgggcgctcgacttccgaattacaactccctcattgtgctcactcacttcaagggacacgccatgggcggctttggcggttcgctgaagaatatcgctattggctgcgcgtcaggtcaggtcggcaagcgtcaggtgcatggcgttgccggtacgccgcctgcggactggaacgcctggcccgcgaaggaccactttatggaactgctcgcggattccggcaaagcggtctgtgatcacttcggccgccacattacgttccttaacgtgatgcgccgcatgtcggttgactgcgactgcgccggtgtccgtgcggcgcctccgaccattccggatatcgggatccttgcctctaccgatctgcttgcgatcgatcaggcctctgtggatctcgtttattcgctttccaagaagcagaatcatgaccttgtcgaacgtatggaatcccgccatggcctccatcagctcgacgccatgaaggcgctccatatgggagcgaagacgtatcagctgattgaaatttaagtaaatctggaatcgacccatatgaaaataccagcatgaaacatgctggtatttttttcttcagaggttttgaaagaacccagaaccatcctggagcacaggtgtgaggagagagtttgcccatctgcgttagacaggctgattctgggaatagattacggaaccttgtatacaaagctgtgacattgggcacaataattaacgctggccttatgtcctttatggcattctgtgcaggggagagcgccatcatgctgtgcatgagggtttggctgtccgctgtttttgtatttggcgtcagtctttttgatcatggcgttgtagtctccgtggcaggtagcacagacgccgtagtcggtattcgccgcttttaaagcgcctccctttgcatccacgtgacaggctgtacatttcatgcctctggctacgtgccgatccgcgagagtatgcccagcgggagttgaatcagcagcaaaagccatagttccggaaagagaaaggaaaccggtaatacaagcgagagcagcaattctcaatagatgctttttgacaagtgtttggcgcatgagacttgttctccttaaattcaggccaatccgaagatttcctcgaatcggccttttattattttctgagatacagcgcggaagacctatcaggccttaaggtttggaagtccagcgacttctttgccgacgctgcgaccgtaaaccagacattcagtcaggttgccaccgccctgatacacaaacttcagaacggaggagatctcaccaaccgtgtagagacgcggaatgggcttaccctcccaggtcaggacacgatgacggccatcaaacagcagtccacccttggtgttcggaccgccagcaaccagcggcatggcatagaacggtcccttgtcaatacggcccaaagtaactgcacggcggccaaaggcttcgtccttcttctcgtcacagaacttattgaactgctcgaccgtctgaaccagattgtcaggaaccatgcgcatcttattttcctcgatgtgcttgatcttttcgcccaattccttaatcgaatcggctttaacaatcagtccggagttcagtgcagaggtattgtccttgctccacttggtcaggccatagccaaccgtcgaaataccaaggccaaccaacggcttggacttaaagagttggtcatcaaaaatcatccaggacggcgttctcggataagagagcgtattgatgtcgaactggacagctgccttgtagaagaaataacggctcggattatccgttaccttcgtttcagcttcatagcgcttgccaaagttatcgaccacaatggaatgaggagaaccaacagacggggtaatagaaccgatcctcataccgttgcatttatcgagcgtcgggacaatgattcgtgccgctgatttgccgactttttcgagacctgcgccggcagccatgcccatggcgataccgtcaccggtgttagaagttgtgccgtagaaagcccagcccgtcacgcccgggccttcgaggaaggcctgacgcatcggcttgctgtattcgtatccacctgagcagatcacaacagctttacgtgcgcggacagcaactgtcttgccgttatgtttgccgagagcaccaatcacatttcccttggtatccttcaccaactggaatgcaggtgtttcccaaagaacccgaatcttatttccctgtttcttaacgccggttgcaaggcagagccagaacgcttcaccagagctcgtctgatccttcggaagaccataggaaacgtcattgaaagtcttcatacgcttcaggtaagtagacctgtatgcgttgtacttgcattcctttgctcccgggaagttgccaaaggatgccttattgaacccaggctgagtgccgccaataaaagtcggatccagactctttaggaagtccagattagtcggagtcagatcagcccacagctgggcaagaggatctgagtattcaggaatttcaccttcttctttccacggaatgttctcaccggagaacatcgcctttgcataagccttcagggcagccttgtcaccgtctttgtctgggcagtggaagatgccgcctgacatgcgggtattactgatgtgatgattttcgggattcttttcaagaacaacaacatttgcgccattctgcgcggctgaaatagcggtggtagcaccagcgccaccgaagccaatgacgacgacatctgttgtgacatcccacttcttaggcgcctttgccgcctctgccgggatagaaagtgttgctgcagcagcgacagcagcggtgcccacagcacctttcaggaatgaacggcgtgaagtttccataatcatctctcctctaagtacagactaaattgtctgaaactaaaaatagatcaatagaattagatctattgaattagattttaaaaaggtgatttgaaacttcatcggcgctttgcatgttgacaaaaaagaatttttgtggttaaaaaattacatctttgccactcctgcaccagcaagtctaccaaaagttacagcattattaatcccgtttccaccgaggcggttagctccttgaacattgccaaccgcctctccagcggcccacagcccggggattggcactccattggagtcaacacactcggccttgccatttataacaagtccgccaagtgttgtatgaattcggagataaacgggagcagcccaaaagggaggtgttttgatatgcctgctctgagaaaccgagagcactgaactcctcagagaggcaggaggaacttgaatttgttgtgccaatttctcaagagtgtctgctctgaaaatatggccggcaaacagatttcgataaaggtttttctgaatagtaacgtcaaaactggacactgtatccgaatctgaaattgaccaacaatgctgttcgggtaaagaaagaattgcttctgctattttgcttcgatagccgctctcatctacaaaacgcttcccttcaagatcaaccataatcattcggtttggccggatatcaagtctcaccatcaaatcacttcctggcagactgccgggggtgcattcaacaaggtccatgttttgcaatggggcaccaatttctgccgccgcatggatcatttcacctgtcgcaccactttggctgtcacaaggcagtgtggcaaaccgcggcgcaaatctctccagcatttccttattcgcgccatatccccctgaagcaagaatgactcctttagaggcccgtaatgacttcaatccttctttttggataatttctataccaatgattcgtccctgatcatttctgaaaagaccggttgcccgggatttcaattggatatcaacctttttcttcaagcaagctgaagaaagggttctgatatatccctctccccggggaaagactggcttatgcgctctgggtgatggactgccaaagacattgaaaatatccggaagaaaacgcattccatgtctctccaaccacgcaagggagacactagcttctttagcaaaaacttctgcaacctgaggggaattctttcctcctccagactcaataatttgctttttgaagagttggacactgtcccttatacccataggggcttgccgcgaaggatccaccgcattgaagtatccacctgaaataagagtatcgccccccaacgcgtcattctgttcaataagaatcacgctggcaccagattccgaggcagaaagagcagcggaaagcccagcggcacctcctccgacgacaattacatcagcggaggaatcccaggcatcaggcagagcagaacctttatagccgttttgtcttactaaggagtctttatcctttagccagtaaaaactgcctatggctgcagaaagtccaactcctgctaacaaaaccacagatcgtcttttcatagcggtagtcaggtctcactgatttgttggagtttttccatctcatgaatgaaatcagaaacctctacagcgttttcagtatccagtttctgattaaccatcgatcgatgggctcggattgtgttttcgctgacgcccagaacagaagctataacactgttagtcaggccctttgcaacaagtccagcgacctgttgttcagccgccgtaagagtattccatgtttgttctagcgtggcgaggtcggctacggcccggagtaattcaacatgagcttgaacagcctcttctatagaagacagcaatttatcgggtttaggaggtttctcgagaaaagtttttgccccttttcgtacagcatctacagccagctcaatatcaccgtgagcagaaaggaagataacaggcaacggaatgttttttttcttcattaaatcctgaacttccaaccctgacagtcccggcattctgacgtctaggatcacacaacctggctctttacccggtgtatgcaaaaaatctatgccagatttaaagcatctcacctgccagtcatccatttgcaggaatgttgtcagtgcccgcagaactgaagggtcatcatcaacgagccgaatgactgagtcgcgctttagcgtgtttattccctgcgtatcgtgagggtgattgttctcagaattactcatgcttgatgatctccacttacctgctttgtatcgggattgattctatttgtatttttcccaataataagcgatgcctctaaccctccagcccggggctggttgtattcaagatggccgccgtttctttcagccagcatcgatgcaattgccagtccaaacccaagtccatcagttttcgaactttgtccagcctctcctttcctaagccgtataagggtttcatccgaaattcccgggccattatcagaaaccgaaactttccaggactctcctaaatctgaaattcggacctggattgcgccatctttttttccttcaatggcactcaaagagtttttaataaagttagcaataatgaattgaatctcaaaaggatccgcgtgcactggatagtgaccggatgcatctacatgaacacatgggggcagttccggaaacgttttcagagcgtcttcaatcagtttttcaagcgcagtgtcttttctctctgttggtctgctcttcgcataggacctgacgtgctctacaatcgctgacgatctttcgacttcagattcaagagcctccaatagttcagcgggtttctctttcagtattccagctcgtttcagatacattttcagagcagccgcataaagggaaatattcatgatcggctgcttgatttcgtgggcaaacatggaagacagctgagacacgatgctgtttctttcgaggttgagaatcttttgatgtgactggcgtctctcgttgtaaagacgccttgttgtttccagagcctgagtcaattccgcagtgcggcggcgtaccagaatattaagtgtcactatgtggaaaattacagccagtagcaatgcgactgtcagaagaatttctgctttgtaccgcttccagattccctgaggactcatatcccttaggtaacggtagggaccgattttcaggcttttcagcagatccattgttggctgaaagtcactttccaccacccagtcgaaatttctcccgtttctaggcatggaaaggatggcgattgtcatatcgcgcatcacgtctgaggaaacccatggcattgaggaaatcaccacgtccgggtattggtcggtactcctcagacatcccgaaattccttttcttactccaattaaacggaaatcctgccttttaatctgcccctgagcttccatggattcaaattcgcaggtggaaagaacaccgacatccgcaaatccctgggacaccaaagtagccacgtcaggaattccataatgcgtttcgtaaacctctgaaaaaaatcgatctgggtcctggccatgttttgaaatttctcccttcgctatctgccatccatcgaagctttgagagtcagtaattgccaccgtccggccatgcatctccgcaaaatcatgaatagggctagctgctggaacaatgaatagagaagaaagcgaatgagctgcgtctttttcctgtgcgctttttttggttgctacctgatgagcaccctcaaaagcaccaagttcgccaaaagtagaagctgaagaaaaaagaaaatcaggatgaacgttcttaattccgtcatccacgtcccgataatctatttccttgattctgaattcgtactgcgggagatgagtccgaagatagtcgaccgtaggaacataagtgtgaaggtagaaatcaggcgaaaaggtatcaaccagagcaatagtgatcacaggttttgatcccattgccgctgtacgagcggccatcaccccctgcgaagtcatcagaatgcagcctaccaggagcaggggaagaagtttgaatcccttgttcctgaatccgaccatcgctagagcacccttacgatcttcacccagccgttccggtcagactgaaggaagaaagcctcatcctcgagcatcgcgcgggtcatagccttcgcgtgcagatgctgggatataaagtggcaggcgagaaaagcgatcagcccaagcggaatcacccaccaaaaaaagaagaaggcaaggatcaaagaggccggaatacaaaggagcccgaaaaaccagaccataggcgcgagcgtatgcgtaacgccgtttttccaggcatccatcgccttaaacggatccacatgtacaacaatccggttattttcccagtcatcacggaaccgttcccagttctcacggtcttttcttgcgctcatgagattttcttctcctacccatttcctttatcgggttctgtgagtttaagcacggcggtggccagacgacaaaccatcggaaaagggccggccgtaccgatccgttaaaatgaaaacgttattgccagagtttcattgaggaaaggatgacggatttaaagggactgacgaacaaacgttcaggaatcgcggcttacccgctcacggaatcagacatcgcggcagcaaacctctgcatgcaggaggcgttcccacccggtgagcagttcccgattgagcagctccttcgcttcgcggcggccgatcccgcccgttcctggcttgatctctggttccttgatcagcagtttgcggggtttacctacaccacgaaagtgccgggagacgcggaccggacgtatctcgcgtacctcgcgatcagcggggcgctccggggccaggggctggggactgagattctccgccgcgtgaccgcggagaataccgagacactctggtgcctcggagttgagcggccgatcgcggcaacgccggaatatgccgcccggacccgccgtcttcgtttttacgcgagaaacggctggatagataccggtattcacgcgatcgactgcggtgtcgattttgagctcctcacacgccgccgtcccgttcctcctggaacacagatggacatcatcaaagggttctgggaatcactcgcaaaggcctaagcatattcagaaatatctcaattctgttatgctaagtaccctattttcgaggacacaggttttatggctgcaaaagaagagaagccgctgaagatttcggctgtttcggttgacaaatcgctggaagactggaagaaggtaaaggcgctttataaagagtcctttacctcggcccagagagcgcctttccgctcgcttatggcccagcccgaagagggtgaatccgctctgaccgcatatctgaccgattcacgcaaaatcctcgggctttcttacgcctatacgaaaggcgacatcacttacattccgtacattgccttcaaggattgcccgaaagacgcggaaaccgtgattttcagcctgcttcttgatgcccataagggaaaccgcattgtccttgacgtagcccgcacaatttctgaggataagaagaaagcccgccagaagcggctcgacttctttaagaacgccggtttcaccgaaaccgggatttccggcaaggacttcggcgttgagtacgactactatgcgctgggcggcaaagtgacccgagaggaactcactgaatttacagaagatttctggaattcactcgacgcctgaacgttgcctgtttcaagacgtcacaaattcacgtctgccagagcggaagaaaagattcagaatctctctttttccgctcttcattttttctcatggaacgcaaactcctctccttccggacctcggtgatcgcggcgctcgccgctctgacgcttgccggctgctcgtccctcaacccggacatccgggccgtgaaggatacggtgattgaggaaaatcactctttcttcaccgttggccgggttctcgacttttatccggactgcaaggacacgaactgggatgcctataaggaccctcagggacaccgctgggtgcattacacgtgcgccacgaagtcgattgatgacttcagaacgaacgctctgaagacgctctccgacaagcgaaagccaaacgaccccttccgtatcaaggctgaaaaggcgcttggatacagtgacgccgaacttcttatcaaattccgtttgctcggcgtgagcgataagtggaaaatcaactcaacgtcgcttgaactcacctggcctgacggcgcgacacgctctgtgtcgctcccggtctacctcgtgctcgccgctatgaagaagggcgaaccgatcaagccagaggaagtgaatgaacggccggggttcatctcccggatgttcggcagcctgatggaaagtgtcgagcttcacttcatcatgtcggcgtatgacgacgcgcatagcgcaaagaatttccatccgaagaagtaatcgacagggattgaccatcatgaagccggggagacgcctagaaagatacagaatcgcttttctgggtcttcttttggccccggcttttctgatgcctgcgggagccgcgggacttcagaaccttccgattccggacagccgacctgtcgtgaaaatcggtgttttcgacacgttcggcacgagtttcgtgaacgaaacggtggatccgacacttgccgtgatccaggcgaagcttccgcgctaccggtttgagctcgacgtgatcgcggcctccaacccggaggatgccgtgaagtcgagcggtgttgatttctttgtgtcgtctgccggtgtctacagcacacttgaacggacggtcggcgcccggcacatcgcgacccgccgtcaggcaggtgtcgcagaccccgcccggagtgtcggcgcggtgtttgtggtgagaagtgaccgcaaggatctgaagactctcgctgaccttaaagggaaatccgtcgtcgcgagtcagaagaacgacttcagcggctggcaggtcgcgatgggagagatcgcgaaatcgggattcaactggcgggacttcttcggaaagcaggacttcgtgatttatcagctcccggacgtggtgacggatgtccttgcggggacttcggatgtcggaattctcacgacctgcgcgctggaaacgctggagagcgatggctggatcgagaagggggcgctccgcgtcattaatgaaaaggcggatccgcacccgagcgcttacacctgccgccggagcacagacctgtatccggacgcggtttttgcctcggtcgccggcgcgaagccggacctcgtgcgcgatgtcaccgtcgcgctcctcacgatgccgccagggaaccgcagctgggactggagcgtggcttctgactacctcgcggtggatcacctctataaagcgctcatgatcgggccgtacgcctatctgaacgacatgacgccatacggcatctggaagcggaatcaggaaatcatcatcccgatcatcgcgctcttcctccttctgatcgcgtatgaactgcggcttcactatcttgtgaagaaacggacatctgaactctccaccgcattgaaagaaaaggaagcggcggaggatgaggcgaagcgaagccgtgagcggctttcgcggcttgagcgatccggcgtcatatcgcagctctcctccatgatcgcgcacgaactgaagcagccgcttgcctcaatccttaattacgcgaacggcctcgcgcagcttgcgaagatgggccgctcaaccccagagcagacggggttcgccgtaaagtccattaaaacggaggctacccgcgcgaacgcgatcgtggaccgggtccgcgcctacgcgaagcatgaagaagggccgctcacagaactcgatctttcagacgtttcgcataaggcgatccggacctttacccgaaacgcgctgacgccggttgcggtctcagacgcaattgaaccggggatccgcgtgatggggcatgaactggaactcgagctcctgacgcttaacctcatccgaaatgccggggacgccgtaaaggatgtggctgatcccctgatccgcgtgacactcaggcgggatggcggcaaagccgtgttccaggtccgggataacggccccgtggtgacagatgcggtgcttgagaaactcacagaaattgaggaaagcgtgaaacctgaggggctcggcctgggactcgccattgtgcgggacatcgcggaccgccatggggcgagcctcagcttcaggcggaatgacgacacagggctcaccgcggaaatgcggattgatatggtggagtcaaaaccacgcgacactgaagaaaagactgggccgaaaggagatgcctcatgaagaaactgacccgccgcacgctgatcagccttgccgcgctccttccggtcattcgggtgaacgcggccgtgtccgggcgctttgacgtcattgttgtcggagccggcatcgccgggcttgcggctgcggtgtccgcagcggagaacggcgcgaaacgcgttctggtgcttgagaagggaccaatgattggtgggcacgcgatttacgctgacggcacagtgagcgcggtttatccgcggcttcagaaggtcttcaatatcaaggattcgcctgaactgatggcgaaacagatctgggagtggggcgaccgggatggggatctcagcctaatccgcgtcatggcgcgcgagtcgggtcccgcgatcgactggcttcgcggcatgggcgttcatttccgggactgggttttcgttccgtatccgtcaaactttccccgcggtctcacgtcacacccgacccggggcggctacgaatatatccgggctttgaaccgccgggcgagagcgcttcatgtggaggtgcgcctgaatacccgcgtggtgcagctcctgcggtccggcggcgcggtcaccggggtttccgcgagcggcccggagggggtcgagcggttctacgcaccctctgtcgtccttgcgacaggcggtttttccgcgaaccccgacatgatccggcgttacagccacatcaaaaaccccggaacgcactcatccgcgaaccctggcggccggcattttgacggggccacgggtgacggcattcagctcggaactgcggtcggcgcggctcttgcggaaatgccctatatcgaattcattccatttcggggcggccggctgcttgaatacgtgggcggcgatatcttcgtgaattcgaaaggcgaacggttcgtggatgagggggtcagccacccgaaactcaccgaggcgctctcgcatcagccgggcggcacgatgtgggtgatcacggattcccagtcagtcaaaggcaccacggtgactcataagctgatgacagggcaggtgaggaaggccgcgaatatcgacgaaatggcacgcatcatggatattgatcctgaggtgctgaagaaaacgatttcccgctacaacagctttgtccggaagggccgcgacgatgatttcggaaagacgatcttcacgcaggaaatcaaggtgcccccgtactacttcggcgtggagtaccaggatcctcactacacgaacggcgggatccggatcaacacaaaagcggaagcgctgaacaccgcggggctgccgatccccgggctcttcgcggccggtgaaaccacgggcggcattgaagggaaggagcgtgagggcggaatggccttcacggactgcctggttttcgggcggatcgcggggcgggaagccgcgcggcgggtcattaaaaaataaacgccggacttatcgaataagccggcgtttgacgcagaagtgcgcggctgatcagaccagccactcggtcactttctcacccatttcctcgatcttcagctgcttcccgtcgtaagacagcaccgcgatggagcagttccccacgggaagcttccagaaatcgtcgtaagagaaaccgccgacccgggtcagcatgtcgcggataaagattccgtgcgagaccaccaggatcgtggcgtccgggttctttgcctggatcatatccagcgtggaaagctggaacgcctcggcgcgagccgagagatagttaaggggttcaccgccgaattcagggacgtatttatccggatgaacgaaaagttcgtgaagcggctgggattcatccgttctcgcgtcgttatagagtgtcccttcaagcggtccaaacccaagctcacggagccggggatccatctgaacctcaatatcgcggcccttcagaatcgtttcggcggtcacctccgcgcgttccagatccgagcagaaagcgtcatcaaagtgaacgtttttcagtttctccgcaacctcttcagcctctttcacgcctttcgcgttaagcgaaatatccgcccagccctgcaggcgcttttcattattccagtccgtttcgccatggcgcacgagataaattttcatgattctgaagccttagcctaaatttagagattgaagaaaaagagtccgcatccgatgaggacgaagaccgttccgaaaacacgattcatccgggtgacgttccgggcgcccttcatccggctcgcaacagcggcagcggcaagcgacacgcctgtcatcacgcagaaatccgtaaagccgcaggtgagacccatttcaaagtactgaagcaggatcggcgcgtcggtattgatgaacggggtcagaagcgaaataaagaaaaccagtcccttcgggttcgtgatgttgacgagaaacccctgccggaaaagctgccagccggttctttcgggggctgcctcgtgctcctcgatgatgaccgcgtgccccttcgctcgaagaagcgaaatgccgagccagacaaggtatgcgcagccaagaagccggatgataaagaagagggaaggtgacgccgcaaggatggccccgattccaactccgacaaccataacgaggccgagaacccccagacccagcccgagactctgcggaacgcatttcttccagccgtaattcagagccgcggagagcgacgcgagctgcgcgggaccaggtgagagactgatcccccagcagagggcaaaaaaacgagagccaagtttcgaaatgcatcagatgaacggggaatacaaatgaatgaatcagtgtggctcgagtctaaacgcttcttttcgccttgtgaaagcgggaaccgcggtgtcttttgtgactccggcaacgaggggaggcgagtggtacccccaaagaaggataccgtgtgcggcacgagccataacggagaactgattctacaatagccttacagcgataccttctgaatcgcttgatgaggtgcgtatgaaaagaagaactctgctcacgcttgcggccgggcttccagccgctctcctctcaggctgcgtcattccgcctgatgattttggtcctggacctggtccgaagccccgccccgagggtcccggctaccgtgagaacccagggaatcccaataaccggtccgtaaacggcccgaataatcccggcaaccattacggcaatcagccgggcggccccgccaatcgcgcgagtaatggcactccgggcaacgcgcccaaggcgccgaatggcccgcagcccggtaaccggaacgcgcctgatggtcagaaaggacctaatggccagggcggcccgggggatccgaatcccaatcactgatccgtatcggaacacaaaagggctttttcctctagggagaaagcccttttcatgtgattcacgaccgaaaatcaggtaatctttcccctgcatgtttattccgagacccgaggctttgccagtatgaagaaacgcgacgaagagtccgcattcagcgcgatctgcaacgcgcagagaattgcctgcgcgccgtttgagtttgaggcggcgagatcgctccgggattttggaattctcgcggctctcgataaagcgggagacccgggcctgacagatgaggaaatcaaagccgtttcagggctttcggactacgcagtccgcgtactcctcaacgccgctgaaggcgccggaatcctgaaaacggagtccggcagaacgtcactcacgaaaaccggctggtttctcctgaatgacccgatgacgaaggccaactttgacttcgcggcggatgtctgcattcccggagtcgcgaggctctctgactccctcagggaagggcgtcccacgggcctcagcacgcttggcccctgggacggaacgctatacccgcacctccgggagctctctcaacccgcccgcgagagctggttcgggtacgaccaatttttctctgacaacgctttttcagatacggtatcccgcgtcaccgcgcttcacccgacgctgctctgcgatatcggcggaaacaccggaaagtgggcgatccggctcgcgaaagcggacccctcgatccggatccggatagtcgacctcccggagcagtgtgaaaccgcggcagccaatatcgcggcagccggtctcagcagcagggtggcctgttttccggacgacgtgatgtcgggtacgaatctcccgggcgaccccgacatctggtggatgagccagtttctcgactgcttcggtgaagccgatgtcgtacggattctgaagaaagtccggaacgccatgagacccggaagccggattctgattctggagccgctgatcgggaatcagaagttcccgatcggggaccggtgtctcgccgcgttttcgctctatttcaccgcgatcgcgaatggctgcagccggttctattccgaagcggacttcagacggttcgcgcttgacgcggggcttgaagtcgaatcggtcgaaaacggactcggcattgggcacacgctgatcacgctcacccggggtgacaagtcatgagtgaacgggggttctcgattctctcgtggaccgcggcagcgcctgggttcgcggatcccgcgtcctggctttcatgggcggagagcgacgctgcgattgaccccgccgcgccttttaccgtcccgaagacactccccctgatgacgtcacggcgtctttcaccgggcgctcgggccggaattgaatgctccatcgcggcggcgggaagcacggtccccgattttattgtgacagcgagccgcgatgccgaacttccccgctgcgaaaagattctcacgggacttgctgacggggacccggagtcacccactgacttcacaatgtccgttcataacgccgcggaaggcacgcttcttatcgcgaagcactggaaagtgccagggacctctgtcgcggccggcccgaggacattctttgccggctggaccgaagccgccgcggcgctcgcctcaggaaagaaaaccgtacttctcacgttttttgaaaacgcgagaccgactgaagcccgggcggcgtatcacgatcatctgctgaccttcccctacgcgctttccgttcttctcgcgtcaggtggtcccgtctcgcttgtccccgtttcggcttccgattgttctgaaggaacacttccgcccgcgcttctgtttctccgcgcctatctgaggaaggtgcctgccatcaccatcgcggccggccgtacggtcatcgaatggaggttcacggcatgacccgcgaaccggattcgttcctgaagcttcagatccggcgcctcgcgaccggtttctgctgggccgtgtttgggatcggagggcttacgctctcactcacggcattcccggtgatccgggcggcgacagactcaaaagaaacctctgttctccggacacgccgcctgatttcggcgtccttcaggcttttcttccgcctgacccatcttctgggggttatggaagcggacaccgctggaattcagtgtcttaaagataagaagggcgtcattcttgtcgcgaatcatccgacactgatcgattacgtgctgatcgcgtccgtcattcctgagaccgactgcattgtgaaatcggcactcaccggtaacttcttcctgaagcgggtggtccgcgccgcggactatatcgtgaacagcgaagatccctcggatctcgtgcgggacgcggaggcgcggctcgcgaagggcggtgtgctcctcatcttccccgaaggcacccggacgaagcccggcataacaccgactcttcaccgcggagctgctcagatcgcggtccgcaccgataccccgattgaggtcattcagatagaatctagtgacccctggctcacaaagggagcgccctggtacgctgttccgccgcggaaaccgattatccggctttcctacgttggacggctgacccctcagccgctcgaggatccggaagcggcgcccgccgccgcccgatcactcacagcgaaaatcttcgcctccctccgcttcagctctgagcccgctgggaataacggaaagacacacaatggaaacgcttgaaaatcagatccggtcactcattattgagtcccttaaccttgaaggcatgtcgccggaagaaatcgcggatgacacgccgctcttcggggaagaggggctggggctagattcgatcgacgcgcttgagctcggcatggccgtgaagaagcgtttcggcgtgaacctttccggtacgactgaagagaatcgcagccgcttcgcgtccgtgaagacgctcgcggactatatccgcactcagaagccggaggcctgaccgccatggaaaaaatgacccgggaagagctctatcaggaagtggcggaaacgctcgctcacctctttgaagcggatcctgaatccattaagcccgaggcgaggcttgccgaagacctcgaactcgattcaatcgacgcgattgatctgattgtccatatgcagaagaaaaccggcgagcggttccgccccgaggacttccagcacgtgaaaaccgtgcaggacgtggtggatacgctcgtgcggctgacttctgacgacaaagcggcatgactccggccgaaggagtgaagcgggccgcgcaggcgctctcgcttctctggccttttgccgtgattgccgcggtgagtttcggccggatgtcactccttctcgcggcaggactcccgctcttcgcgtttcaggcgatctttactctgagaaaggggatccgcggagcatcactccccgcgcttctcatttcggttatcggcaccgcggtctgcggtctggggctcctgctttctgaggcctcgctcgcgttctggtacccggtgtttgtgaatctcgctctccttctcgcgtttgccgcgtcgctcttcgggaccccggtcgccgaggcggtcgcgcggaaactatcaaaagaaccgctccccgacgcaggaatccgctattgccgtaaggtcaccgtcgcctggtgcatcttctttatcgcgaacggcggcgtcgccgcggccaccgtgctttccggaaaccgcgccgcgtggcttctctggaatggatgcctgagctacggagcgatcgggctcatgatggggattgaatatcttgtccgccgccgggtgatgcgtcatgctgcttaaaacatcagactggatgaatgggggaagcccggacgatgtcctctttctcttgcgggacacaccgattacccggagtgaaatcagacgccgggtctcggtgctcgcggcgcgcctcagtgtggttccttgccgcacggtcgggatcgcggagcgggatccggtgaagttcctcacggaactcatcgcgacactcgcgtcacgccggacaccggtgctcgcgggcgggaaccgcctcgcttctctcgagccggccccggacgcggtgtgggccgcggaaggcgccgcggcacccgctggatctgctgtcattccgtcagaggacggaggtgacgcagccatggatctcccgccgatcagccccgacgcggaactccttcttttcacgtccggcaccaccggaaagccgaaacctgtgcggaaaatcgtgcgtcttctcgatcgggaggctgagatggtgtccgaaatcttcccggaccttcggcgcctcgctgttgcctcaagcgtcgatcccctgcatctctacgggctcacctttacggtctgggttccgatggcgctcggcctcacgcggattgttccgcggcttgaggtaccggaagacctggcgtcagttaccgtgccctccgctattatttcctctccgaccttccttcggtacctcgaccccgcggtgccgcatgacgcagtccgctttatcctttccgctggcggaaagctggggtcggaggccggtgcccgtgtgaaagagatatttggaattccggcttccggaatctacgggagcaccgagaccggtgttgtcgcctttacgcgcgaagcggggaggggagacgcggaactcgcgcccggagtctcctttattggcgacccgagggacggacggatccgcacaccgcttacggaaaccggtgaagcgtcgcttgacgacaggatcgagccaatcggcccccggacgttccgccttctcgggcggcgcgaccggattgtgaaaatcgcggaagagcgggtcagcctcgatgaaatcgaaaagactgttctggggcgctatgatttccatacggtcacgctcgccgttaccctgaagggacggcaggcgatcggcatcgcggttgaccagagccgctcgcccgaatacgatccgacgcgcgtgaggcagtatgagcgggaactccggaaactcctgaaacccgccgcggtcccgcggttctggcgctctctcgccgttctgccgcagaatacgcagggcaagaccgatatggatgcagtacgaagcctatttgaagaaaccatgactactgaacttctcccgaaaatcaaagaaagcacgccgtttgagaacggcaaggtaagcgtcacgtttgatcttgagccggaactgggctggttcaagggacacttcgacgcgcagccgattctgccgggcgtggcgcagctggaactcgtgacgcggttcgcgtctcagtttgccggtcccgcggccctgaaagaggtcgttcagatgaagttcacgacaccgatgacgccgggcgacaccgtgcgcctcacgctcgcgtcgctcgaccccgagttcagcgcgaacgtgaagttcgattaccaggtctatcggaacggctcatggcgtctcgcgtcgatcggacgcctgaagctatgcaaggccgcgtaacggagtctccattccgtctcgccgcggtcattccctgttaccgccaggcggacaccctgaaaggggtgctcgagtcactccgtgctctcggaatccgctcttatgtcgtggatgatgggaatgcgcctgaggagtccgaagccatcctggcggcgacgagatccgttccgggaacctgttatctccccaggtcgcggaattccgggaagggcgccgcggtgacctttgggatcgaggcgctgagtctcgggggctacacgcacgcgcttcagattgacgccgatgggcagcacgatatcgcggacgctccgaaactgatcgaagacgcgaagcgtcacccggacgcactgatttcggggctcccgcagtatgacgagtcggcgccccggggccgcgtgatcgggcgctacatcactcacttctgggtctggatcgagacactgtcatcagaaatccgggacagcatgtgcgggtaccgcgtgtaccccgtgcaggagttcctcacgctcgcccgcagctaccatatcggccgccggatggatttcgacaccgaaatcatggtgcgctacttctgggacgggaagcggatccgttttattccgacccgggtccggtatccggagggcggagtctcgaatttcgactacttccgggataacgtccggatttcgctgatgcatacgaaactcgtgctggagtcacctcttcactggctcgcgcgtctgaggagaccgcatgacaggctgtagcgacggatcctgggatcagaccccggagcagccgggaagccgctggatccggctccttctctggatctccaaaacgatgggaaggagggcgtttgaggtgtccctttctccggtcgttgcctgctacgcggcgttcgcgaagggggcccggcaggagagcctccggtatctcgcgcgggtaaaggccgcgaggaaacaggcggggctcccgccggcttctgagcccctcacgccttaccgtcacttccggcacttcgcgctctcggtgtacgacaggctcgaagcgtgggatccggacaggaagcaccgtattcacctgctcatgacagatgaggcgcgcgccgctttgaccccagttcccggcgcccccgggaaacttgtcctcatgtcgcacttcggagcggcagaggtctgccgcgcggtggcggagcgggacgtggaagcgcgggtcatcgcgctcctctacgaaaagaacgccgaaggtttcacccgcgtcatgcggaccgtggcgcctgaaagtcggattgacgtggtcccggttgataaaatgggggccgaaaccgcagtgcagctctcagacgccattcagtccggtgcctgggtcgcgatcgcggcggaccggacgccggtcacgtctgaccgtaggacaataagaaccgtaacgatcccgttcctcgggaccccggccgaatttccggccggaccctgggtgctcgcgtcgcttctcggctgcgaggtgtggacgcttttcgcgtcgcgcgacggagacgcgttccgggtgtcgtttgagaaactcgcggaccgggtgacgcttccccgcgcgtcgaggaatgacgcgatccgcaggtacgctttggatttcgcggaaagacttcagcgtgaagtgatccattcgccgcttgaatggttcaacttttatgacttctggcagggtgccggacgcgatttcagccgcgggaagaattaatggagagctttatcttatgaatgctaaaactctgatttttgtaccgctttcgcttgcgttcgcgagtgccccggcgctctctcttacgcttgacgatatcagtacgaagctctccgcgatcaaaacggtcaaggcgaatttcacgtcagaaagaaatctgaaaggcgccccgaaacctctcgtcgcgaagggcaggatgacgctcatcgaagggaagggggttgtctgggaacagacatcaccgttcgctgaagaaatcctcgtgaaggacgatcaggtcgaaatccggcgcgggaagtcgaaacccgaaatcatcacgaagaaatcacagccgcgggcgtttgctttcgctagcctcatgcggaatctcgcaggagccgacgcgaagaccctcggaaactggttcacggtttcctcgatcagcggaaccgcatcgggttggaccgtgacgcttaaaccttcgcgcgatccgctccgccaggcgtttgataccgtcacgatcaagggcggtgacgccgtaacgggcgtctctttcctctcacccgcgaaagaccggacccggatccggtttgatgatgtccatgtgaacgaaggggggctcgccgatgccgaagaacggctcagccgctaaggcggttctgaacgctctcgattccccgaaagtccgggcgtttctctggctcttcatcgtttcggtgatcgcggtgttccttctcatcgcggtgccgaaggctgaagtgtcgagtgacgtgatggagctgctgccggaagaaacctaccgggcggtcccaaaatccgtgacaaacggacttgcggacaaaatgtcgcggcaaatgctttttgcggtcaccggaggcgaaggggcggcggaactctattttgaaaaactgaaggcgataccggaattccggcgcctcgcagggcgcctttctgatgtcagacgccgggagtcggcctctttcctctttaagaaccgcgcggcgttcctttcttacgacacccgttcgagactgaaggaaggagaggacgcggaagccgaatgggtgctttcgcagctttattcaccggttgccggtgtgtccgcccctgaaatcaagaacgaccccctccttctcatgcgggggtcgacactttttgattcgggcaccagccgcatgagcacgtcaggcggctggctgacggcgacagatgataaaggcgtcacctggcgctttatttcgggtgaagtgaagaagggaactgcctccgcgggttctgtcggaccgttcctcgataaagtgaaagcggctcagaaggccgtgaaggacgcctatccgaacgtgcggttcgcgagcgaaggctcaatcttctactcagggttcgcaggggattcggcgaaaaacgacatctcaacactcggcaccgtctccgcgatccttctctttatcgtgctggggatcgcgtaccggtcaccgcttcccttcttcctcgcgctgctttccgtcgccgtaggcgctgcggccggcacagcggcaacgctccttacgtttggcggcatccacatggtgacgctcgtgatgagtctctccctcatcggcatttcaacggactacaccacacacttcctcacggctcggatgaccgcgaaagagggcgtctcaaccttcaataccctgcagacactttcccccacgatgcttcaggcacttgggacaacgtgtctcgcatacgccgcgcttcttatcgcgccgttcccggggctccgccagctcggggttttcagtatcgcggggctcgcggcgtcctgtgccacggttttcgcctggtacccgttcctctcgaagcgattccggcgtaagcccctcatcgggcggaacttccttcgccgctatatcgcggtgtggggcgggcggaatcgctatcccgcaattcttttcgcctgcctcgcggtgtttgccgccggcggcctgatgcttgcgggaacgaatgacgatatcggcgcgctgcagacggtgccctcccacctgaaggcggacgaagaccttatccggacacttacggggaacgacatgacgcagcgctggtttgtcgtaacaggatcgtccccggaagaagcccttcagagaaaagacgcgcttggcgaaaagcttgcggcgcttaaggaggaggggctgattaccggcgcgacactcattccgctcaactcccgggccactcagcagtctgactgggaactcatcaaaaaggcgtcgcccgcggtgctcgcgaagcttcgggaatccgggattgcggcgaaacctgagagcgagaatccgacgcttcccttcgcggtctggatccgggattctgtgagcagcaactggggacggctggtcctcggtggcgggggcggtgtcggagaaacttcccttatgatccccgttcagggagacaggagcgcgaaagcggatgccgcgcttcagaaagcggcctcttctgtccctggcacagtctgggtggaccgccgcgcggacctgaatcacctgttctccggtgtccggaccatgattgaggcgctgctcgccgcgtcgctcgcactgatcttcgcaatttacgcctggcggtacggtctgaagcgcgccgccggcatcatcgtcccctgtattctctccgtcgcctgcgggatcgcctcgctcggctgggcggggctccccgtgaacatcttctcgctcttcgcactcgttctcgtccttgggatcgggatcgactattcgcttttcttcggtaacttccagaaagaagcggattcgacgctcttcgcggttttcaccgctatggtgaccacgatgatttcgctcggtattctcgttttcagcggcacggcggcgatttcaaacttcggactcgttctcgcggccggtgtcttcacggcgttcctcgcgtcgcctctcatccttcggcttgaccggaaagaggagagtgtctgatggtctatatccacgctgtggcgcttgactgcgcgcttggggccaggcctcaggacattctcgcgaatctcgggaaaaatgaggcccccggatttacgcctgacagtcactggcttctttcaggagaaccgctcgctttcggtcatatgacgggagacttaccggcggttccagagaatctcgcaaagcatcagagccggaataaccgcgccctgatgtcggtctttaattcggaaccccgtttccgggaactgctggaccgctcggatccttcccgtgtcggaattattctcgggaccagcacgtcgggatctgaagagttcgcggactatatccgcggtttcagaaagggggaacccgaccctgatttccgcggtgaagcgcaggagctcggtgacccgtctgaattcctttccgcctggctgagtactacgggacccgcgtacaccgtgtcgaccgcctgtacgagcagtatccgggccatcatttcaggagtgaggcttcttgaagccggcatgattgacgccgctatcgtgggcggtgccgacaccctcgcgaagcttccgatcaacggttttgacgcgctgcaggcgctttcccacacccgctgtcttccgttctccgggatccgggacgggatcgcgatcggagaggcggctgcgcttctctggctcagccgggaaccgggcccgatcgcggtccggggattcggtgaatcgtcagacgctcaccacatgtcggctcctgacccagagggagaaggagcagaagctgcgatccgcgaagcgcttcagatggcaggcgtcacgcctgacgcaattgattacctgaacctccacgggacaggaacaaaactcaatgactcgatggaagcaaaagccgtttcccgggtgtttggcgaccgggtgaccgcgagctccaccaaaaacctgaccgggcacacactcggcgccgcgggagccgcagaagccgcgctgatcgcgcttcttcttcagaatccggggtccgtgcttccgcctcagctcccggactctgtccctgcggaccccgcattacccccaatttcacttgtgagccgatttaccgccgtctcaggcttccttatgatgagctgtaatttcgcgtttggcggcagcaacgcggctttgattctaggaacagattgacgatgtctcagattcttaatccggggaaaccggaactctttttgccccagcgtcctccgatgcttctcgtgtcccgcatccttgaattcaccgaggatgacgtgattgctgaggcggattccaagatccttgaacccttccgccgtccggacggccggctccctgaaacgctctgcatcgaaatgatggcgcaggcggtgggtgcctgggcgggttactggcgtcagcaggacaagtcggataagcctgaggatgagaaggatgccccgatcggctatctcctctcggcccgcaatctgaagattgaggttccggtgattccggaaggaaagactttccgcatcacgatgcaccgcgaagtgtatgaaggaccgattggttctttcgcgggtgaaatgaaaaatggcgacacgctgatcgcgacgggccgcgtctcggtctatcagccgagcaacaaagagtaccgcgagcttttcggcggaaaggctgcctgatgacagaggcctctggtagatcggtccttattcttggggcgtccggcggcattggtcgggcgaccgcggaagcgctttcgtctgacggcttcagggtggcgcttcatgcgtcctcgcaccctgagcgggctgaggcgctggcggaggaactccgttcaaaaggggcagacgcctggacggtcgtctttgacgccgcagatccagctgcgagccgctcagcgattgaagcggatattgagcatcacggcgcctactggggtatcgtgcactcagccggcatcacgcgcgacgcggcgttccccgggatgactgacagcgactggtttgatgtcatcaataccgatctcaattcgtttaataacgttctgaagccctgcgtgatgccgatgatcggccttcgggacggcggccgtattgtcgtgatttcaagcgtctcagggctcatcggaaaccgcggtcagacaaactacagcgcggcgaagggcggtctcatcgcggctgcgaagtcactcgctcttgagctcgccaaacggaaaattaccgtgaacgctgtggcgccgggccttattgacaccgatatgacgaagatggatgaaacagcactcaaagcgatcaccggcatgatcccgatgaagcgcgccgggaaaccggaagaagtggcgtcagtcatccgcttccttatgtcaccgggggcgagttacgtgacgcggcaggtcatcgcggtcgatggaggcctcgcatgaaagagagacgggtagtcgttacgggggctggcggagtcaccgccttcgggaacagctgggacgagatcaaaccgcgtctgcagctctgccggaacgctgtcaggcggatgacagactgggatgtctataagggactgaatgcccggatagcggccccggttgaggatttcacgcttccggacacctatacgaggaaaaagacccgctcgatgggccgtgtttcgaaactcgcggtccgatcctccgaattcgcgctcgagtcagccggtctcatcaatgacccggtgctctcttcaggccgtatgggtgttgctttcggctcctgctgcggaagtctggacggtgtcatggagtttggcggcatgctgctgcagcatgacacgaatttcgtaaacggcaccacgtatgtccgcatgatgccgcatacggcggccgtgaatgtgagtctctttttcgggatcacaggccgcgtcattccgacatcgtccgcctgcacttccggaagccaggcgattgggtacgctgctgaagcaatccgctacggtcaggcagacctcatgatcgcgggcggcgcggaggagctttcccccgcggacactgcggcgtttgacgcgcttttcgccgccagcaccaaaaacgagactcctgaactcacaccatctccgtttgataaagaccgtgacggtcttgtgatcggtgaagggggcgcggctctcgtgcttgaggagtatgagcacgcgaaagcccgcggcgccacgatcctcggtgaagtggccgggttcgcgacaaactgcgacgcgacgcatataacgagtccgaatcggatcacgatggaagcctgcctcaggatggcgctcgagtcagccggagtgccggcgtccgaaatcggctacgtcaacgcacacggtacgggtactgcacggggggacgaagcggaaagcttcgcgaccgccgcggcctatggaagccacgttccggtgtcgacgctgaagagctatttcggccacacgctgggggcctgcggagcgatggaagcctggctctcccttatgatgatgcgggatggatggttctcgccgactctgaatctggtgcacccggatccggcctgcgcggagcttgatcacatcacagggagcggccggaacctggatatcagctgcttcgcgtcgaacaatttcgcgttcggcggcgtcaatacctcactgatcttcaaacgcgttccataaatgcggttccctagaacaagcgaaagcccgggagatttaacacttccgggcttcttttttggatcctctgccggggctcagaccccggcagaaagcttcaatacatcaggagacgatgtagaggcagacaagcaggatcaccatcacaggagccgtacggcggacgatatccatcgggttgacacccgcgataccggcaaccagaatcagaccgccgcaaagcggggaagcctgacggccgaaggcaccggcaaaggccgcgagaacaccgagggacggaatcgacataccgaattcagcggcatgaggcgtcacagcttcgttgaacgcaaaggcagcggcgtcaccggaaccggtaatcaggccgagaaggaacgggccgacagaaccgccgagcttagcgaccgactgcgcgtgcttcaggaattcaacaaggtcgccgaccacaccggcagccgtcagaccggatgcaaagacaccggccgcgatgatgatgcccatgatcttcgcgtaaccttcacccataccgtcgaagaacttcttcgaaatttcagcaggattcgcgcgggtcacgaggaacacatagatcgtaccgagcagcatggccgtgccgaccgaaaacttcaggtccttgaaccagattgaggcgacaaccaggatcaccaccgggagaagcggagcaatagccttaagaacattcggatgctcaggcagtgacgcgttgccggcagtaccgccaagcgccagattggcttccatttcctcttctgtctggttcttgttgtagtccttataaaccacgcagacgactgtcatcaggatgatggcgagaatgccaagacccactgtgcggggagcggagaaagcaatcagctgcatcacatccatgccggccattttcgcgataaaggcgttatgagaaacaccaggattcaggaacggggatgtcgcgataccgccgccgatgatcatggccgcggcgatcgccggcttgaagccagcacgcacgagaatcggaattagcgtcggagcaacagcagcggagcagcctgccgtactggggagcgcaacagcgacgacagcggttacaagaccacaggccgggagaaggaacaggcccagtttcttcagaggcttcgtgagaagcgaaaccagatgcgtatcgcagccggtaagcttcacaaccgcggcaaagcccatggccgagcagatggcgatgatcagattcgggttcgtcattgacttatcgaactgatggaacgcaatcatcggcttaaaggacaggaatgccatgacgaggccgccggtaatcagcaccagccgggtttcataccgctttatgagaccccagatgacgccgatcactgcgacaatggcaacgattgttgtaaatgtctgcattgcgctaaatctccaaacgtgaaaactctctctggcgcgtgccaggggaatttcttttttatctccgaagtgggatgccgacataacccgaaagcagagtgcgtaacaccttcgaactgccgacgtaaggattttggtttaaaaaattacaaaaaaacaccccaatccaaattcatatacatgacttggaacaaaaggaatcaaagaaagaagccgggaaatagcctgaaagttctacaacaggcacacgttcg

SEQ ID NO: 1399 - DNA, 137 bp, Unknown
  gut microbiota DNA sequence
cagatccttatctgacagagatttctcaattacggcagacacatcggccgcagtcttggaagcggtttccccgccacagagaaagccggacttcctatcgaccagagtcgtgaggcaggctccgcccttttttccga

SEQ ID NO: 1400 - DNA, 35012 bp, Unknown
  gut microbiota DNA sequence
taggtcactgtcaggctcccctttcaaaaccctcgaaagttttctttcgagggttttgttttatgcgcttttgaaaaaccaggaaaaagaaaggaggagctggcgctcctccttttctattctggtccagcgaaaaggttccataaggccaccgcagccgcgttttccgactcgttcatcctctcacagataccctcagaaagttacgaaagatcctctcacaggaatattgctgtaatcgatttttggacctaaaaagaatttagagggcttacacctactaaatatgcttttgtcacacctctggacggcacatttatggtgtggtataattacaaaatcttgattagatctaaggtgattttgtgtctattttcgaacgtaagacaatccactctatgcaggtagctcttggattggccgggttcgggtatttgggttttgttgctggtttgatctggcctttcgccaattatctcgggttcgctgccctcgctgctggtgtcgtccttctccttattaagaaaaccgatctggatcgactgaggtctctggtttccggtttcggagggcacagcgcttaaaaagcgttcacaaaacaactgaaaaagcttcggctccggcagaaccgctggtccgaagcttttttgttatcactgccgcctcatctgtttccttccgtgataccctcattgtcatgacacaagatctgtttggcacaacgttgccggaattggctcagacagcccaggaatcaacgaaaccgggccatggccgaagcgtggaaaaaccgcctctggcagaacggatgcgcccgaaaaccattgacgaggtgattgggcagaagcatctgctgggccccggcatgcctctccgtacggcatttgagtcagggcatcctcactccatgattctgtgggggccgcccggagtcggaaagaccacacttgcccgactgatggcaaatgcgttcaatcttccgttcatttctatttctgcagttctgtccggagtgaaggaaatccgggagacagtggaagccgcgaaagagcatatggctgcaaccggtgagcctacggtggttttcgttgatgaggttcatcgcttcaataaatcgcagcaggacgcttttctgcctcatgttgagtcaggtctgtttatctttatcggagcgacaacggagaatccctcctttgaggtgaataacgcactgctgtcccgcgcatcggtttacacgctggaggctctgtctgaggatgaggttaaggaactcctgcaccgtgcccgggagaaggtctatccggatctgaagatcactccggaagcggaggatctctatgcggcgcttgctgacggtgatgcaagacgtcttttgaatgcgctcgaggtttcggcggaaatggcctccgcccgccacctttcggaaatcgacgcagactttcttcggaaatccatccccgcgacgcagcgccgttttgataagggcggtgacttcttttacgatcagatcagcgcgctgcataaatcagtccgcggctcggatcctgacgcggctctttattggttcgcccggatgctggatggcggatgcgatccccggtatattgcccgccgggtaatccgcatggcgatcgaggatatcagtcttgcggatccccgcggcacacagcttgcgcttgaagcagccgaaatctatgagcgtctgggatctcctgaaggagaactggctattgcccaggcgattgtgtacctcgcgattgccgcaaaaagcaatgcggtctacaacgcctttaacgaggtgagacggttcgtcaaacaggataagacgcgtcccgtgcctttctatctgagaaatgcaccgaccaagctgatgagtgatcttgggtacggtgatgggtatcggtacgctcacgatgagcctggcgctttcgcggccggtgaaatttatttgcctgaggggctggaaggcagaacctggtatcacccgaatcctcgaggtcttgagattaagatagcggaaaagatgcagcatcttcacgacctcaatcaggaggcctggcgggaaggcaagggcaggcggcgcaagacttgaacccttttggttcctgttgcaaaataacagatcaacattgaatgacataagatcggttagccctgatcctatgcgacgctgcaattttgtaaatggaaaacagaactgcagctctgcttttcgttttccaaaggatttcaccatgattgacatcaatcttctgcgcaaacagctgcctgaagtggttgctcggctgaagacccgcaactttgagttccctgagaaagaattcctcgctcttgaaaatgagcgtaaggagattcagtcgaagactgaagaactgcaggctgtgcgtaactccctgtcccgtcagatcggacaggccaagaagtcgggcgaatcggcagaagatctgatgaaggaagctgccgctctgccggaaaagcttgctgacctcgagaaacagcttggcgaaatccgcaacaagctgaacaatctgcttcagcgcgttccgaatctgccgaacccggaatgtccgattggccgtgatgaccgtgcgaatgttgaacagtggcgctggggcaccccccgtcagttcgatttcccggtgaaggaccacgttgatgtggctgcgcctcttggcatggatttcgatacggctgccaagctttccggctcccgtttctgcttcatgaagggtgagatcgctcatctgcaccgcgccctcgcgcagttcatgctcgatcttcacacccggaagcatggctacaccgaatgctatacgccgtacatcgtcaatgcgtcgaccatgtatggaaccggtcagctgccgaagtttgctgaggacctttactctgcccgcatcggcggatatgaggaagagggagagcatgagctccagtatctgatcccgaccgctgaagtgccgctcacgaacaccgtctctggcaagatgctgaaggaatccgatctcccgatcaagattaccgcccagactccctgcttccgttccgaagccggctcctatggccgtgacacgcgcggcatgatccgccagcatcagtttgagaaggtggaaatggtgcgtatcgttccggaaacggattcctacgcgcacctgaaggaaatggtaaagaacgcggaagaagtgctgcagctcctcgagctaccctaccgcgtcatcatgctgtctaccggtgacatgggcttctccgctgctcagacctttgatattgaggtctgggttcctgctcagaacacctatcgcgaaatctcctcctgctccaattgcgaggacttccaggcccgccgtatgggcacccgctataagggcaaggatggcaagacccattacgttcacactctgaacggttctggtgttgctgtcggccgctgcctcgtggctgtgattgagaactatcagaacgcggacggttctgtcacgatcccgaaggtgcttcgtccgtacatgggcggtcttgaaaagatcgaaccgccggcgaagaaggcctgattcaggttctgacggaataaataaaaaagatccagcgctatgcgctggatcttttgctatgggcgaagaagaaactgcgcggaattacttcgcggcagccttcttggccgggcgcttggccgcgggctttttggcagcaggagcggcggcagcagtgtctttctttgcagcagccggagccttcttggcagcagcgggcttcttcggagcggcggccttcttgggagccgcggcttttttcggggccgcggtcttggcggcaggaacagctttagcgtcagccgtcttcgcggctacggccggcttcttggcaggagccttcttcgcaggagcggcggaagccttcttagcggcagccggcttctttgcaggagccttgacagcggctaccttgcgggcaccttcctcgacatccttcttgacctgctcaaccgtggctttcacggccttggccttcgccttggcaacttcggtctttgccttcacggttgccttcgcttcctcagcggactcagccgcggcttcgacatactcgcgggcgagcttgaccagattgtcaaaagtttcttttacaacagctttcttgccattgataagctgagtcttttcgtcaatgtctttcagcgcagcagcaaaacggctgcggagatcgtccttgttgctggtcttggtggtgcctgatttcatggaactctccaatttatgagaatgctgagtaacaaaagcgcgctcgttgcggcgtttttctgcctatttctcctattctaattagtttaactgacacaataaaagggggtagtggcatttcggtatattttttgctaagattcatagcctcgtacgatcactggaagggtggcagagtggtcgaatgcaccggactcgaaatccggcatacggttatgccgtatcgagggttcgaatccctccccttccgccagataaatcccagaagacaaaggtcgctgggatttttctttggctgtttgagaacggacccattcctggcggaggccaggggaaatgagtccgtttttctgttttcagaagaacagaacggatgcaccaagagcgacagccatgccggcgcagcagggaagccaggtgcggcggatgacagtgagcggcgaaacgttggcgaaccccgcaacgataatgatgacaccggcaaccggggacagcgggcgaaggaattcgcttgaaatctgcatcatcagcaccagggggatcggatcgccgccgagaccggcagcaagggaaggcgcaatcggcacaagaccagtgaaggatgcgacaccagaccccgtgagaaccgtaacgagaccgatcacgccagacatgacaagtcctgtaccggtaatgccgaacccgacggacttcgcggcatcaatcagcagtgcgacaagtccggcattcttcagcccggcagcaaaaagcgcggcgacaaagatgagaccgacgacactctgcatcatgtgtcccatacccttaaacatcgcgaatccatcctcaaaacaggcgttgagggatctgcggtggagcagatccaccaggatcccgatgacccagccgataaacatggcaacagccacatccagtacgatggtcttataaaccatcttgttgaagaggaagagcaggatcagaggaacaatcggcaggagcgcgtagtaccagggaaggttttcagccttggaggtttttgcctcaatcattttcggatcggttttgacaagaatgccggccgcggtgtccttcttatcgagatagctctgtacgagaacgtgaagcaccgccatggtgatgaccgccgggattgcgaccggaagctggtactggatcaggtagctcatcggatcgataccggcggtattcgcggcaagaaccgcaatcgcggaagacggcgcgtagctcacaacgagaaccgagccgatcactgcggccgcggcaacgcctgacacaccgagaccgataagaagcggatagaccgaaacggcgaggagcatcgccataccggcagcggatgtcacgacgaacccaaggaagtgtccgaggataaaaacggcacccatgatcagataagggttccggagtttcctgagtggtttgagacagacgctaacgagcttatcggttgcgccgatctgatccatgtaggccgcgaagcctccggacaccagaatgatgaagccggttgtggcgacctggtgcttcgagagcgcggcaagcagtgcgaaaagatcgaaaccgatgaatccggtggaatgagttccttttggcagcaggtccatattgccgcccagaatggcaagcacattgagagcgatgcccgcgaagagcagtaggatattcacctgcagttttttaacgattccaatgcctgtcagaacgacaatcagcagcgcaatatacggcattgcatcatgcatttttattctccctttgacgtgaggtgatgcaagatgccgacggaaagcccggagacgttcaggccggagcgagtgatcctgctttcgtaagtccgtatgtcctggcggcccctcccgaggtcggcgtgtcagtcggtacgttttgcgggcgggattccgtacgcgacgtgtgcggaacagcaagcgattcttattaattctgccattcctgagccccgtacgcctacttatttgatactttaatgtgtcctcatttcagcctaattactgtttaaatgctttttaaaagcaataagttccatatattccgaatttaatttgcgtagaacttaattggagaagttgctgaaaaagctatgaagaaaacagtggggagaaggtatgaatccccctgattatggggaaacgggtttcccctgccgcgcgcctttggcgtgcggcgggaaagtgaggaaaataacgaagagcggaattcaggccgtgatgtcagagaagttcagtaccggggttctgactgatcatcctgccgtaccaggccataaacatgcccggacagttcttccattcgctttacagtcagttcaagaaaggcgcgtgctgggcgggaaagagcccgatccgggtaaagcgcgtaaaacccgtattcttcaccttcccattccggcagcacccggacgagttcacccttatcgatatagttctgggcgaattccgccggcagcatggcaaccccgtcgcctctcaggcaggatcggcagttgatgaaagtgtttcggctgatgaaacggccccggacgttcactgtagcctttttaccctctggccctaccagctgaatgctcgagccgagataggtgttcaccagaaaattgactttttcgaggtcactcgggcgggaaatcttgcgcgactttttgaggaattcgggactcgcgcagaagtaattctggacaactccgatttttttggcgactgaggaatccggaagccggttaccaaccttgaacgcgagatcgatcccctcgtgcaccattttgatcggctgatcttcagtgaccagttcgatcgttacccccgggttggcgtccaggaattcctgcacaaccttctgcagaaagacccagccgatgatgacacttgacgcgatacggatggaaccgaaaagcggtttgccggcctgatcccgcagttcaacatagagagcgttcgttttcgcaagcaggtcgcgagcccggacaagcagctccatgccttcagaggaaagggtcacttttcgtgtcgaacggaaaaacagcttcgtgccgagatcctcttcaagagcctggatccggcgcgtaaccattgaccgtgtcattcccaggctgtcagccgcccggctgaagcttccggtttccgttacgcgaagaaaaacactgagagaaggcagaagatccatagcgttctattgtttcaattattaaaacagtttgtgctaattattgctgtttataacatttttatcattcgttagtattacctcgtgtgagatttttattcgtcatattgactagaaataaaaacgcacttgaatcgaggagagatatatgaagaaattcattcgttccatttccgttgccaccctcgctatggcgatggcaatccctgcaatggcagaccgcgtgctcaatgctgatgtggttgtggtcggtgccggcgcgggcggtacggttgctgccgcgagcgctcaggaagccggtctgaagacggttcttctggaaaagaatgcctttgcgggcggcgccggcaacttcatggaaggctccttcgctgttgaatccttcatgcagaagaaggccggcgtgaagctgacgaagcttgaggaattcaaccggatgggcgaataccaccactggcgcatcaatgctcctctggtgaagcgcttcattgaagaatccccgaagaccattcagtgggtctgggatcatggtgtgcattggaaggaagtgaagtccgtctgggcaggcaacaagaacctgacctggcacatctacccgcatgccggctctctcccggcagctatggtgaataccttccagaagaagggcggcacgctgctgcttcagactccgggcgaaaccctgatcatgaaggacggccgtgcggctggtgttgtggccaaggatctgaagaccggtgaaaaggtgaccgtcaacgcaaagtacgttgtgctggcgaccggcggctataacttcaacaaggacatggtggtgaagtacaccggacaggatctggttccgtccggcgctcctggacgtaccggtgacggtatccgcatggcaatgtccgccggtgctgtgggcgacaacatgggcccgatgatgattaacggcgccttcaatccgctgccgggtgaagcgatctgcaatggccccaataaggaactgcgcgctatcttccgtcagagccagctttatgtggatggagccggcaaccgctacttcaacgagcagctgacgcttgactggcctgtggcttcgaacgctattctgcgttccggtgaatggacctacctcttcttcgatgatgcgttcgtaaaggaactcggcacgaagggcaagggctacctcaacccctgcggcaacttcatccagcgcggccaggtggcgaaggaactgccgaagctgctgcaggatggcgtgaagcgcggcgatgtctttgaaggcaagacgattgaggaagtggccaagaaggccggtctcaacgcggataacctgaagcgcgctgcggctgatatgacgaagtttgccaagcagggcaaggacaccgagttcggaaaggataagtactacatccgcgcggtctccaaggctccgttctacatcgtgaagggcaagctccacacgctcgcttctctgaacggtgtcaaggtgactgagaacctgcaggttgtgaatgccaaggatcaggtgattccgggtctctacgctctgggccatgacgccggcggtgtgtacggtgactcctatgacctgaggatcggtgaaggcacggcttcttccttcgctattaactcttcccgtattgctgtcgagaacatcatcgatcagcagaagaagggcatgtaatccaggcctgacggagcgggcttcttcccccgctcctgtaataaggcaaaagaacccgcctgaatcctttcggatcaggcgggtttgtcattccagaagaggaccagagaaagctacttgtccagcgtgatggtgaccttcatggaaccgacacgtcccatttcctccacgcccttctcaatgcggccgatcggctgcatatcgaaatgctctccattctgcgcgtagagaatcacgaaactgtgccgcggaggccagtagacgatttcacccacttcgtagccgcggtaggaaacttcgtttgccggcagcgcgtcgcggaaccggtaacagagttcacgtccgtagagatcttcaagaggaagggtaagaggcagtttggcgatcagcgcgcgggtggtggcgttgtcatccagtgtggcgtaccaggtgcggtttccggcggaaatccggacgcggcggccggtgtttttggcttcagcggaactcatggtgagggcggctcctgcagccgaggctgcgagtaattgaagaaaatttctgcgtttcatagggattccttattttttaaggattctgacgtcgagcgtgccggagagcttcaggagatcattttgcgggatctggagctttccaaggtgaacaattccgccgatggaggaagagtgctcttcgccgttcacgaaaatcacgaagtcatgccccgggacccaataggcaatgtcgcggttccggaagccgtttttcacactggattctgaatgcgtgagaggcggcatatcgccgcagaagtcatgctctccgcggctgattctgacgtgaagcggcagcatgccgagaaagttccggccttccgctgtgtcggtgactgtggcggtataggctttcccgttaatcaccatctgaaccggcgtatcggcggatgcggtctgcgaagctattcccagcgcggccgcgaaaatcagggctgcagttttcatttccttttcctttggcctcagatatggaggccctgaacccaggatttcacttcagaggcgagattcgcgttctcggtcgcgaaccggcggccctcaaggacagcggctcccggcgcgagcttcatgatgtcacttcgggcctgaggaatatccacttcaagtgacgtgcagaaggggatgatcgttttgcctttccactgatagcggctcagaaatgtccggatcaccatgggctcccggtaccaccagattgggaatcccaggaagaccacgctgtaagagttcagtgagaggtttgagggggcgattcccggtctcgcgtcactcttcatttcctgctcggcaatacgcgaattctcgcggtgaagcaggggatacttttctgtcgtcacaatttcgtgaacatcggcattcagtgtctgagcgataacgcgggcagcttctgccgtattgccaacccagggtgtggcgtaagtgatcgcatccataccgcgggaaatgctgcgagcccgggaaaaataggcaaccagaatttttttcttcggagcggcggcaaaaccggttccagagaggaggctgagaccggctgctgcggcacctttgatcaacgttcttcgttccatgatcagatcatccttacttcagcttgtagctcttcatctcgttcagaccgaagagatagtcactctgggcctggctcttatggcaggcaaggcaccgtgtaacgggatcattcgtgatcagggcacgggcaggagtaaaggaagcgaactcccagtctccgtttcggacagaggccggatagtccttcccgccgttcctcaccttttccatgatgatgtagcgaagcacggggccgcgcttcccgttctgatcccggtactcaattccgacgacagccgtgccgtaaggaagagtttttccggactgcagtgcctggatgcttgttttctgaacgtacttgtcactgatctttccgccgtagttcgacgtgctgtagtgaacaaatccgttcaggctggccggaagtgacggagcggcgccagcgtcagcaatgaggaaaaaggcggctccaagggcaccggcaactgggaataaatttcgtaattccattctgtctcctgataactgtctgcctgtctgatgtggaaaatcttattgccggatcgggtcgcaaattgttttgttttcctcatttatctgctaaaaaatatcaatacagaaagaaattaagagaacaggcgtatgatgcttttatcagacagaaaacgaatcgcaggggaaaaatggaagataatcatctgacagaagtcctgacggaactgaagcgccgggcgctggaaaaagacaccagcgtggggttcaatccgaccggcattccggggctgtccgttgtggtccggacccaggctggggagaagcggtctttttcccgtccgtacctcgcgattgtgcttcagggaaagaagcggactcagatcgggcagtacgagtatgtgtacggtccaggagactgcatcatcacctgtattgatttcccatccgttacctatattgaagaggcatcccccgagactccctttgtgtcagtcgtaatggagctgaaccgggcgcttctcacggagctcgcgctgtcacttgcccctcggcgagaacctctgagctccggtgatacgcccccgtacgccgtgtttccctgctcggcggatctcggagaaaatgccctgcggctctttgatatcgccgataagccggaggctgtgcagctcctcgcgccgattctgatcagggaaatgcacgcgagacttcttcttggtgaggccggtacctggctctggagtatctgcgccggcagccagcacctgcagcagatctcgcacgcgatcgctgtgatcaaggaaaatttccgcaccaatctttccgtggaaacgctcgcgtcctctatcggaatgtcatccgccagtttccatcgccacttcaaggcgctgaccggatactcgccgatccagtatcagaagaccctgagactctacgaagctcggcgccttttgatggcagaccggaagtcagtcggattcaccgcaggagctgtgggttacgcaagcagttcccagctcacgaatgattaccggcggtttttcggtgtggcgccgcgtgatgaccggcacctgaacagctgaccggagaaccctcttcagctatcccatcaataagctatcccctcaggaatacaggggatattttttgccctgcgtcagaaatccaagcgtgaggcggcagaaatccgtctgaaaagagtactgttattaggcccgatccgtacaaatgaattgggcattcatcacgcactggcggggacgtatcaagagttcccggcaggcctctttaagaaaagagacaaggattaaaacaatgcagacgaagttcgctttcccggctctcaccggtgaaggaaagctgaacggcgttgtttctgctggcaaggtgctccgcgtggggccggcaggaacatttccgtcggatagctttatcttctacggccgtactgtcaccagtcacggcagccgtactgtgcgccgcacatcgccttatttgctttgagcttgatgaaacctcgatcccggaacggctgatgaggtcctgctccggttttctcacacgtaaaaagtttctgattccctgaagaatctcaggctcagaggagataacttatgctgaaaaaatttgcggtctgtgccgccgtcatggcttccctttataccgcttccgcccttgcggctccgactctccgcgtcggttccgaaacgaccttcccgccttttgaattcgttgatgtcaagacgaaacagttcgtgggctacgagatcgatctgatcaacgctgtcggcaagaaggcgggttacaacatttccgttcagtcgatggggtttgacgccattattccggctctgatgaccggtacggtggatgtcggtgtctccggcatgacgatcaccccggagcgtaagaagaaggtcgacttcacggtgccggtcttcaagggcggtctcgttgctgtggtccgtcagaaggacgctgcggcctataagactcctgctgccatcaagggcaaacaggtctgcgcacagcttggcacgaccggtcagctgaaggctgaggagatttccggcaagaaggcccgtacgttcaataacgcggccgaagccatgatggaactccgcaacggcggctgcgatgccgtcgtggccgataagcccgtgattgaatacttcctgaaggaaagccgccagagccgctacttccatgagcttccgacccagctcacgacggaagactggggctttgccgtgaagaagggcaacaagaaggtgctgaacgctctgaacagcgcgctggtctccctccagaaggacggcacggtcgcgaagatccacaagaagtggttcaacaactaagatccagatccatcttgcgcaggggaatgtttccgagtatcttcagtcggattgagcaagagagttcccctgcttcaacaacttttaccccctgtgcttcccggttctgaggaagctctctataagagaagcccgctctcggaagcgggttcagatgacacggagaaattgaatgtttaagaatctagtgatggcagctgccgtaaccatggcctgtgcgggttccgcgctggcggctccggtgctgaccgtcggtaccgagcccaccttccagccgtttgaattcgtggacgcccgtacgaaggatttcgtcggctacgatatggacatgatccgcgccgctgcgaagcacatgggctatcaggtgaagttcgtcaacatggggttcgacggtctgatcccggctctgatgacgaataatatcgatgccgctgctgccggcatgacgatcaccgctgaacgcaagaagaaggttgatttcacccgcccggtttaccagtcgacccaggtgattcttgtcaacaagtctgatgccggctctgtgaagagtgaaaaggacctgaaaggcaagaacctctgcgcgcagatcggcacggtcggcgctgaattcggccgcaagattccgggcgcgaaggtgaaggccttcaatacccttcctgacacgattcttgagctcaacaaccgtggctgcacggcagttatcgctgataagcccgttgtcgaatacttcctgaagcagcgcggcggccgcaacatggttgaagtccagaccgggtacccgaaggaagaaatggcgtttgctgtccgcaagggcaacaagaagctgctggatgccttcaataaggcgctggccgcgatggacaagagcggcgaaaccgctaagattcatcagaagtggttcagcaccgcgaagtaaagcgtcctgaatccattcgccgccggaaggcggcagaagaagccgggaccggaaaggcaccggcttcttcagtttttccacagtcctttccgtgctcacgcaacgcgtgatgagttccgtttttccacccaaccaatcaaagattccccaaggaatcgccaaaaagcccaaaagaggctattgatacggagaatactcaatgctgaagaaatttctgattgcggccgcagcggccatgacctgcgcgggttcagcactcgccctcccggtgctgaatgtcggtacgcagccggtcttccagccgttcgaatttgttgacggccgtacgaagcagctggtcggttacgatattgacctgatccgcgccgcggcgaagcacatgggctatgagatcaaattcgccccgatggggctcgacggcctgattcctgccgtcatgaccggcaacattgatctgattacctctggtctcacgattacccccgagcgtcagaagaagattgactttacccgcccggtttatcactcctcccaggtcctgctcgtgaataagtccgacgcacacgccatccggagcgaaaaggatctccgcaacaagaccgtctgcgttgaaatcgcgtctgccggcgctgagctggcgagaacgatcccgggcgcgaagctgaagaccttcaattctctcgctgacgatattctggaaatgcagaaccgcggctgcgtcgcggtgatttccgataagcccgcgatagagtactacctgaagcagcgcggcacccgctcgatggtggaagtacagaccggcttcccgaaggaagaaatcgccttcgctgtccgcaagggcaataagaagctgcttgatcagctgaaccgcacgctgctccagatggagaagagcggcgaaacggcgaagatctacaagaagtggttcgggaactgattcactgaacctcttctgaagtgaataaaaagaccggctggttcctgaaatgaaaaggagtcagccggtttttattggactcagcgtttgaatattgcggtcagaaaccggaccgaaggagacatcccgcggtccggcttctgagagaagcgtcagctccagctcttttcagccgcggcggcgcgcccggccagacgtccaaagacgatgcactcagcgttattcgtcgcgccctgatagatgttgccccacatggaaccgagttcgccggcagcgtaaagacgcggcaccggcttattctccggggtcatcacgtgtccgttcacgtccttcttcggaccgccctgggtgttcagcatggttgggtagagaacgatcgcgtagtacgggccgttctcagcgagcggagcggaaacaatgctccccgacttgcgctcgatatgaacaacgctcttatgcggattgtggatcggccgggcaaactgcgtatcctttccggccttcacgtcttcattccacttcttcaccgaggcttcgaggttttcagccgggacgccgatgatcttggcgagttccttaagggaatcggccttcttgatcacgccgctcgcgacttccttcgaattgtcgaaggaccacttgtagccttcgcggttcacggagtagccggacgtgatgctgccgatcgggccgcgcttgaacgcgacatcgtcaaacaccacgtagcaggggatataggggtagcgatgggtgatcgggtcaaaacggttcaccatgtaggcacgggtgtggccgtcagccgagaactcgtcgcagaagcgcttgccgtcctgatccacccagatgaaggaaggagacatcatctgaatctgcatggcagccttgcagcccgggagctcgcagccgagcgggcaggagtaggcggtcatgtgccagagacgggcgccggcagactgagcgaggcggacgccgtcaccagtgttgcccgggttgccgagagcgtggaacttgtggccctgggcgaaagtggtgagggattcctgatcaaactcatagccgccgcaggcaaaaatcacggcgcgcttcgccttgatgttgatttccttgccgtcggccaccgcgacaacgccgaccacttcgtcgccgttcttgatcagctgcttcaccgcggtgttcagcatgatcggaatgcggcggttttcttcgacggcgtagcggtagaggtcaaagagacagtcgccgccgcgcttcttgccgcggacgcgccacttgtcaatcgcttcccagcccttcagattctggaacccggcgtggccgtagacccagagcttggtgtcaggcttaagaccttccataaagctcttcacgcccatgatctctttgcagaagaccttgagaagttcaggatccttttccgaatccgcgaagtcatacgtcgcgttgagataggtgagggcgtcagcttcgttcttcgggatcatgaagccgccggaggaaaccgcggtgttgccgccgccctccttcatcttttcgacgatcagcaccttcgcgcccgcgtcatgcgcggtgatagcggcacaggcgccggcaccgccgtagccgaccacgagaacatcggtctccttatcccagcggatgtccttggaatagggtttcgcgatagcgctggcaaacggaagggacgcaacagcggcagcaccgcccttaagcagatttctgcggttgaaattcataatttttctcctggagtgggagtcagcaaaaaaacgattacggaactttcacggaaaactcatggcactgatcgcagacgagcttcgggggcttatgtccctgatgacactcggtgcaggcgatagggccaaggtgcgtgttgtggtaattgatatcgccgccggctgtctgctcagcaagcttttcatagcttccgccatgacacttgaggcagttctgcggcgtgacgtttttggagctgggcgctccaggattgtgacaggactcgcatttcacccccttcgctacatggcggtcagcgagaaagtgctgatcggccgcgagaacgggtgatgcgagaaaaactccggccagaagtgcggttgcaaaagtacggaacttcatgcaactctcctaaatgctcggttttttatttttattcgaattcgtctcccaactggaaacggattctatgtaattcgaatgaactagtcaatagggggtgcgtcgagcgatgatcgtgactgagaccacgaaaaaacctctgctcctttgataaagcagaggtttttcgcttttacgcggagtcagaaccgggggccctgatcagtgctttccccccaggacacggcgcatgaagagcgcggtgtcgcggagcgcttcgccgctcagcgtgtgctcggtcggataatcacgccaggaaaccgcggcgcctgcgtggctgatcgcctgaagcgactgctgagcgaccggaatcggcacgatttcatcgaagtcaccgttccccatgaagaccggcgtggcaagaccgcccgggcggatttcatcagcgatccggtcggcgagcggcaggtatccggagagcgaaatgatgccggctatcgagagctcttcgcggagtccggtgaagagcgccatcgagccgccctgcgagaagcccgcgaggaagattctctggcgcggcatgccgcgggccgtgatcgagtcgatcaggcggctgatccggcgggcgctcatccgaatgccttcctcatcctcgtaatcaatcaggttccgtcccggcaggtcgtaccaggcgcggagaggattcgcgggatccatggagagctgcatctcaggagcgttcaccatcacataccgggcggcagggccgccaagctgctcgatttcggaaggcagatctgagaagtcatgaatgtcgacccccatgcctccgagccacacaacggtgcagggtggggggagccgggtatcagagggctcaatcacaatggtttcgaggtcagacgccggaggttccggaacagcgttccggtttccgggaatccgaaccggtgccggatccacaaaggggggtgtctggcgggtttccgcttcaggcgccttctccgggggctggggcgcttctgtcttttccggcacgtcagggacagccttttcggccgcggccttcagagcctcttcccgcgccttcagggcggatttcggacggaaagctttgcagacctcaggacgcgtgtccacccatggaccgccgatcagatcgatgcagtagggaaccgcggcaaaaatgccgggaacgatcaccttcccgtcttcatcccgaaggcccccgagggtctccgcgatggccttcggctgaccgggcagattgatgatgagggccgcgtgatccggtatttcacgaagcgcgccgacctggcgcgaaagaatcgcggtcgggacgaatttaagcgagatcgcccgcatctgctcgccgaacccggggagctcgcgggtcgccacggcgagcgtggcttcaggcgtcacgtcgcggcgcgaggggcccgtgccgccggtcgtgagaacgaggtcgcatttttcatcgtcgaccagttctgtcagcgtcttttcgatcgtgtagcggtcatccggaatcaggcgttccgcgaagcggaccggggtttcgatcgcggcggtgcaccattcgcgcaaagccggaatgcccttatcctcataaacgccgctgctcgcccggtcagaaaccgaaacgagaccgatcagaatgccttcttcgtccctgtcactcatgcctcatcctccccggcggtgtcaccggtcttttccgggctgctctggaattccgggagcagcgcctcacgcagcacgcggaagagttcgcgctggaacttcgggttccgtttcgcgggatcttccttcgcggcttcgcgccgcgccatgcggatcgtctgacgcaggctctgaaggtccacgtcagggtgtgaggaaacaaaggccgtaagcggctcatccgacgcgatcagttcatcgcgcagtttctcgcagcgatgctgcagcgccaccatgccggcgctctgtcccttgacgtcagcaatggccttccggatcgcgtccgcgtcggcattccggagcagtttcccgatatgctgaatctgacgctgcttcgccttgaaggtcttgatgcgctggaactcctgcacttccctcagcacgtcgtccgggagagagagctttgaaagggtttcctgcggcatggcggtcagctgtttgccgagatcctggagggcaagcagctggcgcttcacttcagacttgctggggccgtcgtactcttcctcgccgtcgtcaccgaaagcgtaggcatctctgaccatgatctgcatgtatgtattgcgcctcttaaaaaatcttgaattgaagaaacagaaacaccgccttgggaaagactccggaaggcggtgtgttcatcaggcggagatccgcccgaagtttccccggaacaacagtttactttgaatattcaccggccgaaggatctttttcgcggcgggcgaagaggtccttccagagaccgacctgacggagcacctgcgcaggcgccgtgccgcccgtgtggttgcgggccttgagagcgccttcaagcgtgaggctgtcataaacgtcctcaccgatcttgtcactgaaggactgcagtttctcaagcggcatctcgtggagaccgcacttcatctcaaccgcggcgcggacgatctgccccacgatgtcgtgggcggagcggaacggcacgcccttgcggacgaggtagtcagcaaggtcagtcgccgtcgggtagcccgcgtggcaggcttcgcggagcacatcacgctggggttcgacgcccggcatcatctcgatgaaggcgtggagcgtgtcgcgcaccgtatcgatcgcgtcgaaaatcggttccttgtcttcctgcaggtccttgttgtaggcgaggggcaggcccttcagcagcacgcagaaagcgcagagttcgccgatcacgcgggcagccttgccgcgggacgtttcgggaacgtccgggttcttcttctgcggcatgattgaagaccccgtcgtgaagcggtccggcaggtgaatgaagttgaaacgctggctcatccagtagacgagctcttcggagagcctcgagatgtgaatcatgatgaggctggccgcggcgaggaattccacgccgtagtcgcggtcagaaaccgcgtcaagcgaattctgcatgacgccttcgaacccgagaagctcagccgtgtactcacggtcgatcggataggtggtgccggcgagagcggcggcgccgagcggagaacggttcacgcggtgacggaggtcaagcatgcgttcgtggtctcgctcaaacatttcgacgtaggcgagcatgtggtgaccgaaggtgaccggctgcgcgacctgcatgtgggtgaagcccggcatcaccgtgtcggactctttctccgccacgcgcacgagcaccttctgcagttcattcagctgcgcgacgatgccgtcgatttcgtcccggagatagagacggaggtcagtcgcgacctggtcgttacgggagcgtccggtgtggaggcgcttgccggcgtcgccgatcagggacgtcagacgggcttcgatattgagatgcacgtcttcgagtgcgagctgccactcgaacttgcctgcggcaatttcctcactgatctgcttcatgccgcggcggatatcggcgagatcctgttcggaaatcacaccggccttttccaacatggcagcgtgggcgagagagccattgatatcggctttcgccatccgtttatcgaaattcaccgaagcggtatatcgcagcacgaagtctgcgacaggttcggagaagcggcccgaccaggccttgtttttcgcgtgcagcggatcagaagagtcgttcgtatttgccatgaccaacgtcattaatttggaggaaaaacgtaattttacttcgattgccgggcagagcgcgcctgaatgctccttttttcggcaccgcatcgcgtcatttaaggatcagcttctgtcccgctgatacaatcggagcacctgaccgggtacggtgcggcagagcgcacggtccggtctctgattacatataaaggcaggacactgatgtcggataattctcgctgcgtgatcgcgacacgcgaaagcccgcttgcgctctggcaggcggagcatgtgaaggctcttcttgaaaaccgttatgaaggcatggcggtcgaacttctcggcatgacgacaaagggcgaccagatcctcgataagactctctcgaagatcggcgggaaagggcttttcgtggtcgagctcgaggaaacgatgcggaagggaaaggctgacatcgcggtccactcgctgaaggatgtgccaatggagctttccgagggtttcgtgctcggcgcggtatccgagcgtgaggatccccgcgacgccttcgtgagcccgaagtatgcgagtctcgatgagatgccggacggcgcggttgtcggcaccgcctcactgaggcgggaacttatgatccgcagccactacccgaagctcgttgtgaagccggtccggggcaacgtcggaacgcgtctccgtaagctcgacgaaggtcagtttgacgcgctcatcatggcgtccgccggtcttaagcgccttgggttcggtgaccggatccgcgccgtgatcgacgcctcggtgagcctcccgtctcccgggcagggggcactgggcatcgaggtgcgtgagggggatgaaaagacgctctctctcgtttcctttatcaattcgcctgaagtccgggcctgcaccgcggcggagcgggaagtgtcacggtctctcggcggttcctgccaggtgccgctcgcggcctacgccgtccccgagtctgacggccggatctggcttcgcgccatggtcggcaatcatcacacgggcgaagcggtgtttgcagaagcccgcggtccgatggagtccccgctcgatgtggcggctgaagtgcttgaagccctccgggcgaagggcgctgaacggattctgaaggaggtgctcggttcatgacggagactcaactgaagcagcaccctgtgatccttacgaggaccggggcggtgaatcagaggctcgccctccggttctcgaagctcggcttcaggacgttcgcctggcctgccttcacgatcaggctgccggaggacgagacgcccgttgtgaagcgtttttccgacctttcggatattgatctcgtgctgctggtgagtccggcctcggtggccgcggtggctcactgggtggatcactggccctctcacgtgacgcttgccacggtgggagagggaaccgcgcgggttgcccgcgcggcctggggtgagtccgtgccgatcatttatccggcgggtgacgccgcgcattccggaagcgaagcgctgatggcggagctccggaagcggggcattccttcccgggtgctgatctgccgcgggcagaccggacgcgagtggctttcagaagagcttctctcggaaggcgctgatgtgcagaaactgatgtgctacgaacgcctcccgctgcagctcacggtgcagcaggaggatgaactccgggaagcgatgaagggaccggcctcggtgacctacatcacgagttcggaagcgattgtgtcgctgctccgggctgtgcatccggtggagggagcctgggagtggatcacctccggcgcggttgtggtgattcatccgagaagtgaatcgaaggtgctcgaggcgggattccatctcgtgcggatgtcctccccgatcgatgacgaagtcgagaagaacgtgatcgcctgtgcggaggggctcggctgatatcggctgagggactccggcaaacggctttttctcagaaaggatcaatggaaatgcaggcaaaagtggttttcgcccagatcaatccgatggtgggtgatatcgcggggaatgccgcaaagatactgactgaagcgagggaagccgcggcttccggcgcctcggtttttgtgacgcctgaactctcgatctgcggctatccgcctgaagactgggtgtcgagaaaggagtttctcgcttcctgcggcgacgcggtccggaagcttgcctctgaccttcgtgatctcacggatctcgcggtcattgtcggcacgccggttcagaaggatggcagaacctataacgctgcggccctgatccggaatggcgcggttgaagctttttatctgaagcaccatctgccggaatacggcgtgtttgatgagccccggctttttgctccgggcgaaggcgctcttgtctttacggcgggcggcgtccggttcggcattctgatctgcgaggacgggtggtacccggatcccgcggcggaagccagggccgcgggggctgaggtgctcctttccatcaatgcttctcccttctcagtcggaaaggctgatgagcggctgaagaccgcgcggaactgtctcacttcgacaggcctcccggcggtgtacgtcaatatggtgggcggtcaggatgagctcgtctttgatggcggcagttttgtcctgaatggtgacggcacagtgatcagccggcttcctgagttccgagaagcgtgcggcgaagcggttttcgcgccgggcggccggattctttctgatgccgctccgtctgagccgcttgaagaggatgaatcggtctaccgcgccctgatgctcgcggttcaggattatgtggggaagaatcgctttccgggcgtgattctcgggctttcgggcggcgtcgattccgcgctgacacttgccattgccgcggacgctctgggaccggatcgcgtccgcgctgtcatgatgccgactgaatacacggcagatatcagtcttgaagacgcggagaaactcgcccgcacgctgggagtccgctacgacgttatcgcgatcagcagcgtcttcaatcagtacatgacgatgctcaacccctactttgaagggcgtccgtgggatgtgactgaagagaatcttcaggcccggatccgcggcatgattctgatggcgctttccaacaagaccggagccctcgttctcacgaccgggaataagagcgaaagcgcggtcggctattcgacgctgtacggtgacctcgcgggcggctttgcgctgatccgcgatgtactgaaaacacgggtttaccggctctgtgcctggagaaaccggcaggagcccgtgattcctgagcgtattctcacgcgtgctccgtccgctgagctgcgtgaagggcagaaggacgaggactcgcttccgccctacgcggtgcttgaccggatcatcgaaagctatgttgagaaacgcatggctcccagtgacattgcgcgccttgatgggatgaatcctgagacggtaaagcgcataatcaccatgatccaccgctctgaatacaaacgccgtcagagcccgaccggtccgagaatctcgcctgtggggttcggccgcgactggcggtatcccatcacggggaaagttaatttctaatttgtctgcattccaaaaaaggatagggaaagatgaaacagattgtcgcgatcatcaaaccgttcaagcttgatgaagtccgggaggctctggcggatctggggatctccgggcttacggtcacggaggtcaagggattcggccgccagaagggccacacggagctctaccgcggagccgagtacattgttgacttccttcccaaggtgaagattgaaaccgtggtgtcggatgatctctgtgacacctgcgttgaagcgattcagaaagcggcctacacgggcaagatcggtgatggcaagatttttgtgagctcgcttgagcaggttatccgcatccgtacgggtgaaaccggggacgcggcggtctgatcagactgagtgctgtgcgctgccgtctggcagcagaaagggcgcctctttcttagcgggcgcccttttttgattttgaatcagtgttcgagtccgatcaggaaagcaatgactgagcccagtccgaaaagcagaatgcggttccggaaggctttgtgaccgccgccttccaccgcaagcctcggaatcagttcacacatggagatgtagaggaagcttgccgcggacagcgcgagcgcgtagggaagcatcccgcggatccagtcaagcaccagatagccgagaaggccgccggtcgcggcagaggctcccgcgagcagcagaagccggaaggccttttcgcggctgagtccggagcgggtgagcagcacaaaatcccccacttcctgcggaagctcatgaaggagaatgcccgccgtaatggcccagccaaggtgcggcgagacaagaaacgaactcgcgatcacgatgccgtccgtaaacgtatgcagagagtcaccgatcacgatcggccacactccgcggatccggagagagccgtctatcggcttctcgcagccgtggctgtggtgatgcagatcgaaaagctgctcaagcgtaaaaagcagcacgcaggctgcccatagcgcgatgccgatgtgacggggatccgccgcgtgctcgaatgcctcaggcagcaggtgagtgaaggcaagcgtaaggagaagaccggtggaaacgcaggaaagccctgcgccccagcggtccagaatgcggccgttcagcgaatacgctgtgacaatcgcgatgacagtcgcgagaaggcaggccgagataatggaaaaaagcagcatgttctgacggttacggtccttacggtctcggagccgagtacggggcgtgggcgagacccttcagaagcacaatcagggccccagatccgccgtcaatttcctgcgcttcagcaaacgccatcacgcagtcacactgcttcagccaccggcgcaccttttccttcagcactgagtgtccgccctcgcttccatacccctttccgtgaacgatacggacacagcgggctcctgatttctgcgaggccttcagaaactgcatgacggcctcacgcgccggatccacccgaagaccgtggagatcaatgtggttctgcacggtccagtcgccgcggcgcagttttttgcagatatccggcggcaggccgtcgcgccagaagcatcgcccgtcctcactctgcaggaaggtgaggggatcaacatcgtccgagatggaggcctgaaggactgccttatgctcagcctgggtctgacggggaatcggtgcgggtttcgggtgaggaagctccgcgcgcttttttgtccggatcggttccacgcccatattggacatagcggatgcgaacgtctgggcgtcatgcgcctgcttttccttcaaagcctgagcgcgtttccgctcttcctctgcggcccgggctttctcctcaagctccttgccgattttcttcagatcctgaaaactgctgagtgttgtcattctgatgccttaaacctaaccggacggtattgcgattttagcggtcgagcgcctcaagccacttctgagcgtcgagcgcggccatgcagccggtgcccgccgaagtgatggcctgggcatagaccggatcctgcacatcgcccgcggcaaagactccggggactgacgtcgcagtcttcgcgtcggtgccgcggcccgtgacaatatatccgttttcaagcgcgagctgtccggcgaagatatcggtgttcggcttgtggccgatcgcgatgaagacgccgtccaccttgatttcttccgtttcgccggtagatgtgctgcgaagcctgaggccggtaacccccatcttgtcgccaagcacctcatccacttcacgctccaggtgaaggatgatctttccttcttccacggctttcataatccgggcgacctcaatcgattccgcacggaaggtgtcacggcggtggacgagatgcacgacagaggcgatgtttgacaggtagagcgcctcgctgcaggcggaacttccgccaccaacaacagccacaggcttcttgcggtagaagaatccgtcacaggtcgcgcaggcggagacccctttgccgcggaacgcggtttcgctcggcagaccgaggtaccgggcagaggcgccggtcgcgatgatgaccgcgtcagctgtgtagacaccctgggtgccggtaagggcaaagggcttggcggacagatcagctgaggtgatgacatcgttcaccaccttggtgccgaagcgctcagcgtgcttcgccatccggtccatcagctccgtgccgaaaataccctcaacggcacccggccagttatcgacttcgtttgtcgtagtcagctgacccccggcctcgagaccggtgatcagggtgggattcagccccgcccgggcggcataaatcgcggcggtccagcccgcagggcctgaaccaaggataataacggggctatgcagagaagaagtcattttgtgttcctgtaaatggcacgcatttttctgtatgttaattaaagcccgcttttcaggagaggcgccttgggggaaaatggcagaatttctccgctttgcgctttcatataatggcacccatgactaagaatccttcaccttccaccagtgtgaaaaggcgccgcgcaccggtcgtccgtccgtatctcagacagtccatgaagcagactgaggcaccgaagcggagagatttcaccggtgtgagacgtttcctcacgcggatcagccgcggagcagtctggctcgtgattgccatactgatcctcctgctcacggttgcgctggcgacttacagtccggcggaccccggtttctcaatttccatgcatgttgatcaggtggaaaactggctcggccggaccggagcctggatctcggacgccctgatctatatgttcggggtgtcctcatggtggcttgtggtgacgggcgtgttttcgcttctgtcgctggctctcggatcgaggcgctcagataaagtccgggagcaggagcgagggctctcatggatcgtaagcatcatcggtttcgtctgcctgatgtttggttcctgctgcctcgagcggttccttgagcttggagtctatggtctgcttcccgcgggaccgggcggcgttgtggggcatttcttcagccgcccgattgttcacacaatcggtgtctatcccgcaatggcggtcttcctcgtgatggtcattctgggtgcctcgctgctgttccgtttttcctggatggatatctgcgaaaggatcggcacagcgattgacactgttctccattggggatcaatccgcagagcggaggctgaagaccggcggatcggcgaacaggtccgtcaggaaaagagttcagagaccctcccggtgaagcacgaagtgagtattgaaaaggcaccggcagccgcgacgccggaggctgagcacgaggacgtcgctggtgacgcggatgaatcttccgcagcagaggctccgaagcgtccggcgacaaggccctccgctcccattcctctcagaactgatctccccgccggtccgagattcccgctctctgtactcgatcctccggatccggaagtggatacggtggatgaggattctctcgcgctcacatgccgtcttattgaatcgaaactgaagagtttcggcattgatgcggctgtggttgccgcccgccccggtcccgtgatcacgcagtttgagattcagcctggggaaggcgtgaaaggatcccgtatcgcggatgtctgtgatgatcttggccgggccctcggtgtcggcaatctccgtatcgtgatgagtctccccggcacgacgagcatggggctggaaatgccaagcgccaatcgtcagacggtcaggatttccgagattcttgcgtccgaggaattcacaaactcaaagtcgaagctctccctcgcgcttggcaaagatatcgcgggcaacccctacgtggttgatctcgcgaagatgccgcatctgctggttgccggtacgaccggttccgggaagtcagtcggcatcaacgccatgattctgtcgatcctttaccgcagcaccccggacgaagtccgcttcgtgatgatcgatccgaagatggtggaattttcgccttatgaagggattccgaatctgctctgcccggtggtaacagatatgagcaaggctgtgaacgctctgcagtggctgacccgggaaatgaaccgccgctattcgctcatgcgccgcgttggtgtcaagcgatttgaggcgttcaatgaaaaggtgaaggaagcggaggagcagggccgcccgatctcagtgccttcggcttccaatcctgatgagatggaagagctgaaaccctggccttatatcgtggttgtggtggatgagctcgctgatctgattctggtcggctcccgccgcgaggtcgaagtcctcatcacgagtctcgcccagaaggcccgcgcggccggtatccatctgatccttgcgacccagaggccgagcaccgatgtggtgactccgctgatcaaggccaacattccggcacatatcgcattccaggtggtgacccgctacgactcgcaggtgattatgggtgagccgggagcggagaacctgatcggaaacggcgacatgctgttccgcgtccccggcatgagctccatggtgcgtctgcagggctgctatgtttcagaccatgacgtggacagcgcggtggctgaactgaagaaatacggcagccccgagtatgtggatgacgtcatggagaaggtggagccggaagcgggtcccacgcagaacggcggtgagtcagatgccctttacgacaaggcggttgagattgtgctgtccaccaagcggccgacgatttcttctgtccagcgtcatctttcaatcgggtataaccgcgcagccaatctgatcgaagcgatggaaaaagccggtattgtgtcagcccctgattcctcaggaaagcgtacgattctcacccctgttggaccggattaaccagagactccgcgcagtctctcatcaaccgtaacggaaatttgcaatatgacagaaccttctcaggtagatttgaaccgatacagcttcaggctcgtgcttgggcggaccgattcaggcgccatctggccgctggctcttcatgagagccatggaatcatcgcctcgggctctgacgcggaggcgctgcgggctctcgcatcggctcagctggagagtcttttccatcaggagtgcgtcggaaacgccgagcttatctgggctggtcagacgctgcccgcctgggccgagggacggaaggatgtgaccgcggtttccgaaccggctgagattttttcgcggctcgaaacctttgtcgaggaacagaaccgccgttttgatgtgatgcatgaggctggctccaataacctcccgcattacaatgcggcgtctgccgcggccgggcgtgacctgctgcccttccggatgttcttcattgaggatcttccgggtacggtatcccgtcttggtcacaccttcctcgataagctctgctacgcggcacggtacggaagagcctgcggcatgcttccgtatgtctgcacgcagaatccggcgcccgaaggactgccggcgctcctgaaagctgaagtgggtgatcgtgtctgcctccgggtgccgagccgccgtgattctgtcatggcgctgatggcggtgggggcagagacgctttccgacggcgaactcctttaccgaaatgtcgaggagaaagaagaggccgtcaggcttcactattgattgggacagaatcagatgcaaaaaaatgcgtgtgcggcgcttgccaccgcattgcttctcggcagtttttccattccttcgcttgcctccggaacggagcagctcgcgtcgttcctgaaagggactcattcggcgagcggatccttctcccaggtgaccgcggaccggaagggaaagaccggacaggccatgtccggggtattcaaattccagagaccgggaaagtttgtctggaattacgaaaagccctacgagcagggcatttactgcaacggccggacgatttctgtctgggatccggatctgagacaggtgacggtgaaggcaattgcttcctccatgccgtcaagcccggcggccattcttttcggaaacaatgatttccggcgcgatttcacggtgaaggatgccggcacgaaggatggtcttgagtggatcgacgctgtgccgaagctgcacgatacgagtttcaccgatatccgcatcggattcagggatggacttcccgctgcgatgacgcttaaagattcgtttggacagacgattacgcttcatatgtctgatatgaaaaagaatccttctatcagcagctcagcgtttgaattccgtcccccgaaaggggcggaaattctccgtcagtaaaagcgcagtttttcacgagaatccccgcaatattcttataatcaaagaatcttaagaattaagggtcgatgggcctcgtgccccttgatccgttgctgggggtccttgatggatttcaacatgcgcgtccagcgcattgatcaggccattcagtcggacggcatcgtccccctggaaggtctgctccgtgcgactgggagcagtattccgactctcaggcgtgacctgaagtatatgcgtgggaagctgggctttcccattgtttattcacggaaaaataacggctaccgctatggaagtgagagcggcggagagccggtccgtgttcccgcggaagcggtgcttccgcatctctggttttcgccctctgaactgccagtccttctcgccggctacaagtcgcttcgccgattgctcgagagcggtgccttttctcgccttaccgaggcggaggcacgggctgaactcgcccggatttatatgaagctcggctctggtgacagagaaaggaaagagcttctgaaacgtgtgactctcgaggaagaaccggagtcgattccggaggccggcgtttttgaaaccgtggggcatgctctggtttctcagcggcgtctgtctgtttcagtgatgcctggcgtcagctcgctagaaatttccccgcttcggatgatttcccgcagaatcggctggctgcttgctgtctggatgcatgaggcttccgcgcttgcgctgcttccggttgaccggattgtgtcagcccgtgagcttcagacccgcacccatttcgtatcgcagagaggactcgctgcttttctggagaacgcatcatgacagaagagcagaaacgccgtcacggtcaccgtcctcagaaacagagaaagaaacaggaactgccggagatctttttctgcggcgatccgcatggagagttttcccagattctgtccgcggcgagagactacaagccggcggccatggtgattctcggtgatcttcagccatcaaagccgcttgaggaagtactggcggaagccatggcatttacggaaatctggtggattccggggaatcacgataccgattctgacgcgatttatgacaatctctggaagagcccgcttgcggcacataacctgcacggccgtgtcggcaatgtgaaaggggttcggattgccgggctcgggggcgtgttccgggggcagatctggatgccggacggaaagccgaactatgcctcggttggagcttttctgcatcgggttgggaaaaacaacacgtggagaggtggactgccgaggcgtcatcgctcctctattttcccttccgtctatgaaaacctgtcccgtcagcatgcggatatccttgtgacgcatgaggcgccgtcctgccatcggaaagggtttgccgcgattgaccgtctggcgatggatcttcatgtgaaatggctgtttcacggccatcagcatgaaagtatcagctacggcaaatacagcggcattcaggtctgttcggtagggctcagagggattgtgaatctgcggggagaggtagtggtcgaagcgcagattgaccccaaagatgccgccgcgcttgaagcgcggggcgacgccgttgttgagacgaaaggtgaaacctctatcctcgtctttccggataaagccgggagccgcggccagggcctgtcgggcaaggtaattgcccagccctggcggagtctcgatcagacgtcaaacaggccgaagaagggctgaacctcaacggtttccccgggctgaacaatgtcgcggtctgcatccagccagacgatgcagtttccgcggcagagcgaagtgagcatggccgaggactgcattccggtgctcttgaccacgcagacgccgttttcattgatacggaaaattccccgctgcatttcatagcggccgaggcgttttttgaatcggccttcggcgacggcagtcagagttacggggcgaaggtcaccggactcaccgccggttctgcgaatagcggcacgggcgtattcgagataggtcacagcggctgctactggattccccggcaggcagaagagcggcttgccgctgattacgcctaccgccatcggccggcccggacgcatgttgatttcccagtcgaagatctcgccgctgtgagagatgacgaaacgggtgaaatccgcttcaccgacagaaacgccgccgcttgtcagtacgatatcagccgtaaaggctttttccagggcgctgaaaagcgcatccggggaatccttcacaatgccaacgcggattacatcagcgcctgccttctttgccagggcttcaagagagaaggagttggagtcataaatttcaccatccttcagcggagtgcccggctggaccagttcatcaccagtcgcgagaatggcgacaaccggttttctgaatacacggaccgtgggaataccaagggtagccagtagtccgatctgcggaggagtcagacgaagccccttcgagagggccactttgccaagcgcaagctcttcccccttcaggcgaacgttgtctccctgacggatgccggcttcaaaagtgactgtatcgccgtcaacggaggaaagctcctgctgaatcacggtgtcacaggaggcaggaacaaccgccccggtcataatccggatacattcgccggatcccagttcaccctcaaaaggatgtccagcaaaagatttccccgcaacccggagagctccggaaccatcggcattgagatccgagaatctcatcgcatagccatccatcgcggaattgttggcttcaggaacattaacggggctcgcaacgtcctctgccagaacgcggccaagagcgtcggcaatcggaagctgttccgtttcagaaacggcgtggcacagtgaatcaatgcgcgccctggcttcgtcggccgtgattgaagggcggtggggataattgggcatgctgcctccatttactagctatgagcagaaagttacggaaagtttagtcgagcaggcgtttgatcagaagcttttcgttattagtccggaaggataagatgaattgagaaaaaattttttaaattttttctcaataaaaattaaatgcttaatggcaaaatatcgaaataatcaacttcagagcaaaaaaatttgcatttttaaaattgagagggtaagatactcatcctgtcgctgcgatgcagtgacgatctttaaaaactgaataacgaaccgataagcgtga

SEQ ID NO: 1401 - DNA, 137 bp, Unknown
  gut microbiota DNA sequence
atctctgaagcctccgttcagtactcgataggcaaatcaacaatcaggtactggctcgagaaggcaaaggagaaatcagactgcgtcacgctgcctaacacaggaatttccaagcccatggccgaccttaagcttcc

SEQ ID NO: 1402 - DNA, 206 bp, Unknown
  gut microbiota DNA sequence
gacggcatcaccgcgaacgccgaacacacgaaggacctcgtgatgaactccctcggcattgtcacgctcctgaagccccacttcggctacatgctctgcgctgaaatggcgaaggaaggctacaccgaaggcaagtccctccatcagatcgtcgttgaagaacgcaagctgatgacggaagagaagtggaacgaagtgttctcctt

SEQ ID NO: 1403 - DNA, 900 bp, Unknown
  gut microbiota DNA sequence
ggaaagagtcccggcggtatattggaaaaaatataaccgcgccgcgcccccgaggctgagaccccaagatgacaaccactttcatcccgtaccggaaccccgaaaccggtctgccgcatcacgtgcagcctgagatcacgaagatcccggcgcctgagtcactgctttttgtcgggaactcccttttcttcttcaataacggcgttcaccgtttcgtgcggaagctccttgccggggcggacccgaaggcctcctgccgtacgaacctcatcgcgataggcggggcgagcctctactggcacgatctcgaaagctatttccgtccggacgcaatcgcgtcctacgcgatcaagaacgacggcacaaaccgcctcgtctggcgtgagccgcagaagaagctctgggacgccgtgattctctgcgacagcacccagggaccgatccacccggatctccgggaccggtttatcgaaaccgcggcgcgggacgccgcgatcgcgcgctctcacgagacggaaccgatcttcatgatcacctgggcttacgcggaccgccccgagatgacggagcagatcgcggacgcggtgcttgcggtcgcgaacgcgaatcacgcaatggcggttccggcagggctcgcgttcgcggaggcggagaaattcgcgccggcgattccgcttcggatagaagataagcgtcaccccacgcgggaaggaagctatctcctcgccgccgtgattctcgaatccgttttcgggatcaacgtgcggcgcgtgagtgaagactgcgatctcacccccgagaccgcgatgattctccgcgagatcgcgcataaaacggcggtgcggttctttgaccggccgcttcagtcgccgagccgccaggtgagcaccggtgccaaag

SEQ ID NO: 1404 - DNA, 1094 bp, Unknown
  gut microbiota DNA sequence
atagctcgtgcaattgcctgcagagaagcgcttgatatgaatgccaagttctttttcgatcttatgaccaattgcgaggaaatcctccccattctttactgtgggcatcactgtgccatagcaattgaaattcgtcccgagtccatacagctcaactccaggaagatcctcgatcaattttacggtatcgcggatttgatcatattcagtgaaccagatcccttcgcgcagatcacccatatcaatcattaggagaacctgatgcttctttccctgcttcacagcctcgtctgaaagtgccttgattacaacgggttctgcattcagggaaatgtcggcatagcggacgacatccgggatttcagacaatccaggactacggagcagacatgtctggcaattgagggcatccttaagtttcttgaggttataaacgcgggattccgcgatggtcttaattcctccatcaagacaagcctttgccgtttcaacgcagccatcaaagactttgttgaccgccatttcttcgatacccaaatcaccaagctcatgcagctcggtggcagcattgtcacgaagcttcggtaaatcaattgtcaaaattggcttatacataaagagttcctccgttatttatcagcatcagcggctttcaaagcggcattgcgcttttctgcgcgtgcataagtccagagaccaaccccaacaaacaggcaagttccgaagaccatctttgcgatatagagaccgtatccacccatatccaaccccaccggcggaataaataccaggactacggcaaaggcgatcgaaagccaaccaagcaacggcagaacaactggcagaacctttccgggaatcttgaaggagcgaggaacatccggctgagtcttacgaagcctcataaaggacatgaacatgcaaagatacggaataaagtagctaaccgtagtaagtgcagtcaggaaccaataggcagccgcaattgaaggcgaaatgaaagtcgagaagcagcagatagtgacaaaaattgcttgccaatacagtgcatacgccggcgtcttataatctaaattgggctggaaaaatacgta

SEQ ID NO: 1405 - DNA, 145 bp, Unknown
  gut microbiota DNA sequence
ctctaaatgttgcttcggtttcttggagaaacttgcaaatttgtgaatgcaatcacaacccatgttcaaaactgttctgaaataccctcatcaagtatctcagacatttagaactttcattccttcctaattgttaaagaacaac

SEQ ID NO: 1406 - DNA, 318 bp, Unknown
  gut microbiota DNA sequence
ggtctgtagctcagctggttagagcatcgtcttgataaggcgagggtcgatggttcgagtccatccagacccaccacgaaatccgggggcatagctcagctgggagagcacctgctttgcaagcagggggtcaacggttcgatcccgtttgtctccaccagttttttctcactggaagtcttttcttccaggttctggttgaaagcagttttgactgaaactgttttcaaacaaaacctgtaagggttctgttgttctttaacaattaggaaggaatgaaagttctaaatgtctgagatacttgatgagggtatttca

SEQ ID NO: 1407 - DNA, 17209 bp, Unknown
  gut microbiota DNA sequence
gcagaaaaagagaagtatgtacgtagcaagccccacgtgaacgtgggcacgattggtcacgttgaccatggcaagaccaccctgacggctgctctgacgaccgtcctcgcccagaagttcggcggcgcggctctcgcctatgatcagattgacgcggctcctgaagaaaaggcccgtggtattacgattaactccgctcacgttgagtacgagaccgaaaagcgtcactacgctcacgtcgactgcccggggcacgctgactatgtgaagaacatgatcacgggcgccgctcagatggacggtgccatcctggtggtggctgcttccgacggcccgatgccccagacccgtgagcacatcctgctcgcccgtcaggtcggcgtgccgaacatcatcgtttacctgaacaagtgcgacctggtcgacgatcccgaactgctcgagctcgttgagatggaagttcgtgaactgctgtccgagtacaagttcccgggcgatgacatccccgtcatccgcggttccgccaagctcgccctcgaaggcgatcagtccgagtacggcgttccgtccgtcctcaagctggccgagacgatggattcctacttcccggaacccgtccgtgaactcgacaagccgttcctgatgccgatcgaagacgtgttctccatctctggccgcggcaccgtggtgaccggccgtgtggaacgcggcatcatccacgtcggcgatgaaatcgaaatcgtcggtatcaagccgacccagaagacgacctgcacgggcgttgaaatgttccgcaagctcctcgacgaaggcgaggctggcgacaacatcggctgcctgctgcgtggtacgaagcgtgaagacgtcgagcgcggccaggttgtggccaagcccggcacgatcaccccgcacaccaagttcgctgctcaggtgtacgttctgaagaaggaagaaggcggccgtcataccccgttcttcaagggctatcgtccgcagttctacttccgtacgacggacgtgaccggcacgatcgagctcgaagagggcaccgaaatggtgatgccgggcgacaacaccacgatgaccgtgacgctgattgctccgatcgctatggaagaaggtctgcgcttcgctattcgtgaaggtggtcacacggttggtgccggtgtggttgccaagatcatcgagtaatttgctagaattgcagacctctatcgagaggtctgcagttgcaggggtatagctcaatcggcagagcgacggtctccaaaaccgtaggttgagggttcgattccttctgcccctgccatcagttacacaaagccaagccgcgatcaattgagtgaccgcggcttagttgtttatcgggggaatgccccgttgggttagagaaccaataatgagcaaaccaaaagagcaggttgaggagcccagtaaggggcgcgatctcgtcctcgtcacgattgccatcatagtggcggttgccggcgttcttgccttcactttcctcagtgatcagtctctgggcgtgcgtcttgcctgcctggctgccggccttgtggttggctgtgctattgcctggttcagcccgtcgggcaagcggtttatcgcctatggccgcgcctcttacgatgagctgcgcctcgttgtctggccgactcgccgcgaaaccctgacgagcactgggcttgtgatgggatttgtcgtaatcattgcattgttccttttcgtgattgacaagatcatcgaatggggactctatgatgttcttctgaagcttatttaatcagcagcagggggacggagatcgaaatgacggaagaagccaagcctaataccgaagcgggtaacgctgaagaaaatgcatctgccggaaacatgaagtggtacaccattcatgtttattccagcatggagaagagcgcttacaacgcactggttgaccggatctcgcattcggaatacaaggacctgttcggtgaagtgcttctcccgactgagaaggttgaggatatccgcaacggccgtaaagtgacgaccgagcgccgtctctatccgggatacatcttcatccagatgatcatgaacgatgatacgtggcatctggtcaagaacaccccccgtgttatggaattcctgggcggcaatcgcccgacccgcattccggaatccgacattgcccgtatcaagggaacggtcgcggaaggcgtggagaagccgaagcccaaggtgctcttcgagctcggcgaaacggttcgtgtgaaggaaggcgctttcgctgacttcaatggccgtgttgatgaagtgaattatgacaagagccgtctgaaggttcttgtgtcgatcttcggccgccagaccccggttgatctggcttttgacgaagtcgaaaaagtttaatttatatcaaatagatgctcctttgaatagtggacttaaaacctgagttcgctataataaggggcttatttgatttcactgtggggagcccgattctcgggcgactgaacccaagaggataactatggcaaagaaaatcatcggctttatcaagctgcaagtgccagctggtaaggctaatcctgcgccgcctatcggcccggctctcggccagcgcggcctgaacatcatggaattctgcaaggccttcaacgcccgcacgcagtccatggaaaagggtcttccgattccggtcgtgatcaccgccttctcggataagtccttcacgttcatcatgaagactcccccggcgacgatcctgatcaagaaggctgccaagattgagaagggttctgctcgtccgcacaccaacaaggtcggcaagatcacccgcgctcaggctgaagaaatcgccaaggccaaggagcctgatctgactgctgctgatctcgacgcggctgttcgcaccatcgctggctccgcccgctcgatgggtatcacggtggagggtctgtaatggctaagaaactgtccaagcgcgttgctgccaaccgtgcgaaagttgaactcggcaagctttacgatgtgaaggaagctatcgacctggtcaagggctgcgcctctgccaagtttgatgagtcctttgacgttgccgttcagctcggtatcgatccgaagaagtctgaccagaccgtccgtggcgcctgcgtgctgccggaaggcactggcaaggttgttcgtgttgctgtgttcacccagggtgcccgcgctgaagaagcgaaggctgccggtgctgacatcgtcggtttcgacgacctcgccgacaaggtgaaggctggcttcatggacttcgacgttgtgatcgcctccccggacgcgatgcgcgttgtcggccgcctcggccaggtcctcggcccgcgtggcctgatgccgaacccgaaggttggcaccgtgaccccgaacgtcgctgaagctgtcaagaacgccaaggctggtcaggtccagttccgtgctgacaaggccggtatcattcacgcctccatcggccgtgcttctttcgagaccccgcgtctcgaagccaacctcaaggctcttattgaagccctgaacaaggctaagcctgccgccgccaagggcgtgtacctgaagaaggttgctctctcctccaccatgggcatcggtgcccgcgtggatctgagcacgctttccaactaataagtttcatcatggcgctccccgaaagtggggcgctgtgctggggccgcgaggccccaagggctttggtggccgtgccacagcgcacggccaatgtcaaagaccgctggaagcgcaagctttaaaagtcttaagagcgccgacctgaacgggcagcgcaataagatatccaacgtagacggcaaaaccgaagagagtgaattacgttgtaccgcaggcccatgtcggcggctgctcgttcccctctctctcgaggtgagccggtcataaaagaaccggtgctagttactagcacctctgagtggagccagaccatgggtcttaatcgtcaagataaagcggctgtgatcgaggaagtgaaggcacttgctgccgaaagcacttccctgattttcgccgactaccgtggactgagcgttgaagcaatcaccgccctgcgcaaggaagctcgccagaacggtgtgaagttgcgtgttgccaagaataccctggtgagccgtgccgtcgccgagactccgtttgcctgcgctgccgatagctttaccggcccgctggtttacggcttctctgccgatccggttgccctcgccaaggtgctcttcaactttgctaagaagaacgaagcgttcgccatcaagggcggcgtcatggatggtaaggctcttgaccttgccgccatcgaggccctctccacgatgccgagccgcgacgaactgattgctaagttgatggccacgatgaacgagccgatcgctaagttcgtgcgtaccctcaacgaagttccggcgcgtcttgtgcgcaccgtcgctgcagttcgagattcgaaggaacaggctgctgcctaatcctgtagttttttaaatttaaccatacacaacgtatacggagtcatttcaaatggcactctctaacgaagaaatcctcgaggcgatcgcctccaagtccgtccttgagatctctgagctgatcaagctgatggaagaaaagttcggcgtttccgctgccgccccggttgctgtcgccgctgctgctggcgctgccgccccggccgctgaagccaagtccgagttcgacgtcgttctgtccgacgttggcgcgaacaagatcaaggtgattaaggtcgtccgtgaaatcacgggcctgggcctgaaggaagccaaggatctggtcgaagccgccccgaaggctgttaagaccgccgttgccaaggctgaagccgaagagctgaagaagaagctcgaagagaccggtgctaaggtcgacctcaagtaattcttttctgaatgcttgaattatccggttcggagtttctccgaaccggataaaatcgctagtgtcgattttgaaaagaatttgcccttgcgaatttctttcaaagtcttccctaaatgagtaagagttgggtcctaactaaagtctaggattgtgccgctgggataatctgttgtatccaagcggcttttgccgtctcttgctttttcttctctggagcagggttttcttccctgactcgcgtcgaacggagtgtccatgtcgtactcgttcactgaaaagaagcgcatccggaaaagcttcgccaatcgtccgagcgtcctcgcagtgccccccctgttggatattcagttgcggtcttatgcagatttcctgcaggctgatgttaagccgaatgcccgcaaagatatcggtcttcaggccgcctttacctctatcttcccggtttccagccacaatgggctggcccgccttcgttttgttagttatgacctggctaagccagagtttgatgttgcagagtgccagctccgtggtctgagctactcctgccgccttcgtgccaagatccagctcgagatctatgaccgtgacgccccgacgactgtaaaagaagtccgggagaatgaagtctacatgggcgagatccctctcatgaccgagaagggctctttcatcatcaacggctctgagcgagttatcgtctcccagctgcaccgctcccctggcattttctttgaaaatgacaagggcaagactcactcctccggcaagctgctgttctctgcccgagtgattccttaccgcggctcctggctcgacttcgagttcgatgcgaaggatattctcttcttccgtattgaccgccgccgcaagatgcccggcacgattctgctgaaggctctgggtatgaccccgatgcagattcttgcccgcttcttcgagttcgatcacttcacgctgtccgcggaaggtgcccgtctgtcgctcatccctgagcgtctgaagggtgattccctcggcttcaacatcgtcgacaaggatggcaagatcattgtccctggcgacaagcgtgtgaacgcccgtcacgtccgcctgatcaaccaggccggcatcaaggaaatccccgttccggacgattacctgattgaccgcgtgctcgcgaaggacatctatgatgaggaaaccggtgagcagatcgctgctgccaacgccctgatcgatgagaagctgcttgagaagctgcgtgccgccaatatcacggaaatcgagacgctctacacgaacgaactcgatcacggcgcttacatttccgagaccctgcgtcttgatgaaacggctgataagctcgccgcccgcatcgcgatctaccgcatgatgcgcccgggtgagccgccgaccgaagaagctgtcgaatccctgtttgaacgcctgttcttctcgaccgatacgtacgatctgtcccgtgtcggccgcatgaagatcaacgcccgcttcggcaagtccgatatgaccggcgctgccacgctgaccgcggaagatatcgtcgatacgatgatgctgctcgtcgcgctgcgcaacggccaggacgatgtcgtcatgactgacgacaacggcgtccagcgtaccgttccggtgaatggtgttgatgatattgaccacctcggcaaccgccgcgtccgctgcgtcggcgaactggctgaaaaccagttccgtgccggcctcgtccgcgttgagcgcgccgtgcgtgaacgcctcggccaggccgagagcgacaacctcacgccgcaggacctgatcaacagcaagccgatctccgcctcgatccgcgagttctttggctccagccagctctcgcagttcatggaccagacgaacccgctgtccgaaatcacgcataagcgccgtatttcggcccttggcccgggcggtctgacccgtgagcgcgccggcttcgaagtgcgagacgtgcatccgacgcactacggccgtgtctgcccgattgagacccctgaaggtccgaacatcggtctgatcaactcgctcgctatttacgcccgcctgaacgactacggcttccttgagacgccgtatcgccgcgtggttgacggtgtcgcgaccagcacgattgactacctctccgctattgaggaaggcaagtacatcatcgcccaggcgaacgctgatctggatgaaaacaaccgcctcacgcaggaactcgtgtcctgccacgagaagggtgaattcgttctggcccgtccggctgacattcagtacatggacgttgccccgtcgcagatcgtgtctgtggccgcttccatgattccgttcctggagcatgacgacgcgaaccgagccctgatgggcgcgaacatgcagcgtcaggcagtgccctgcctccgtccggagtatccgttcgtcggcaccggtatggaacgtacggtcgctgaggactccaagacggctgtccaggcccgccgcggcggtatcgtcgactacgttgacgcgaaccgtgtcgttattcgtgtgaacgacgaggaaagcgttgccggtgaagtgggtgttgatatttacaacctgcagaagttcacccgctccaaccagtccacgacgatcaatcagcgtccgatcgtgatgatcggcgaccatgtggcgaagggtgacgtgctggctgacggcgcttcgaccgatcagggcgaactcgctctcggccagaacatgctgatcgccttcatgccgtggaacggctacaactacgaagactcggtgctgatctccgagaaggtcgtggctgatgaccgctacacctcgatccacatcgaggaactctccgtcgttgcccgtgatacgaagctcggcgcggaagaaatcacgcgcgatatttcgaatctgcctgagcagcagctgaaccgtctcgacgacgccggcatcgtgtttatcggtgctgaggtcgaggctggcgacgtgctggtcggcaaggtgacgccgaagggcgaaacccagctcacgccggaagagaagctgctgcgcgtgatcttcggtgagaaggcctccgacgtgaaggatacgtcgctgcgcgttccgtccggcatgtccggcaccgtgatcgacgttcaggtcttcacccgtgaaggcgtggaacgcgattcccgcgcgaagtcgattattgaagacgaactgaagcgctaccagcgagatctggacgacgaacgccgtattgttgagaccgacgcctgcgcccgtctccgccgtcagatcaccggtaagaaggttctcacggctccgaacggcctgggtgccggctcggtcctgaccactgaatacctcgaaggcctgaactaccagcagctcttctccatcgtgatggagactgaggatgatcagaagctgatcgacctcacgaagaaggctctggagaacaaggtgaaggaattcgccgaagcctacaacctgaagaaggacaagctcacccgcggcgacgaactgcccccgggcgtgctgaagatggtgaaggtttacatcgccgaacgccgccgcctgcagcctggcgacaagatggcaggccgtcacggtaacaagggtgtggtctccaaggtgaacccggttgaggatatgccgtacatggctgacggccgtccgatggacatcgtgctgaacccgctcggcgtgccgtcccgtatgaacatcggccaggtgctggaagtccatctcggatgggctgcaaagggcctcggctggcgtctgcaggaactgctcgacagcgaacgcggcaagcaggtgaaggaaatccgcgccttcctggagaaggtctacaacatgaccggcaagaaggaagacatcgcgagcctcaccgatgacgaagtgatcgccatggtgaaccgtatcaagcacggcatcccgtttgctacgccggtgttcgacggtgcaagcgaagagcagatcaagcagatgctggagatggcattcccggattccgaagtgaagcgcctccagctcacgccgaaccgtgaacaggccacgctgtacgacggccgcacgggtgacgcctttacctgcccggtgacggttggctacatgcactacctgaagctgcatcacctggttgacgacaagatgcatgcccgctccaccggtccgtactctctcgtgacccagcagccgctcggcggtaaggctcagttcggcggacagcgtttcggcgaaatggaagtctgggctcttgaagcttacggcgcagcctacacgctgcaggaaatgctgacggtgaagtccgacgacgttaacggccgtacgaagatgtacgaaaacattgtcaagggcgatctgtcgattgatgccggtattccggaatccttcaatgttctggtgcgcgaaatccgctcgctcggcatcgacattgactacgagaaaaattaaggacggttttcgagatgaataacgcctttctcaatctgtttcagcaggtgcagcaggacaatcactttgatgccctgcgcatttcgatcgcttcgccggaaaagatccgtgagtggtcttacggcgaagtgaagaagccggaaacgatcaattaccgcacctttaagccggagcgtgatggtcttttctgctgccgtattttcgggccgatcaaggactacgagtgcctttgcggtaagtacaagcgcatgaagcatcgcggcgtcgtctgcgagaagtgcggcgtcgaagtgacgctgtccaaggtgcgccgcgaacgcatgggtcacatcgagctcgcgagcccggtggctcatatctggttcctgaagagcctgccgtcccgtatgggcatggtgctcgatatcccgctgcgcgatatcgaacgcgtgctgtactttgaagcctatatcgttgttgatccgggcatgaccccgctgaagcgcggtcagctcctcacggaagacgattacgccgcgaagaccgaagagttcggtgacgaattcaaggccatgatgggtgccgaggctatccgcgagctgctgaagtctatcgatattccgaaggaaatcgagacgctgcgcgctgagctgaaggacaccaactccgacgcgaagatcaagaagtatgcgaagcgcctgaaggttctcgagggtttccatcgctccggaattcatccggaatggatgattctcgaggtgctgccggtgctgccgccggatctgcgtccgctcgtgccgctcgacggcggccgtttcgcgacctccgatctgaacgatctgtaccgccgcgtgatcaaccgtaacaaccgtctgaagcgtctgctcgagctgaaggccccggacatcatcgtgcgcaacgaaaagcgcatgctgcaggaagctgtcgactctctgatcgacaacggccgccgcggcaaggcgatgaccggtccgaacaagcgcccgctcaagtctctcgctgacatgatcaagggtaagtccggccgcttccgtcagaacctgctcggtaagcgtgtggactactccggccgttccgtgattacggtgggcccggaactgaagatgcaccagtgcggtgtgccgaagcccatggctctcgagctcttcaagcccttcatctacaacaagcttgagatgcgtggtctcgcgaacacgatcaaggctgcgaagaagatggtcgagacccaggatccggtgatctgggacattctcgaagaagtgatttacgagcaccccgtgatgctgaaccgtgcgcctacgctgcaccgtctcggcattcaggcgttcgaaccttgtctgatcagcggcaaggctctccagctcccgccgctcgtctgcgcgccgttcaacgccgacttcgacggcgaccagatggctattcacgtgccgctctctctggaagcccagaccgaagcccgtacgctgatgctctcgacgaacaacgtcctcttcccggctaacggtgatccggcgaacgttccgtctcaggatatggtgctgggtctctactggagcacccgctcccgcgtcaacgcgcctggcgaaggcatgttctttgaggacgtggatgaagtccgccgcgctctctccgccggtatcgtgacgctgcagacccgctgcacggtccgcgtgaaggagtacgacctgaaccgcgaaaccggtgagacgaaggaacgcacgatccgtgtcgaaacgaccgcgggccgcgctctgctgtctgaaatcctgccgaagggcatgaagttctctgacatcaacaagacgctgaagaagaaggaaatcgcccgtctgatttctacctgcttccgtgtctgcggtctccgcgcgacggtggacttcgttgactctctgaagaaccgcggctactacctctccacgcaggccggtgtttcgatctgcgttgacgatatgaaggttccggccgagaagcagaagctcgttgaagccgctgagaaggaagtggaagagattcagtctcagtacacctccggtctcgtgacgcagggcgaacgctacaacaaggtggtggacatctggggccgtaccgctgatgaagtcggtaaggtcatgatgaaggatctgtctgtcgagccggttatcgaccgccacggcaacaagaccacccaggaatcgttcaacgccgtgtacatggctgctgactccggtgcccgaggctctcctgcccagatccgtcagctggccggtatgcgaggcctgatggcgaagccggacggctccattattgaaacgcctattacggctaacttccgtgaaggcctgaacgttctgcagtacttcgtgtcgacccacggtgcccgtaagggtctggccgatacggctctgaagacggctaactccggctacctcacccgccgactggtggatgtgacgcaggacctcgtcgttacggagcaggactgcggtacgaagaatggtgtgaagatgcgcgctctcgtcgaatccggcgatgtggtgcaggctctgcgcgaccgtatcttcggccgtgtggctgcggaagacatcaacaatccggaaacggatgagctgatcgccgccgctggtacgctgatcgatgagaacatctgcgacaagatcgatgccgccggcattgatgaagtgacggtccgtacgcctcttacgtgcgaaacccgccacggcatctgcgccaagtgctatggccgcgatctcggccgcggcacgctggtgaacgaaggcgaagcggtcggcgtgatcgctgcccagtccatcggtgaaccgggcacgcagctgacgatgcgtacgttccatatcggcggcgcggcgagccgtgctgctgtggcttcgagcgttgaagcgaaggcttccggtaaggtgaacttcacctccgcgatgcgctacgtcacgtcgaacaagggcgaactcgtggtgatttcccgttccggcgagatcgttgtgacggatgccacgacgggccgcgagcgtgaacgtcataagatccagtacggtgccacgctgtccgtgcatgaaggccagctggtgaaggccggcgagcagatggcgacctgggatccgatgacgcgtccgattatttcggaatacgccggtaagatccgctttgaaaacgtgatcgacaacgtcacggtgatgagccagaccgatgaagtgaccggtctgtccacgcaggtggttatcgactccaagcgctccacctcgagccacggttcgaagaagggcggttccaccggcacgctgcgtccgttggtccacctgatcgacgcgaacggcaatgaggtgaagattccgggtacggatcacgctgtgacgattcagctgccggtcggcgctctggtcacggttcaggacggtcaggaaatcggtcagggcgaagtgcttgcccgtattccggttgaatcccagaagacccgagacattacgggcggtctgccgcgagttgccgagctctttgaagcccgctctccgaaggacgccggtatgctggctgaagtgaccggtacggtgaccttcggcaaggaaacgaagggcaagcagcgcctgatgatcacggataacgaaggtgttgatcacgaattcctgatcccgaaggacaagaccgtgctggtgcatgacggccaggttgtccagaagggtgaagaaatcgttgacggaccggccgatccgcatgacattctgcgtctgctcggtattgaggctctggcccgctacatcgtcgacgaagttcaggacgtgtaccgtctgcagggcgtgaagatcaacgataagcatatcgaagtgatcgtccgccagatgctgcgccgcgtgatcgttgctgatccgggcgacacgggcttcatccagggtgagcaggtcgaacgcgctgaactcctcgacgcgaacgacgaagcgatcagccagaacaagcgtccggcgacctatgagaacctgctccttggtattacgaaggcctcgctctcgaccgactccttcatttcggccgcttccttccaggaaacgacgcgagtgctcaccgaagccgccattatgggcaaggttgaccacctgcgcggcctgaaggaaaacgtgatcgtcggccgtctgatcccggccggtaccggccttgcctatcacaaggctgtgaaggcgagagaagctgccgaggctgcagaagccaaggcgctcgccgaagcgaccgttgccgaacaggtggctgtcgcgaccgaacaggctgctcagagcgcttccgctcagaagcctgaatctccggcctctgacaactaagacgcgcatttaagccactggcttatgaaggccgccgcagaatcctgcggcggcctttttcataggggatcgctcgtaaggggtatatatttcaagcgcttaaacgaaaaatttttcgtctggaacttgacaattccgcacttaaaggcgatactcacatgtcttttctcgaccacaaggggaggagtgtttctccaaaccgcgtgaagaggaaagatttttgcattgttaaacctataaaagtttttgattttcaaaacttttaagtttttttgacggacgtttttaatgccaactattaatcagcttgtgcgcaaacctcgcactcttacgcatgataagagcaagagccctgcgctgaagaacagcccgcagaagcgcggcgtttgcacccgtgtttacacgaccaccccgaagaagccgaactccgctctgcgtaaggttgcgaaggttcgcctgaccaacggcttcgaagtcatttcctacatcggcggtgaaggccacaaccttcaggaacactccgtagttctgatccgtggcggccgtgtgaaggatctgccgggtgtgcgttaccacatcgttcgcggttctctggatacccagggcgtgaaggatcgtaagcagtcccgctccaagtacggtgcgaagcgcccgaaggctgcctaatcagctttcgatgctaaacggcatgaggagaatggtctccaggtgccgagtaagtcgcagcctgcatcatgtggctgctggaaatcgaggcctgccagaaaaggcccaaaatgactgaagatatttaacgagaggaattatgccccgtcgtcgtgaagtaccaaaacgcgaagttttgccggatcctaagttcggtagcgttgaaattaccaagtttgttaacgtgatcatgctggacggcaagaaggccgtcgcagagcgcatcgtttatggcgccctgaagcagatcggagagaagtccggtaaggaccccctggaagttttcaccactgcactcaataacgtccgtccgttggttgaagtgaagagccgccgagtcggcggtgccaactaccaggttccggttgagatccgtccggtccgtcgtatggctctggccatgcgctggctccgtgaagctgccaagagccgctctgaaaagtccatgccgctccgcctcgccggcgagctgctcgacgcttccgaaggtcgcggcggtgccgtgaagaagcgtgacgaagtccatcgtatggctgaagccaacaaggccttctctcatttccgcttctaatccatttaagttctggacagaaaagcgcaatccccattttctgtccagaaaaggacaaatcaaactatgcgtaccactccgattgagcgctatcgcaacattggcatctctgcccacatcgacgcgggcaagacgaccacgaccgagcgcattctgtattacaccggcgtaaaccacaagatcggcgaagtgcatgatggcgcggcgacgatggactggatggaacaggaacaggaacgtggcatcacgattacctccgcctgtaccacctgctactggcacggcatgaagatgcagtacccggacgcctaccgcttcaacatcatcgacacccctgggcacgtggacttcacggttgaagttgaacgttccctgcgcgtgctcgacggcgctgtcatggtttatgactccgtcggcggcgttcagcctcagtccgaaaccgtttggcgtcaggccgagcgttatcacgtgccgcgtatcgcgttcgtgaacaagatggaccgcgtcggcgcgaacttcttccgcgtttacgatcagatcaagaaccgtctgcacggcaaccccgtgccgatcgtgattccggtcggcgctgaagacaacttccgcggcgttgttgaccttctcgaaatgaaggccatcatctgggacgaagccagccagggcatgaagttcgactacgaagacatccccgctgatctcgttgactccgccaacgaatggcgtgagaagatgatcgagtctgccgctgaagcttctgacgagctgatggacaagtacctcgaaaacggcacgctctcgaacgaagaagtcgttcagggtctgcgcgttctgacgatcgcgaacaaggttcagccgatgctttgcggctccgccttcaagaacaagggcgtgcagcgcatgctcgacgctgtcgttgagttcctcccgtccccgatcgacattccgccggtccagggcttcgacctcgatgacaagccggttctccgccacgctgacgacaatgacttcgccagcgccctggtcttcaagatcatgacggacccgttcgttggtcagatctccttcatccgcgtgtactccggcattatggtttccggcgaaaccgtgctgaactccacgaaggacaagaaggaacgtctcggccgtctgctgcagatgcacgccaaccagcgtcacgaaatcaagcaggttgaggcaggcgatatcgccgctgccgtcggcctgaagaccgtgaccacgggcgacacgctgtgcgacaccgagcacccggtgatccttgaaaagatggaattcccggatccggttatttctgaggctgttgagccgaagaccaaggccgaccaggaaaagatggctctcgccctcagccgcctggctcaggaagatccgtccttccgcgtgcacaccgatgaagaatccggccagaccattatttccggtatgggcgagctccacctcgacgtgctggttgaccgtatgcgtcgtgaattcaacgtcgaagccaccgttggcaagccccaggttgcttaccgtgaaacgatccgctccgtggttgaaaaggccgaatgcaagttcgtcaagcagacgggcggccgcggccagtacggtcacgttgtgctgaagctggagccgcagcctgccggcaagggcttcgaattcgttgacgccattaagggcggcgtggttccgcgcgagtacatccccgcggtccagaagggtattgaagatgccctgaaggctggcgtgctggccggctacccggtggttgacgtcaaggctacgctgtacttcggttcctaccacgaagttgactcgaacgaaaacgcgttcaagatcgccggctcgatggcgttcaaggacggtatgcgtgaaggcaacccggttctgctcgagccgatcatgaaggttgaagtcgaaacgcctgaagagtacatgggcgacgtcgtcggtgacctttcttcccgccgcggcaagatcgacggcatggatgatcagcagggcggcggcaaggccatccgcgcgatggttccgctggctgaaatgttcggctacgcgacccgtctgcgttctctcacgaagggccgtgcgacctacgtcatggaatttgaccactacgaggaaaccccgcgtaacgtggctgaagctgtgattgctgaaaaagctaagtaaccttgcgtaactgataaaataaacaatcagtttcgcgaatccaacaaggatagaaaatggcagaaaaagagaagtatgtacgtagcaagccccacgtgaacgtgggcacgattggtcacgttgacca

SEQ ID NO: 1408 - DNA, 957 bp, Unknown
  gut microbiota DNA sequence
aagcggacaacgcgccggtcccggccgaagattcatagaggttttcggacgcggcggccccgagttccgcccggaggtttccggaaagttccgtggttccccgggcgtccgactcgatttcagacccggttcccgtcgcgaggccggacgttacggtgaaggacgaggtatcccccgccgcgatatgcacctttccgccgtccgcagcggttagggctccctcgaacgctgttctcccggagcctgagagatcgaggatggaatctgctccaatcgcggataaaccgccgctgacggtactcttcgaatcggtatctggggtggatatcaggtaaaccgaaccgccgccccgtgctgccgcgttacctcgcaggatcggacttcggccggtgagcgtgaggtacgcgatcgactgactcccggtcacgtcgatattccccgtgacggagacggtagacgcgctttcctgatcgttcacaaaaaccgaagcgccgagggcgctaaccgacaacgcggcagaagttcccgagagggagagacttccggccgaattcaccatcaggagcgaaccgtcccccgtgaccgagatcccgggggaaccggagaccgaaagcgttcctgaatccgagagcgcgtcaatcgtgtgtgacccgctctgtatccagaccccgggagccgcgccgccttcgagcgtcaccgagtccgtcgcgagcccgatcgggtccgtttcggaccccgtgagacccgcaccccaggccggggtgaggagtgaaagagaggaaaccgcggcgaaaacacaccgcggctggaaagaaaggcagggaaagagccttttcatcatcgcagtatcctttctgataacaatatgggttgtacagccctctcattatctgtttcagaatgtaacggccgcaaagcccaaaagacgtaacctgaactgctccccaaatttaggac

SEQ ID NO: 1409 - DNA, 179 bp, Unknown
  gut microbiota DNA sequence
gccttcgccttagccttcggggcagcggtcttagcggccggagcggcagcggtggcagcctggtcagcagccggagcggaagcagcgggagccggggcggcaaaggtggtggcggagaaagcgagggcggaagcgagagcgatcgcggcaaaagtcttgttcatttggataaatcctta

SEQ ID NO: 1410 - DNA, 1151 bp, Unknown
  gut microbiota DNA sequence
aacaagtcctaaatttggggagcagttcagatccctatctttttacgaaaatcatggatgactacctcacgaatatccgtgatcgtattacggatacctatgacggtaagcgggatcgccacatcatgatccgcggaatcaaccaatttgctgactgagagaacagatgaagatcattgtcacggcggggtccgaagaatccgaaaaagctttccttaaacgtcacgcgtttgcagctgaaagcatagttgtccggcggaatgaaaagtcactcttcgatgtcatcaactcaattattgagggcgaaagtgagccggtactgctggttcatgatgatatctatttcaattcggattttgaggaccgggttgaagagcttcttcaaaaggtttcggatgaggattacgagtggggtgtaatcgggaatgccggaatagcgaataatgcatacggctatcgggcgtctaatatcatccgttatgtggttgatccccacgagggggcaaccctttcggcccggattctgccggtaagaatgattgatgggaatacgatgctcattaacgctccggaacttcgaaagcgtaacgtaagactgccgtcgctatctgggtttcagctttacgatctcgcgctttccattgaatctctcaaggccgggcttggtgtttttgtctcccccgaattgctttgctatcacgacaacaaggataatccagcgtctttcatttccttcgcggaatcagatgaagcgcagcggtaccttggtgcgaatttaaagaatacctatctggaaacgctcaacggcataatcaaagtcagagagccatcaggagattttgactgggtagaggcaacagccaggatcggcaggaagcaaagcggtatccatgtcgcgatcgttgtgagaacccagtttaaaaggccagagcagctttttcggacgctcacaagcatccggtcttttattgcttcatcacaggatgccgatctattccagtgccacgttgtgacagacgtgaatacggggaaagaaaaggaaatgtatggtttcccaattcattattttccctgtgatctgagagattctaggtttttactggtcagtgaggcgatcaaaaatattctgtctgactacatctggtttgttg

SEQ ID NO: 1411 - DNA, 1362 bp, Unknown
  gut microbiota DNA sequence
gggctgccgctcagcgttatactgaggcgcgtatgtctaaaatcgccttggaaatgcttcgtgatctcaataagaataccgttgattttcaagataactatgatggctcagaacgtgagccaatcgttcttccgtcacgtattccaaaccttcttgtcaatggtgcgacagggattgccgttggtatggcgactaacatcccaccacacaatttggctgaaacgattgatgctgtcaaattgatgatggataatcctgaagtcacaacacgtgaactgatggaagttcttcctggtccagactttccaactggtggcttggtcatggggaaatctggtattcaccgtgcatatgaaactggtaagggttctattgttcttcgttcgcgtactgaaattgaaacaactaaatcaggtcgtgagcgtattgttgtcactgagtttccttacatggtcaataagaccaaggtccatgaacatatcgttcgtttagctcaagaaaaacgtattgagggaattacagcagtccgtgacgagtcttctcgtgaaggcgtacgctttgtcatcgaagtgcgtcgtgatgcttctgcaaatgttatcttgaacaatttgttcaaattaacgcaactccagactaacttcagcttcaacatgttggccattgaaaagggtgttcctaaaatcctttccttgcgtcaaatcttggctgactatattgctcaccaacaagaagttgtggttcgtcgaacacagtttgacaaggataaggctgaggcacgtgcccacattttagaaggtttgttgattgcccttgatcatttggatgaagtgattacgattatccgtaacagtcaaactgatgctgaggctcaagctgagttgatggctcgcttcgaactcacggaacgtcaaagtcaagctattcttgatatgcgtttgcgtcgtttgacaggtttggaacgtgataagattcaaaatgagtacaatgatctcttggctctgattgctgatttagctgatattttggcaaaaccagagcgtgtcattgctatcatcaaggaagaattggacgagagcaagcgtaaatttgcagatgctcgtcgcacagagcttatggtcggagaagttatttctcttgaagatgaggacctcatcgaggaagaagatgttgttatcactctctcaaataaagggtatattaaacgtttagcccaagacgagttccgttcacaaaaacgtggtggtcgcggtgttcaaggtactggtgttaacgatgatgactttgttcgtgatattgtctcaacaagcactcatgatcacctttacttcatgactaataaggggcgtgtataccgtcttaagg

SEQ ID NO: 1412 - DNA, 958 bp, Unknown
  gut microbiota DNA sequence
tcacccacaaaattttcctcaccctcgatcacaggccttcttcaaccgatcatcagaggcagtattcaaatactcttgataggcttccgccttcttcttctcatcctcgagggttgttgagggcatggtttcgagacggctcaaaagctgatcatgaggagtgtctacgaaaagatccagagtttcttctgaagccagtctctttagggatttaagcgcaacattattacgcttcgaaatttccgaacaaattgctttgacatcgattccagaaggtttataagcctctttaggaattccacgcttcagggtcttcagatctattacacctacgagggaattcccaaccttaagatgatgatccagaaacgagagtggcttattttcagcaaaaccttcaagccacaaagccatacgagcgagttcaacagcaagaggattcatatcaacaccgtaaatgcagtgctgaatcacctctctcagtgcgttttgataagactggggtgtgacaattccatccagagaccggactttagcgagctgttccgcaattctgcgggccgcagcaagcagaaaatgaccactgccacaggccggatcaataactcggagagaaagcagagccttctgaggatcactcggattgtcagacagtcttttttcaataacaggatccagagcggttttaatcagactctggactaatgaatccggcgtgtagtagctcccggttttcttccgctcactggagccaacggtgttattaaggaaagaaaactcgcggcgctgaggatccgctaccgggacaagctccaggagactctcatagatactgccaagttcctcagttcccaggtttttatagtcaatcgcggtgtacgtatcattgatggttgcccaacgcatcagcttcatagcgttgaagcccaaaagttctgcaatagagccacgaaagcct

SEQ ID NO: 1413 - DNA, 3641 bp, Unknown
  gut microbiota DNA sequence
caggtgctgtcgacaatgcagaacgccttgttttcaatggtgttcattgcgcatgttttggctttgattacgtaggtgttctgctcatccataaatctcttgccgcgcagatcaacgataatgccgtgcatcgtattgaggacgtccgctgggttaacgtgagtcgctgcaacgataggaccggcatggaattgatccatgtttaccagttttgcgaagagcggaatcgtaagagagacattttcaccggttgtgctgcgcgacccacggatcgcgagccttgaagcccatccgcctatgtacttatctgtcatttcaggattcgcagagaatccgccggtcgcgatcagaataccgcctttggcataaaaatcaacataaccgtcgtcagtcagcgtcttgactcccagtacctctgcccttttaccggtaatcagctggaccgctttatgctcatagaagatcggaatgttgcgctttttgacggcagccaagagtttctggacaagacctgccccacctgtcagtccaggggcaaccgtgcgatgccctctaccgagacggggccaaggggtcattgtgatcttcccaaattgcacgccaatttcatcctggagccagtctgtacaggcactgatgttgtccgtgtacgcagccgttaggtctggatccgctcgcccggcagaaactttcatcatgtcgttgtaaaaggcatctctggaatcttggattccacaggctttttgccattttgttccccatgcgcagacagtgcctagagcgtaaatggagtttccgtctggcctatccctcttctcaattacacaaacctttgctccggcatcatgagcgcggatcgcgcaaaccagaccagctggccctgcgcctatagcaataacatcaaagtgatgggaagattctttagatgctgcaccagcggttgaggagattcctgcacccattgttgcgattgcaccaactccagcggtttttataaggttcctgcgggataaagaagacataagtttccccttttaatttgttcaatctatgattgatttaagcctctttggtatctagttcaaaagtatactatttatttattgatacacggatatttaaacataatttattgaaaataaataaaaaagaaataaatagacacatagttcttaaagattaggttggggtaaggccattgtcataatatgtaaaaaacataagcagtttgattaattaatgtcttcgtgacaaatttttgtcagttggcagaaagattaaaaaaacaagctgcctttatagccttgtctactaatgatttttttgaagaaaaaataaaaacacttttggcatggatcttgcgtggtgatagacgagagtttccttctcggaaactatatttggaggattagggatgactgataagatcattgaaaacttcaatcacctcagaacgaatttgattacaaaggatcgtcgtttctcagaaaaagacggaaaactttgttttgaaggcgtcaaacttgaagagttggcgaagaaatacccaactccggtgtatatcttttccgagaaggaaattgatagaaacgttcaggaaattcgtgaggcctttgcagcacatccgaaaacccgaattttctatgcctcaaaggcttgctctgtgatggcgattctgagaatcgtcaaagaacttggcattggagttgaaacaaattctctttatgaaatcaagaaggcgatagagatcggtttccccggtaaggatattgtttttaacggggttgttaagaagagagaagatctcgaatacgcaattgcccacgatctttatctgatcaacgtggattctctttatgagttgaacatgattgatcagatttcccgtgagatgaagaagactgcgaacgtttgcgttcgcgtagaaccgagcgtgccttctgccacacacccgggacttgtgacagccttccatgcaaaatccggtatcgacctggagcaggctgaagaaactgtccgccgcattctcaagatgccttatgttcacgttcgcggcttacacatgcatgttggtgatcaggttcctgagtcagaaccgttcgcaaaggcaacagctgttctggttaaggaatctatgaggctggagaagcttcttggatataagtttgatctgatcaatgtcggcggcggaattcctgttccgtataagtatgatgcggaaaatggtgatgctctgaaagacaacatgtattcaggcatcaatagtaaggattttgctaatgcgattattggtgaagtccgcaaatggcgtgatgacgttgagatcgatattgaacccggtcggaagattccttcttcagctgctgtaatgctaacgaccgtttgctgtgagaagacaaagactaattacgatcttaacgggaatgtccaatgccacgtcaattggaagttctgtgacgctggatacaacgtgatggcggatgcgcagcattacgcgtggttcttctatatctataacgcaagtcgtattacggaaccacatgaccagtacatcaaactggccggacctctctgtgatggcggcgattactatcacatgggcattaaaggagaagagtacctcctccccgcagatacaacagaaggggatattttggtcttcttggatgccggtgcttattcaattgaaagccagacggtatacaacaatcgccccaggacagctgttgttctgatcgacaaagacggaaacgacaaacttattcgtcgagaagatacctacgaagacattgttgggtacgacatttattgacgttgtaacagacgctaaataaatcctcaggttcagccgggattatctcccggttgaatcctgatttcataaagagaaagatcatgagcaaagaaaaaagtggcatgctcggcatacgcgatatcgtttttatgaacgttattgctatcctgagtctgcgacagattccgaatgtggctccctatggtgcgtcagcaattatcctgtggctgatagcggcattctgcctctttttcccgctggcaatggttgttggagagctgtcaactggttggcctaaggatggcggcatttttatttggtgccgtgaagcatttgggccgcgtgtaggttgggttgtggttgtctgcttcctgttttcctgtgtgctgtttttcccattgatgcttcagtttggtttcacggccctgggatatgtgttctcaccggaattgggaagtaataaagcttttatcggtgttggctcagcaattattttctggatcctgactctgatgaatgtcagaggtatggaatggactaagaaaatcaattcattctcagcaatcctcggtgtttttgttccgtccgcactgattattctgctgggtattgtgtggcttgtcaccggtcacccgatgagcactgattattctcatctctctaattgggttccggattttagtaagtgggacacaattgttttcctgtcctccatgatgtttgcctttgcaggtctggaggtcgcaccgatggtcgcaggaagaatggagaatcctcagaagaacttcccgcgggcaatggcattgtcggccgcggtaattgtcagtatctatggtgtgaccataag

SEQ ID NO: 1414 - DNA, 4654 bp, Unknown
  gut microbiota DNA sequence
agcattgcttaaaacccatcaaaatatctctcaattcatcctagatcatgaagatttataagaagaaaagcatcaggaaaggtcagaacagcgtcaagtgttatcagatattgggtaaaaccgttctcaggaaagaaaagaatgacgctattaaaaaatatgctttcttcggggaaaaatggggtattttcaagcagaaaaaatcggagttaatagagggaaaatctgttaaacaggcggctgaacccgtaccacaggcggttaagcccattccggaagacccatacaaaaaatgggtcaggcgtctggatactatttgcgatcaggatgtggtgatgatgaaggaggcaatttccaaatttaaattgcttcccaaattcagtgttgtcatgcccgtatacaacaccgacatcggatatttagaaaaagcgatccatggcgttctggatcagacctacccttattgggaattatgcatcgcggacgacgcgtcccctgatcaaacagtccgagactgtatcgcgagctatgcggcaattgataaccggatcaggtacgttttccgtaaggaaaatgggaatatctcggtttcatcgaatgacgcaattaatctggcgaccggggaatttattgtcctgtttgatcatgatgatattttggatatatcagccttgttttgcctggctgagaagataaacgccctcgacggcaaggttgacctgctgtataccgatgaagacaagatagatgaagacggaaaccggtttaatccctacttcaaaccggattggaaccgggcgctctttcttcagcagaatttcatcgcgcatctcgggtcctacagaaccgctatcgcgaaagagatcggcggattcagagccggttttgaaggatctcaggattacgatttcgcgcttcggtttatcgcctggatttcagagtcaagaatcagtcacatcgaccggattctgtaccattggcgcaaggttccagagcatcattcgttcagcactgattttcaggataaatctgacgcggccgcgaagcgaagcctggaagagctgttcgcccctcggggatggaaaattgagccatccaaaacgatggttggctgctggcactgggtgctgccgaaacccgcggacgaacccctgatcagcattattattcccaccaaaaatcatgcggaactaataaaacgatgtgttgacagtattctctccaaaaccacttataagaattatgaaattctgattgtggataataagagtgaagaagaggcagctcttgcgtattacgaagagctgagcggaaaagaaaaaatcaggctcctgcattttgatgagccgttcaattactcaaagataaataattttgctgcccgtgccgctcggggtgactatctcttgctgctgaataatgacactgaggtgatcaccggtgattggcttgactcgtttattaagagattcgctgctgatccgaccgtcggggtgattggcgcgaaactgctctaccccgacggctcgatccagcatgcgggtgttgtgacgggaatctacaaggtggcctctcatccgttcagattccagaaaaacgatccttactttggctactgcagtctggaccggtatgtcagtgcggtgaccggggcctgtctgatcatcaggaaaagcttatttgatcaggtaggcgggctggacgaagagaaattgcggatttcctttaacgatgtggatctgtgcctgaaggtaaagcaacgtgggtaccacatcctttggacgccggatgtcattctgaatcactatgaaagccagacgagagggaaggacgagacgccgaagaaaaagctggtgaacttcaatgaacggaaggccatgctcgagcggtatggggacagtctcttttttgacgagttttacaattcgaacctatccctcgattctgaaggctatgaatttacccagttcccgaggaagcagaagccctggaagaaagacagcattgattttctctgcccgtttcaccgcggagacgtgatcgtcggattagcggtggcggtaacctacagcacgctatccgataagaagctgagtttccatatatccagggatttatatgactggattgctccttttctgtattccgatcggttcaaaattatcagaaatgagacgagactgccggctgccgcagaaacgtttggaaaatttattgaagcgatggatagggttgtcgcaagacctgatttttcgggcaagttagcgacctcccataatgtcctttcttttgagcagaccgggactgacattgtcacgagtatgctcctcgggcttggacttcctgctgatacacggctgaaaaggctggctgatttcagggttccccggaagagagaacataagaagaggatccttatccatccttatggctcatggaaactgaaaactctgcctttggagacgatagaaaaaatcattggtatcgctcatcagcatgggtattcggtgactcaggtgggaggtgcatcggataagaaaatcgcaggatttgatgactattgcctcaggaatgaagacgttgtttattggttctcgctcttgaagaactccgcctgcattgtgtgctgcgacagctggttcagccatttcgcggcctttatcgatttcccctcaatcactttttatggctccacctccgcgcggcactgttcctcaagagagcattttgaagagggatggtccaggtacctcgtgattgattccggttgtgagctggctccctgcgattctttgacctgcaagcttgataacggcagtgtctgcaaggggttcaggtgggataacagggtcgccggatttattgctggattgtccgaggctgagaaagacatcggtgagtagtgccggtgtttctgacgggatggctaatttcccgagcagagaagtggaaacaaaaacctcgaaagcgtgattgctttcggggcttggatacctgatcggcttacggcggacctcagttagtgaagcggtaaatcttttggaactccgcgtcttctttttctgggctgatgatgtatttcccgcgctcgtttgcggagatgcggaaagaatcagtgcctgccgcgaaatgatgcatcagacggctgcttctctcatcgcactgggtttcgaagagtgagcacccaaggaaatactgttccgtttttcggattcccagcacgtcaaggagcgtcggggcaagactgatgctggttgtgcctttggcatccacaatctgcggcttcaccatctttccgtaaagaatgagcggaatctcaaagttcgaccgctcagtcttctgatggaaggaccgccggtattcgggggtcggaatcacgactccatggtctgaagtgatgacgaggagcgtgttgtcgtaatacggactcgttttgaaccaggcaataaagtccccgagccagtgatcgaggttatggaatttgttgtagtagctgtttgacccatcgccgtacgtcaggtccgggctgtcaacgccatgatgcgtgccggcggtgtacatgccgataaagaagggcttatcgctcttgtacttcgtgagcacctgcttcaggctctggaaagcgaatttatcactccgcgggggatctcccgtccagcctaagtcatcagcgccgtacacccgggtgaaagcgaaagtttttaagtacgaggtcatgttgcccgtactgagttcgtctgataggaagtacgtattgaagtgatgctgattcagaatttcaggcactgacaccaaacccgaatcagtcagtttatgaatcttctcgtgatccatctcgccgaatccgggtgaattgggattcagataaaacccgcccttaaactgccataacgaatacagctgcccccggagtcctcggtaggtggcataggtgtggttgtaataatgatcaaatgccaggctgtttttatacagctggtcatacgtgggggtcagattacgggatgagtgatttttgtaatccacgacctcagctgaaaatccctcaacaaaaatcacaatgacatttttgatcggtgtgtcaggtgagaaataacctgccccggcggtttcgagctggctctggctgacaaccgcgggcttccgatattgctcacggatggcggcattttgtttggggacgaaataaacgtcgtgaagaacggctttcgcgagatgcttggtgctcttcagaacgctgttttgagtgaatgccagaacgatcatcagtacgctgaccaccgatccggccgccatatagattttcttcttcactttcacgtttttcgtggaaaaaatggcgaagaaggaggggaaaaatacgacggcgaaaataaaagcgagccagatctgtgctttgaccccgatcgcgttgtgagacgacaggttcatcacggtgagcggcacgatatagatgccggttgacacgatagagcacatctgaagagcgacaatgaactgaaagatgccccagagcgcggcgcggatgatgaacgggaagagcagaaccgccgcgtacaccagggtcgcctcctcgcagtatttggcggtgagtgtcaaatgatctttcgccgaaattgttcgtaaaaaaataggttgcagtgtttgttcaagc

SEQ ID NO: 1415 - DNA, 723 bp, Unknown
  gut microbiota DNA sequence
tatggggatgacgacatcgagaatgtcagaaactgcatcatcccaaatcttgctgccgccacaaaggaaaaagttgttttcctgacgatgaattacgacgctgccggtaaaaggcttgactccggagatcagtacggctgcgaagtcagggatattccgaaaaccactgatcgtcgtactggctttgccgagaatcacaactttctctttaaagagtctgaaaaaactccgagttttgtgctgatcaatccggactgcgttccacttcccggaagtattgaccggctgattgaacggaaaacagacaaagtcgcgattgtcgagggccgtcaatggcctttcgagcacccgaagaaatacgatcagaagacccttgaaactccttgggccagcggcgcctttgagcttattgactccgatttctaccaatccgtgggcggaatggatgagctttattttctttacgccgaggatgtcgatctctcctggagagcctggcttaaaggttatcgggtgctttatgagccggcagcccagattattcatttcacaaatggacgatttgaacgtgatgatctgatttcaaacgagcagtactacggccttcggaatttcatcctgatctcccggaaattcttcggtaagaagggtgaggagtccgcggttaaatctctaaagaaagcattggattgaactgactcccatttttaggacacacctaaa

SEQ ID NO: 1416 - DNA, 1969 bp, Unknown
  gut microbiota DNA sequence
actatcgactacgtatttttccagcccaatttagaatggatgaagtcagaacttaaaaaacacacgtttaaggatcttctcatcatgatgcatggattcaggctcgcggcggcagcggccgcggtttctctccttctctcaggcaccgcgtacgcgtgcacgacgctcctcgtggggtcgggggcgacatctgacggctccctcatcattggccgcaacgcggattcgaacgccctcaaggcgcagcacatggtggtgcaccctgcgaagacaaaccagaaggggatgtatcgcactgccgaccaccatggcgcgaataacttcgagtatccgcttccgaaaaactctctccgctacaccacggtcccgaactggaagacaggcgtccatggagcaacggggttcaattccgccggggtcggggtctcgggcactgaatccatcttcgcgcgggatgacgcgctgaagcttgatccgtacgttgaaaagaccgggatcacagaggacgacatcatggaggtgatcctcccgcgggcgcgctcggcgcgcgaaggcgctcagatcctcggccacgtcgttgagacgaagggcgcaggcgaaggctttggtgtcgcgttcgtcgacgcgaaggaactctggtacctcgaaaccggcacgggccatcagtggatcgcggtccggatcccgaaggacgagtatttcgcgtccggaaaccagggccggctgcagcaatacaaagcgggggacccgaacttcatggggagcccaacggtggtcagctgggccgagcagcatgggttctacaacccgaaggacggcgcgtttaatttcgcgaaggcctatacgcgcgacgatggccgggatcgcctttataacgacccccgcgtcttctcgatcatgaagaccctgacgccgagtctttcgatccagcctgaggcgggccgcgcgttcccggtgttcgcgaaacccgcggaaaaggtgtcggtcgacgaagtgaagaagctcctcagaagccacttcgagatcgcggggcttgagtcgcatgacccgtatacgaagggtctccggggcgacgaaccctaccgcccgatttcggtcttccgcacgtacgagtctcacgtgatgcaggtgcgcccgaatcttccgcgcgcgatcggagaggtgacctacctcgcgatgggcatgggggacctcggggtctatgtgccgttctatcagggtctcaaagcgttcccgaaagagtattcaatcgggaccgataaggcggacagcaattcagcgtattggaagttccgcaaagtgcagacgctcgcgatgacggattacccgaaactcgcccccgtggtgcatgaacgctacgccgcctgggaagcggacaccgcggagaagatgaaggcctttgaagcgcagtacctgaagaccgtgaagacgaatccgaagaaagcggatcagatgctgcaggactttaacctcaaggtcatccggagcgcggaagcggcgaccgaagcgctggaaaacgagctctacacgatccggaccaccgatatccagaagcaaatcttcttctcgaataacaagaagaaggactgagagtagttcagaattccggctttctccctaaaaaaccaatccgatccatcggcacacagagtatctccgggggaggaagctggataggcaggacccgtcacgggggccttccggaggcagatcggtgtctcaaaagaaggcggaagcgtcttccgtggcggctatcagctggacctgagtcacaggtgaagaaacaggtgaagggaatataaaggcaataaataggcggagcccccgggtaaggcgctccgcccttttttggttttcattcaggacgtccggcgtgtttccgaacgcctgaagaaagacaccgtcacgtgtccggcactcagaggctcgcgcggagaacggcgaggaccgcttccttatccatcgggca

SEQ ID NO: 1417 - DNA, 452 bp, Unknown
  gut microbiota DNA sequence
ttcatctactccggcctcgtttgcggctacaagtgtagaaggatataccttgccgtcagctccgcatggtgtacacataacaatcttttcaacgcctgctacctttgcaggaagcacgttcatcagtacagatgaaggatagacagccttgccgcccggcacatatactcctgcctttgctataggtgtgaccttctgtcctaaaatgatgccgtcctctgttgtaaaccatgagttctgcagctgcttctcgtgatattttctgatatttataagagccttttttataacggcaagaagcttctcgtcaaccagctcatatgcttcctttatttcttcctctgtgacacggatatttgatgcatccacatccgctttatcaaatttctttgtgtattcaaaaacagccttgtcacggtttttctttacattgtttataatgtcatttaccg

SEQ ID NO: 1418 - DNA, 1292 bp, Unknown
  gut microbiota DNA sequence
aaacgagggaagcctggttatcgaagtagttcacctgaccgtaaacacggacagccttgaagtcgtagttgccgccggcgatgatgctgtagccgttatcgatgttctcggtagccttggcaacgttcttccacatcgtgtagtcaccgatcagggcgaactgcgcggggccgttcttgtagctcacaccgagagcggcgtaacgatcgacgtcagaggagttctcgtcaccggtcgccgtgccgtcgttcttgaaggagtactgagcgcggatctgcaggccggagaaggtcggggaaacataggtgagggagttatcgacacggccccagtcggtaccggtctgagccttgatgccggcgtcgccccagaggacggagaacggcgagaagatgccgcccatagcagccgcgccagcggtgctgatcagcttgccttcacggccggcgtacagggtgccgtacttgccgccaacgtgcacggaagcctcacggccgaagaggcggctcatcgcctgggtgccgtcatcggaattgaagccgttttcgaggttgaagccaaccgtcacggagccgatcttctcatcaccgcggagaccccagcgggaggaggcggtctgaccagacttttcggagaacgtatcggtcgaggcggtcttgccgtcatcagcgcgatagtgggtgtagttgaggccggtatcgataatgccgtacagcgtcacggacggagcggcaaaagcggaagcggcgaaggagccgagcagagcagcagcgagaagagtctttttcatcttttctaacctttgattgtcatcccttaggagtaccagaaactagttctcccgggattgaatttttaaccacagggtaattaaagcatgagaaaaagcggatgaaaagaaagatttttcctctgtaaagcgggttatcggcttccctgagaggattagggtaatcatcttatagttattaattaaaaataaacagtcacttatatagagccccgtatcccgggaaacagtttcaggaacctgagtgtgcggtgcttgcatctgttgcaaaaacgcaacagttgaggagaaaaaccgcaattggttctgaaataccgtgccgtgccgcgtctctgtttcagtctttccggaaaaggagaccgcggctttctctcgttcttttttcggtttttgagtccaccggaaatccgttttttcgcggtctccgggcgtttccatcgccccgcaataccccgccgagcgccgccggcttcctctccaacttcagcgccggttaggaaaa

SEQ ID NO: 1419 - DNA, 1323 bp, Unknown
  gut microbiota DNA sequence
agggcggaaccgagcgaaagaaagatcggaccaagcagaattccaaggaacccgaaggagagaagaccgccgaaaacgccgaggaacacgagtgccatcggaagcggggtcccctgagaaatcagcatgggcttcaggaaattatcgacactcgacacagcgaacgttccccagagcgcgaggaagatggcgtatcccatttcacccttcagatagagcgcaatagcgacaggcacccagacgaggggcggtcccatcggaaccatggaaagaataaagacaaggaacgcgagaagtgttttattcggtatgccgcagatgaaaaagccgatataggcgaggagcgcctgaccaagagcggtaccgaaaatcccgaatacgacagagcgtgtcgtattgacaagaattgagctgaaagcgttagaaagattgccgcctactttatccagtatcccctgaaccttattcgcgagagattcaccgttccggtagaacacaaaggcgatagccgcgatcagcaggatctgaataatgacattcacgatcgacgcggttgaggtgaggataccttttgaggcggtcgtcgctatctgcttcagcgcggtggtgacttccggatactcgagaatcttcccaaccggggcgtggagatattcaccgacccaggggagcgtggagagccaatcaggaagcggtatcccggccgctacccagtcccggatcagaatgatcgttgttgatacctgctgcgcgaggaacacgacaaggatcgttagcgggatcagtacgatcacggcaaggaacgcgaccatgagaacagcggacagcgttctccggtgcccaagcatggagtcgacccggataaagaacggccaggtgacgacgcagagcatggcggaaatcagaatcgccgtcgcaaacggagcgaccacgaagtagcagccgattgccacagcgacaccgaacccgatcttgatcagaagatcgatacggtcccggaggctgcttttgaggttatctaatgggatctgcatgttttgcgctgaagccttaaaaaagaagaaaaccgcgtgcttcggaatcatcctaccgcaaatggaagtcggttaaatccggtgtgtcgcggaaaaccctttttttggctacaatgtcacccctgttcccggagactgtccgggaaccctggtgtccccgtagttcaactggatagaacgagcccctcctaagggttagatccgagttcgagtctcagcgggggcaccatttttttatctggacaatttaaattcgataaaaatcgtagcgttttcataaggttaaaac

SEQ ID NO: 1420 - DNA, 62294 bp, Unknown
  gut microbiota DNA sequence
agcatggcggcaaacggctttccatttttataaaagcagtacaccttcccgtggtacttgaaaggacgtacaaaacggatttcgccccgtccctcgttcttccatttgaggttgatgcgcttcgttgcgtggaaaatgctttccggaataccgtctgagtagtacataccggcgatcagcgttacgcggctgatatgcagctcctcggtcagccggtcaagctcttcaagcgaatcccccgacagatagccgacagcgatatccagcctgtccgccttctgaagctctgccgtgaaacgctctgtgatggtctgctgaccgtcctctgttccgagaggaagaatgtctgaataaagcaggttcatgctgatccgaatctttagagtaacgtttgagtaattatatgaagacgcccgtgccggcggggttttctttattccgatcagacggatgctgcgattttcttcttaaacgttatgggatcgaacagagggcaaaaaaatagattctgccaggagttaacagaatctataaaagtgagtctagagagaccaacaatgaaaccactgcaaaacggaacaatcagatccggaaaccctcactctgttcggattccgaaaacttttcctcttccggcacatagttcccgtagcggttcttccggggttcagacggcacaaagccaatcaggaccacaaacgcgaatgggacgagaaccgtgaggaaggtggggaacgggcgaagcaggtcgtacaccaccatgccgatgaaaacgagatagacgagcgcgtaccagccgctcttcccgatgtcatgcagccgctgcaccgtgatcggcacctggatcgagagcaccatgagcgcggtgacgaggtagcagctgaggatgaggtttagccggagttcgggggtgccaaagccaaggagaccaatcatcatggcgatgacagccccgattccgatcacgaggagcgaaagcacataccagtgccagtaacccttgcggttaagccggtcacgaaagtcgaaacagcgcggcaagatcatttcgcaccccctctgtgtgaaggttttatacgttcattgtaggctaatttgtcaccatgtaatcacaaaaatacgtttatacccactatgtataatattttcgtattcaataattgcgaaaatgccttcagagagaaaactctgaaggcatttttgtcaagataagtaaagacgggcgaagcgccgtcccgcctcgtgcggcggggaattacttcgcggaagccgaaggcggcgtgaaagcccggatctcagggatcggtcctacccacttggtaacttccacattggcggtagacgcgacgtttccgcaggcaagggacgacgtagggatatcctgcgtgaggctgttcgggttcccgtggacgtcgatttctttgccatccagcaccgccggatcaaaccacgcgccgtgatgcagcacgacggcccccgggatcaccgtgttctcaacgaccgcgcgggtgagcgccgcaccccggcggctccgaacgagcaccacgtcgccggtttcaatgccgcgcgcctcggcgtctttccttgtgattgtgagcggttcgcgaagctgcgtcccatccggctcccggttcgcgtattcatcaagctgcgagtgaaggcgcttcacgctcttcggcgcgacaagggcgagcgggaactctttcgtcgcctgggcaaagccttcggagggctcaaagtacgccgggtgcgggaggcagtccgcgtacccgtaggactcaatctttttggaccagatctcaatcttcccggacggggtctgaagcggatgccccacggggtcattccggaagtcctcaaagtccacgaaacggcgtccggactcggtcggctcaaacttcaggatcccggatcgccagaattcctcaaaggtcggcacggtgtcgagtgacagctcagccgttttcgcggctttttcatacgtcgcgcggatccagtcttcgagcgttttcccctccgtaaaggcgtcaaaaacgccgatccggcgggcgagctcagacgtgatccagtagtcatcccggcactcaccctgcggaggaacgagctgatgcatcgcgacaatcatgttgcgggcctgttcgcctgcgcctgaaatatcgttccgctcgtagaccgtcgtcgccggaagcacgatatcggcgtgtttcgcggtcgcggtccagtgcgtttcaatcacgatcgttgcttcaagctgctcagagcgccacgcgcgctcgagccgcatcgtatccggctggtgcgtgaacggatttccgccgccccagacgagaagacggatcgtggggtacgtgatcttttcgccattaaagtcgatcaccttccccgggtgctcaatacagtcaacgaaacgcgcgatcgggatcacgcggcttccctgatcggggtgagacggaggaatcgccggcactttcggaaccgggagattcgggatataggggcccgcagtcgccgggtcaccggctgaaccggtgtggtactccgtctgaatgccgccgcccgggagtccgatctggcctaagaacgcggcgagcgtaaaggccatccagtggaactgctcgccgaactgggcgcgctgcgcgccccagccggtgatgagcgtcgtgcggtgcgtcccgaggtcttcagcgagcgcccggatggtggcttccggcaccccggagatatcggcggcccaggagggagacttcgggcacccgtcctcctgccccatcacgtaggcgaggaatccttcccagccttcggtgtgggttttcaggaactcgtgatccgcgagattcgcttcttcaagcgcgtagatgatcccgagcatcagagcggtgtccgtccccggacgcaccggcacccaggcggaaccaagcttttccgcggtgagcggtttcaccgggttaatgcagaccgtgcggatccgcgggtggttgatcagcgcgttgtagtaggggctcgtgccgtgcgtcgacgcgaaccagtcgatatcgttcgtgatcgcggggtccgcgctccagaaaacgatccgctcggcggattcgagcacccgctcaaaactctgcggcttctgatacgcgcttccaatcacgtaaggcagaattttccgcatcgcgccgtttgagtagttgttctctcccttcacgtagccgccccggcacgcgagcagccggcggacgagcgtcaccgcggactgaatcgcgcccgaggacttccagccgtaggactgcccgaaaaccgcggacggcccataggtgtcgtaaacgtggttaatcgagtccgccgcgagattgagcgccgtatcccaatccacctgcacccactcatcccggccgcggttcgccgcgttcccgggtttcttctcgaggaacgacttccgcaccatcggatgcagcacccggctcttcatatagggctgggcctcaatcgcgtggacattcgggctcgggaagtaatcaccggcagcgggcgtgagcgtaatgcggccgtcatcgacggcggcgcggaatacgccccagtggctcgcggtggtgaggtgatcaggtgttggaagtgtcatctgagtgaaggggaaaaccaaaaaagcaagtcagtaaatcaattgcggtaaggagaaattttacccttcatggaactcattcctgaggataaaacccccgctttaacgccctgaatatgggattcctgcggtattacccgctattcatttatcccatagggaagaccgaaagcgcgtctcccggggtcaaaaaaaggggtgtctctgagaggagacatccctttaaggtctggggaacggcggaccgttcccagccggtgattacttcatcggagccggagcgggctgcgggccggggccaggctgtccgggctgacccggctgcgcgtgaggcgccggggcgggagcgtggcgggcgttcttatgagcgccgcggggcggcatcggcttcggagccttcttcgcgtggcgcggtgccgcgcggtgcggggccttcttcaggtgcttcggctgagccttcggagcgggcggcgctttctgatccatctgaggacccggcgcgggcggctggccttcaggaccaggggctgcgaaagcggaagcggaaaaagcgagagcggctgcgatcgcggccgcggcaaacgtcttcttcatcatgataggaaccctctatgcgttaacgccctcccggggacttaacctcggaagggcgggtgaaatcagtgaactgaattcaggtgaattacttcatcggcgcgggagccggagcggcttccggagcgggagcagccttcggagccttcggggcgtgcttcttcgcgtgcttcacgtgcttcttgtgaacggccttcttcacagccttgtggtgagccttcttcacggccttagccttagccttcggagcagccttggcagcaggagcgggagcaacagcggtagcagcctggtcagccggagcgggagcagcggcaggagccggagcagcaaacgtggtagcggagaacgcgagagcagaagcgagagccagagcagcaaaagtctttttcatttgagtcaaatccttgaatttgggtcgtcccggactccgtctggagtccggaattgattcagagtttcagagcggcgctctggaaattacttggcagccggggcggaagcctgagcggcggtttccgccttcttctcagccttcttcacggacttcttttcagcctttttggcagccttcttttcggccttcttctcaaccttcttcacggccttcttttcagccttgggggcagcggtcttcgcggccggagcggaagcggtcacagccttgtcagccggagcggaagcggcgggagccggggcagcgaaggtggtggcggagaaagcgagggcggaagcgagagcgatcgcggcaaaagtcttgttcatttggataaatccttattgggtttgtttggtgttccccagggaagcgtccattcagtgtgggacgcttcccggagagaaatcagtggttgtcagcgattacttcgcggccggggtggaagccggaacggaagcggcggtttccgccttcttctcagccttcttcacggacttcttggcagccttcttctcgaccttcttatgggccttcttcacggccttcgccttagccttcggggcagcggtcttagcggccggagcggcagcggtggcagcctggtcagcagccggagcggaagcagcgggagccggggcggcaaaggtggtggcggagaaagcgagggcggaagcgagagcgatcgcggcaaaagtcttgttcatttggataaatccttaatgggtttgttgggtgttccccggggaagcatccattcagtgtgggacgcttcccggagagaaatcagttgttgtcagcgattacttcgcggccggggtggaagccggaacggaagcggcggtttccgccttcttctcagccttcttcacggacttcttggcagcctttttcgtcgccttcttggcggtcttcttcacagccttcgccttagccttcggggcagcggtcttagcggccggagcggcagcggtggcagcctggtcagcagccggagcggaagcagcgggagccggggcggcaaaggtggtggcggagaaagcgagggcagaagcgagagcgatcgcggcaaaagtcttgttcatttttcaaatacctatcaaggttggttgttcgttttttcccggccatcacctggaccgggagaaaagcggtcagtgtttttagttatcggatcgcgcgttacttcgcaggagccggggcgggagcggccgcgggggcagctttctcagccttgggagcggctttcttggcggccttcttcggggcagccttatgagccttcttcacggccttcgccttgggtgcgggtttcgcggcgggagcgggagccttctcggtcgcctgggtgccggcgggctgggaagcagcgggggccggggcggcgaaagaggaagcagagaacgcgagagcagcggcgagagccacagcagcaaaagtcttcttcatgatttttcgagaagctccaaaaaggaatttcctattcccatccctgttttcagcagggctcgggagccaggcgttttgatgactcacatcagcgtttctggatgagtgaaatataagcgccgccgtgaaaaaaaagcttgggagaaacactctccccccactgggagttacacccaagggttttcgcctgacgcctttattcatgggggtttccaccatattggactgtggcgtcagcgcctcgcgaaagggggctgttatacccaaaatcagcaatttccgtatacgggaataaatagagcggaagttatgagagggtgagcggaatgtcgtagttctctaaaagattctgcttaagacataccgccagccatagatacttcaccatagcctatatatgggtaacacgagaaaaagccccgttttcaattgaaaaaagcccatttatagacgcattattttcagacacgcacttcaaaagaaccccgtgcaccgcacaggtaaaagaatgtgcccccagctttctcacataaaaaagaaaatctttagggagactccagtcatgcctcaaatgactttggaagaagcgcggaaagatgccgcccagcacggactgtacacaccgcaggcagagcacgacgcctgcggcgttggtttcgtcgcgaatatcaagggccgcgtctctcataaggtgattgaggacgcgctcctcatcctgcataacctggatcaccgcggcgcggtcggggcggaccccctctgcggcgacggtgccggtatcctgattcagatccccgatagctattaccgaaaggagctcgcgaagcagggcgtgtcgctcccgccccccggtgactacggtgtcggcatgatcttcctcccgcaggagcccgcgagccgcgcggcgtgcgaggcggagattgagcgtgtcgtgaaggcggagggccaggtcgttctcggctggcgcgatgtcccggtcgatcaccatatgaagatgagtgacaccgtgcgggcggctgccccggtgatccgtcagatcttcatcggccgcggcccggacgtgatggtgcaggacgccctggagcggaaactctacgtcatccgcaaggaagcctcccaccgcatcaaggctctgaacctgaagcacgggaacgagtacttcgtcccctcgatgagcacccggaccgtggtctataagggtctcctcctcgcggaccaggtcgggaagtactacctcgacctccaggccccggaagccacctccgcgattgcggtggtgcaccagcgattctcgactaacaccttccccgcctgggcgctcgctcacccctaccgctatatcgcccataacggcgaaatcaacacggtgaaggggaattacaactggatccgggcccgggaggcgacctgggagtctccggtgctgggggacgacgtgaagaaactcgcgcctctgatctacgaaggtcagagtgacacggcgagtctcgataacgcccttgaagtcctcgtgatgagcggctattcgctcgcgcagtccatgatgatgctggtccccgaagcctgggaaaaggcccgcacgatggacgccgaccgtcaggcgttctacgcctacaacgccccgatgatggaagcctgggacggccccgcggcgatcgtcttcacggacggcgtgcagatcggcgcgacgcttgaccgtaacggtctccgtccggcgcgttatgtcgaaacggatgatgacaccgtcattctcgcgtccgaaatgggcgtgctcccgatccccgaaggccgcatccgccgcaagtggcgtgtggagccggggaagatgctgctgattgacaccgttcagggccgcatcattccggataccgaaatcaagaaccaggtgtctcttgccaaaccttaccgcgagtgggtggagcgcctgaaccttcgtctttccgacctccagagcccggacgtgaaccccgtgccgttcgcggtatcctccggccgcctcttcgagctccagaaggcgttcgggatgacgcaggaagatatcgatgtcatcctcggaccgatgatggagaaggcgatggagccgatcggctccatggggaacgacgtctcgctcccggtcctatcgaagaaagataagccgttctttaactactttaagcagctcttcgctcaggtcacgaaccctccgatcgacccgatccgtgaggagctcgtgacgagcctcatctcctttatcggcccgaagccgaatctccttgacgtgaataacgtcaatccgccccggcgtcttgaggtgatgcagccgatcctgaccgaacgcgatatggcgaaactgcaccacatcgcggcgttcacggacgggaagttccggagccgtgagctcgatatcacgtaccccgtgaactgggggagcgagggtgttgaggcccagatcgcgtcactgtgcgctcaggcggtcgacgccgtgaagggcggctacaacattctcatcatcacggaccgcgccgtgtcccgcgaccgtgtggcgatcccggtgctccttgcgacctccgctctgcaccagcacctcatttctgaaggtgtccgcaccgacgtcggtctcgtcgtcgaatccggttccgtgatcgagacgcagcacttcgcgctcctcatggggtacggcgctgaagcggtgtgcccgtacattgcgctcgccaccctccgttctctcgccccgaagcgcggtctcactgaggaaaccgcggtcgcgaattacgtgaaggcgatcggcaagggcctcacgaaggtcatggcgaagatgggtatttcgaccctgatgagctaccgcggcgcgaggatttttgaggcgattggcctcaaaaccgatttcgtgaagcgctacttctggggcactccgacccgcgtcgaaggtatcgggctctttgaagttatgcaggaagccgtgaaccgccaccgcgcggcttacggcatcaacccctcgatgcagggggaactcccgaccggcggcgaatacgcctggcgtgccgacggcgaagagcatatgtggacgcctgaagcgatcgtgaagctgcagcggtcgactcgcgacaatagcttcaagacgtatcaggaatacgcgaagatcatcaacgatcagtcgaagcgtcagatgacgctccgcggtctccttaagttcaagaccgccggggcaaccccggtgccgcttgaggaagtggaaccggcggcccagatcgtccggcgctttgcggccggcgcgatgtcgatcggcgcgatttctgttgaagcccacgcgacgctcgccgttgccatgaaccgtatcggcggcaagtcgaataccggtgaaggcggtgaggatccgcggcgctacgaagaagaaatgcgcctcggtcactcccccgtgaaggatggcgacacgctcgcgtccgtgatcgggtcggatcgcgtgatggccgaggtgaagcttaagaagggcgatagcctccgctccaagatcaagcaggtagcgtccggccgcttcggcgtgacggaagggtacctcgcctccgccgaccagatccagatcaagatggcgcagggcgcgaagccgggtgaaggcggtcagctccccggtcacaaggtgtccccgtacatcgcggaactccgttactcggtcccgggtgtcggcctcatctcgccgcccccgcaccacgatatttactcgatcgaggatctcgcgcagctgatccacgatctgaagtgcgcgaacgatcacgcggacatctcggtgaagctcgtttctgaaaccggtgtcggcaccgtggcggctggcgtcgccaaggcgaaggcggaccacatcgtgatctcgggtcacgacggcggtaccggcgcgagcccggtgtcttccgtgaaacacaccggcagcgcctgggaactcggtctctctgagacgcagcagaccctcgtgcttaaccacctccgtgaccgtgtgacggtccaggttgacggccagatcaagacgggccgcgacgtggtgatcggcgcgatgctcggcgcggatgagtttggcttcgcgaccgctccgctcgtcgttgaaggctgcctcatgatgcgtcagtgccacctgaacacctgccctgtcggcatcgcgactcaggatccggaactccgcaagcgcttccacgggaacccgggccacgtcgtgaactacttcttcttcgtcgctgaggaagtccgcgagattatggcgagcctcggtatccggaagtttgaggacctgatcggccgctcagatctccttgagcaggaagcggacgtcaacaactggaaggcggacgggattgatctctcccgcgtcctctatcagccgaaggcggattcgatggaacgcagccaccacacggctcagaaccatcacctcgagaagtcgcttgacacgaagctcctccccgagctgaagctcgcgctcgagaagggcgtcaggaccgaagtgaagacccagatccggaatattgaccgtacggcgggcacgatgatcgcgcacgccgtggttgagaagtttggctcgaagggtctgccggatgacaccatccatattgagctcgcgggccacgcgggacagtcgtttggcgcgttcgccgtgaacggcatgacgctcgacctcgcgggtgacgcgaatgactatgtgggtaagggcctttctggcggcgtgatcatcatccgcgccccgggtgagttccacggcgaccggactcacaacatcattgccgggaacaccacgctgtatggcgcgacaagcggcgaagcgtacttcaacggtgtcgtcggtgaacgattcgccgtgcgtctctcaggggcttccgcggttgttgaaggcaccggtgaccatggctgcgaatacatgacgggcggcaccgcggtggtgctcggaaagaccggccgcaatttcgcgtcaggcatgtctggcggcgtcgcttatgtgcttgacacggacggcgactttgaaagccactgcaacacctcgatggtcgcgctggaacgggttgaagggtcggacgaacagcgccgcacctcggaccccgagtcctggcacctcggacgcacggacgaagagatcctgaagggcctcatccagaagcacgcggattacacgggctccgccctcgcgcagcacctcctcacgcactgggagagctcccgcacgcggttcgtgaaggtgttcccgctccagtaccgggcggctctgcaggcgaaggccgagaaggcaaaggctgctcacgcggcggcgaagtaaggagaaaacgtgatgacaaccgaaaagaaacttcaccgcattgagtttcaccatgaatccgtggaagaacgcgtgaagcacttccatgagttcaagaccccgctcaccgcggaagagatccacgagcaggcgctgcgctgtctccactgcgggacgccgtactgctcgtcctcctgcccgctccacaaccgccccgtggactggaaccgtctggtccgcgaggggaagtggcgtgacgcctgggagtgcctgaacgcgacgaataacttccctgaggtgacgagccgcatctgcccgtgcctctgcgaagcgggctgcacgcagtacctgatcgaggattccgcggtcggcattcagacgattgagcgttcgatcatcgaccgcgcctggaagtccggctgggtgaagccggaagtcccgctcatccgcaccggtaagaaggtcgcggtgatcggttctggaccctcgggccttgcctgcgcgcagcagctcgcgcgtgaagggcacctcgtcacggtctttgagaagaatgaccgcgcgggcggcctgatggcgctcggcatcccggactttaagctcgagaagccgctgattgaccgccgtctggaacagatgaaggcggaaggcgttacctttgagctcggcaccgcggtcggcaccgataagtttgacgaaggggtgcattccttcgcgaagaaagtgatccccgcggaagacgtgatccgggacttcgacgccgtggtgctcgcgctcggctccgaagctccccgtgacctcaaggtcccgggccgcgacgcgaagggcgtgaatttcgcgcttgacctcctgatcggccagaaccgcgaggattcgggcgcggtgaagaaggctccgatctcggcaaagggctgtgacgtcgccatcatcggcggcggcgacaccggaagcgactgcgtgggcacggtccgccgtcagggtgccggcaaggtctacctgattgacgtcggttcagaacccccggagcacgaaaacaaggcggaaacctggcccaactggccccgcaagatgcgtatttccacgtcgcatgaggaaggctgcgaaaagctcttccaggtgtcgacgaaggaaatcgtgaaggataagaagggcgaagtgaccgcgatccgctgcgtgaagctgaaggttgaccgcggcccggatggccgtctccgcttccaggacatcccgggaaccgagtttgagatcccggtccagcgcgtgtacctcgcgatggggttcctgcatccgtcctccacggtgctcgacgcctttggcgtggagaaggacgcccgagggaacgcgaagacggatcgcccgtacttcacgagccgcgaaaaggtctttgcctgcggtgacgcgcgccgcggtcagtctctcatcgtgaccgcgacgagtgacggccgtcagtgcgccgcggcggtggacgcctggctcatgggccgcacggcgctcacggtattcgcgaagtaatcgcagctccggtttagaggagagagaagaggggcggtgccgggaacggtgccgtcccttttttcaattcagaaacgcaaaacctctttcacgttcctgaaaaaaaatgatcgacgcgctggcttcagaatcggacatcctcgattggaaacccaaaatgccggtaccagtacttccaggagtcgacaaggtgcgtatagaaggacttccggatcacggacatcagttcccggagcagccggtcatccgcgttccgtctcagtacgcagatgtggttatcccagggctttcggtgccagccggggagcaccggaacgaagataccggaggcgagctcagtgggcaccagcgcgcagtcaatatcaagcgcgatcccgcggctcatcgcgagcgcggtgcggcgcgtcacgccgtccccataaatcacatgcttcatatcaccgatataaaaggcgctgtcgcccttatagagatattccgggcgatccgtatgaatgtctgagcggctttgcatgatgagcgtgtggcgcttcagatcttccggcgtctcaggggttccgtgaagctcaagatagtgagatgtcgcgagaatcagcggcacgtttttcttaagcgggagcgcgagcaggtcactttcttccgggcggtaggaaaggatcgcgagatccacctctcccgtcttcagccactccattccagcgcctgacacaaattccacccggagcccgtcatgcttttccgcgaaccgcgcgacgggatccagaaaggagctccggctcatattggacgggacactcacccggatcacgcggtcagaaaccggtgtcattttctgatcccgggtgagggagaggatgcttcgctccgccttcacgatccgccgggcgtaagggaggatcgccgtgagcgcctcggtcggcaccgcgggtttccggctccggtcaatcagcgcgacaccgagttctgtctccagctccgaaatgaggcgggacgcggccgccggatccagctccatcgcgtcagacgccgctttgaggctccccgctttcgcgtacgcgcagaccagtttccagacgccgatattctcagaccgtttcatattgacgaacgcaagaccgtttttaaattgatattttcgtcaagtttaaatggatcattctgcctgtcaattttttcgcctttttcgcatcatggtgacagacctcataacgcaaccaaaggagaacaaaatgaggaagctctcagcagccgtctgcgtactctcggccgccgtgctctgtcagacggcgatccaggcgaaggatatcgtcccgcagccttataacagttccaattttgaaaaggtttttccgcttcagtatcagagctggatcgcgtcgaaaaacgattcgaaaacggaggattacatcgcgaaatatccgttcctcgcgattctgcgcgctgggacgggcggcgataccggtccccgtcttctcggcctgagaggccactattacgcctgggttgatgtggcgacgattccggattcgggcatccccaacggcaaaaagaatgaggcgaccacggcccgctgcaatgtctgccacagctcgatcggacctgaggtaatccggaaagagggtgagcgtgagctgcagtcgaataacctctcgcacttcgcctacatgggcgcccattccgtcggatgcatcaactgccacgacccggaaagcatgaagctcaaggtctcgcactcgttcctcgataagatgctgaccaaagccggtaaacccacctttgaaaaggccggcgcggcggagcagaagagccttgtctgcgcgcagtgccactacacggggtatacggtagaggagaagtggaaggataagaccgggaagattcgcaccgcgaccgtggggaagaccgcctggaagaatggcttctcgcttgctgagcaggaagcgtttctgaatgacggaaaaaatttcccggatgggaagccgttcgctgaactgatccacccgatctcgaagaccccgatcatctggagcattcatccggactatgagctcttcaagaccggcatccacggcaagatgggcctttcctgcacgagctgccatatgccgaaagtgaaggcgaaggacggcacggtttacacgaaccacaatatcggcaatccgatgaataccttcaaggattcctgcggcagctgccacagcgtgaaggatgaggcgaagtatcaggcgatcgtgaagcagatgaaggaccgggcggaggatctccgctggaagtccgggacgctgctcgcgaaggcgcacctggaagccggcaaagcctgggaagtgggggcgactgagaaagagatgaagcccgtgcttcagaatatccgcgcgtcctactggcgcttcaattcgctgaaccgcggtgcctacttccataatcctcaggaaacgctcggggaattcgcgaactcgatccgctacgcggaagaagcccgcgtgcagctgcggaagatcctcgcgaagcacggagccgcgaactacgtcgcgccgaagtttgacaccaaggagcaggcaatggcgctcctcaagcttccgaaccgggctgccgcgacaaaggccaagtgccgctcgatcgaagtggactccgcccgctgggtggtcccctcaaagaagaacgggacctacgacaagaattacgtcgcgccggatgccgtggaaacctggtacacacgtgaatgccgtaagccggtaaagggctgacggaaaaaggtcagagaggctccaggggggtgatctctgaagggaggggcggtgcctgaaaacggtgccgcccctttttcttacgatgaagccgaaggtaaagactttcccagccgcattaaaaaacaaaggatgcgtaaatcaatacgcatcctttgtttaattgatctgcgtctggttcagaaaatcagatgccgccttttgtgatcgagacccgcttgtaatccggcgtgcaggtctttgagacaccggtgactttggattcaatcggaaccgagatcccgcgcgggatctcgatcgggaaggagaaggctccgggatccgtcacgcttccgccgcaggggattgagacctggatccgggccggagcgtccgcggcgtttgagccgagaccggtgagcgtgtagtcatacgttccctgcaccgcgccgtccgttctcgagaccttcagatccttcagttcggttccggggcgggaaagcgttccgatatcccctttcgcctggttccagccgaagatatcgccgaggttgaaattcacgccgattccaccgccgccggaagacgatccgccgaaccctccggcgtagccgccccctagcgtcacgccgcccatctggcaggcggtgagcagggtgccaaggagaagagaagcgagaatcagtcgggcggggcgtcttttcatggcggacctcattaaaaataggtgttcttcagaaaagcttacgcctgttctccgaaatacagttccttgtgacgagctttcccgcggatcacctcaatcgtgaccttccagacgtcgatcgcgtttttcgcgttctcgtaatagaccttcgtgttttcagcccccgcttccggggccgtgatttccgtgaacttcagcatgatgtcacgcttgtcgtcaggatctgtcaccatcgagaggtgaccgtagacggaggccgaggcgtaattggtcgagaactcggtcggagcgatttcctttcggccgataaagaggagagcgaccttcgggttcaccttaaagatcgcttctttgcggccggcgtcgtgcgcgcagtggaagtagatcgcgccgtcaatcagagcggtgttgacggcgaacacgtacggtgtcccatcggtatccgcgacgccgacagacgcttcatgcgtccggcggacgatttcataggcttcttcttcggaaagagcccggtccacgcggcggatggggcagtggatgctggtcgcgctattctgttcttcagacatggtgtttttttcgcctgtaagtgagagaggttgcggatcattttacccgggtgaggctgtttcttactcccatcattcggggaaatgatggtttttattcctgccactttgaggcggtcagaagaggaaagcgagagatgaacgagggactcaaagcggcggcgttcgaggcgatccggatatttgcgtccgtcctcgttttctttctcgcgtggcaggggctcgcgctgcttgcgggggactccagtccggacgacgcggtgacgttctttattgtcggcgcggtctgcggtgttctcacttaccgggagttcccgtcgtatctgaaaaacctgattgagcgcatgaaaaaagacggccgatcgtagttccgatcagccgtctcttacgaggaacggtttccgcatccagcttcagagcggatcagttcccggtgtttgttttcttcgcgccggaatactttttcggggtcggtttcttcatcccgcggccctggttctcgcgggtctgcgcgcggtacatgccggcgagcagcccgagcccgagtttccacttctcaagctgcttcttctcagactctttctccgcgagcttcaactcaaaatccgcgagcccgcgcgctttgtcgatccggcggagatcctctgtgatccgctcaggccgcagcgtcttcagcctttcgccattcagaatcgcggtgccgcggagcagccgcatctgttccgcctgaagggactccgcggtgcgctcgggagcgtgaggcttttctttcggtttcgcgggagcctctttcggaggcgctttctcttccgtcttcccgcccttcaagaaatcaaaaagtcccatgccgcgcctcccattgagtgattgatccgcggccaaaagccagccgcctcgccattctagcgagacaagaggtcttccgagggaaaggagatcttcagaaatagcatagctgagtgttttaaccaactgtaccgttcgccagatcgatcagctgaaggatttcttccttggtgtgaagctggagttttttacctgcggatgctctatggctttctacggtccgatcactgatgccgaggcgctcaccaacggcgcggcttgaaagccccagactggtgagtttcagaatctgaatttcccgttcggtgatgagagacagtttttgtttggcctcttcctgagacattactcgaagaggttcagctagagtgacggatgctgtagccgctttttcaactgaggccagtagcttctcggatttcactggcttttgtagaaaatctgcagctccagaatgcagggcgttcactgccatatcaatatcaccgtagctggttaagaaaatgatcgggacagtattgccttgttggttcaggtgttcctgaagctccaacccggtcatctcaggcatattgacatcaaggatcagacaccccggctgaccgggtttatcgttgattaaaaattctttggcagagttataagcggcgacagtccagcctttgctttcaagcataaaggacatagcagagcaatgagccaaatcgtcatcgacgaccctgaccaaagagagttctttgacggtttccagtcgattcattttccgtaatccctagggaagaagacagagaccgctacgccgttttggtctctgactttaaagtccagtttcgccctgtgatgttcagctatgcctttaacgatctgcaaaccgaggccaagaccgttctcctttgtggaggcaagcttttcagttatgtctgtaagctcgcggatagttttgacaggtccattatcctcaatcgacaggagtactccggaatcggtcccgcaaagtttcacgtacacttctccatcctcttgcttggcgacagattcaacggcatttttaacgagattgaccactaaaagctcgatttcgagttcatctcctcgaatgaacaaacctttttcaatggatgtcttgatagccacattttctgcggtgcgtgttttggagaagttggtcagagaatccgataccgtctgactgacgttaatcagctgcatggcagcgggggatgatttccggtaggctcggacttttttgataattgcgtccgcgcggtcagcctgcgtctgaatgtctccgagaatgctgagaaaccgtttctgattgattttgccgcttgtgatcatctccttcagaccttccgcataaagcgaaatagcccctaacggctgtcccatctcatgagccaggatcgaggagatctgatttacaacaccgattttctgcaaagcggtaagccttttcatcgcttcattggcatcatgctgaagctgtgcttgaagggcgagggctttttcgagttcagctgttcgttttttaaccagaaagctaacgctgatactatgacccgccatccctagaatcagaagaataattgccgcaaaaataggccagtatttttcgaaaatctgtttaaaagtccaatgtcttaaatattcataggggccaatctttaaatttttgagaacggtatccacctggctgtagtctgtggctaccccccagagcaatcctgatttcgttgctggcatatcaatcacagcagatgtaatcagcctggaaacttcaggtggtgttgaaaaggttgagcccagggtccaagtggggtaaagctttgtggagcgtgcgcattcgccgacacggttagttgggttaatgaccctaaactgctctcttacccatccgtatttcttgacataggcttcaagcacgcactgcttcagaaaggcaacatcagcttctcctgagcgcagggcgtcgagaatatcttctgacttattcccatcgccgtactcttttacttctctgaagaaatgatctggatcccaccctttttcagcgatttcactcattgggatctgaaagccggtaaaaccgtgaatattggataccgcaacagatgatcctcggagatcatcaattgttttcagattggtattttcgttgcggacgataatggcggatccttcactgtgatttggatcgggataggcaggtgacatggctgttgccagatcgcgagccccaaagcggactagccggcggtaaaaaccggcgcttgaaagaaacacatccaccttcccgtctatcacagcctgttcgagctcttcacgggtcatgtggacttcaacaatcgtccagtttttcagtttcttccgaatggccgcgatcgtaggatcgacaataggctgattagtgctgggagtggtgtatctgacaacgccgaatctgacgatatgtccatcagtttcagcgggtgtgctggggaaacatggctgtacgaaggcagcggcgagggagatcaccgctatcttgaggagagtggcaagacggcttcgtacaaccatgaaagtcaacgttcctatttcttcggcattgtgaatttgaattgatggcactcatcacaagcgagcttatcgggtttatggccttgatggcattctttgcagtccaggtcgcccaagtgatttgcgtgaacgttcgtgggcttcatgtctttggttttttcagccagtgcggcatagtccccatgacagctctggcatttcgctgttttaacggcctttgaaggagggttctcagcgtggcagccagagcactggatgcctttcgctacatggacgtcagcaagattcgccgcaaaagctgagccctgaaaggaaagaaatgcgccgatcaccaaagccgcgatagtaactgaccgtctgtttttcatattgatcaccgcaaatagatccttgtcaccagctgcggactgaaagcccgcagctggacctgaacagcagttacatcatctttttggcccgctcaccggctttcacaccggccacgcggccccagataatggcggagcagagctgcgaaccgccaatgtagtcgttgtacagcagaccaccgatggcattacctgctgcgtaaagaccaggaataaccttgccttccgtgttgaggatctcagcgtccttattgatcttcggaccaccgaacgttgccgtcatgccgcccataaacgggaaggcgtagaacgggggagtggtcaggaggcgcggttccttcagagtgttaggcggagtcagcgtgtttcccttgcccgccttaacggcagcgttgtactggctgacaaccttatcaagcgtttctgcaggaatacctgcctgagttgcaagctccttgatggtgttcgctttgaaatacttggcatgagcacgttcgtagcgcttgattcggtcgtcaatggtagagatgccagtgacctgattatcgataatgatgaaagcctgatttgtcgggatcagcttcggcatggctttggcgacataaacgtaggtttccacttcgtcgataaagcgagtgccgtccttcttaaccaggatgccgtagttcaccataatcgacggattcgcacgggtaggtccatggataggaccgccatggaactgatccatgttgacgtacatcgggttgaaaggcatcgtgagagaaatattttcaccggtgcagacagtcgaaccgcgaagcggcatccaggcggtgtcgccgcccatgtagcgggtcaccatttccttattggcatggaatccaccagtcgcaattacaacgccgccttttgcgacaaattccgcaggttcctcatcgtcgatcaccactttgcagccagtgcaccgaagtacatcgtcatgagtgagctcaatgaccttggtattgaagtagatcggaacgcccagtttcttggcggtatccagcatttgcttagaaagctgagcgccagcggggcgaagcggaccatcgactacgtgaccgcgctgcagcatcggccagacttctttttctagtttgcggaacttgacaccgcagacatcggtgagccactgaactgcgtcagccgactgctcaacgtacatacgcgtcagttctttgtcgcctcggccgagcgaaaccttcatcatgtcgtcgtagaaggtgttcagatcatctttgacgccgtcccgtttctgcacgtaagtgccggcggcgttgataatgccgccggcataaatcgtattgccggcaggacgagacatcttgtcaagaatgcagacgttgtatcccttgcgcttggcttcaatagctgccgccataccggcgcagccgctgcctacgacgacaacgtcataaaccatttttttgggttcttttgtggctgctccagcagtgacgctgcccgctgatgcgccggcagcgacagcggcaataagaccggttttaatggcagaacgccgagagagttcagtcatatttcttctcctttgatttactcgaggtgagtgaaaggtaagaagtaaataaatcaaccacttcccttcaaaagaaggattgctctacgggttacgtacgtaagttgacataaaacaggttgttacctattttgcctatcgaatttcatcctgtctgattacgtaaacctaggtctaaaggattattttttagaaaaaataccgcataaacaaagcctccggctgatagctggaggctgatgctgatctgtagttgttaagaacagattttcgttattaaatcagcgtgagaacattccggatcatcgtgatccgttcctcaatcgtgtcgatacgaaggtattcgttcggcgaatgcgcgccgccgccagcagggccgcagccatcgaccgcggggatcccggcagccgccatataagcagcgtctgacccgcctcccgcatccacccacttggcgtcaaatcccgccatttttgcggcctggttcacgagccggatcagttcttcggttttttccgttttcggcatcgccggacgcccgtgatcgatcgtgagttcagcggtgaccccatccacccacgtgcgggacacgagttcccggagctcgcgatcgagcttctcaatctgttcgtcccggaggaaccgggtatcgagatagatctcagatgcgtccgaaatcgcgttccggatggatcccccctgcatgacggtgggggagacggagaccccgtgcgggaggtcgttcaatttataagcttccagcgtgaatttcattagcgcgatattcgcgtcacgcccttcctccgggtggttcccggcgtgagaggctttgccgcggaacttcaccacatacccccggatccctttccgggactggatcagagaatcatccgggcggcctggctcaccgacgagagcgcggtcacactgcttcgcgagtcgggagagccactcgtgcgaatacacggaccccgactcctcatccgggttgcaggcaacagcgatcgagaggcggttcaacacatccggcggcagcgtcttcagggcgtagaagaacgcgacgacccctcccttgcagtccatgcagcccggggcataaatccggtccccttcaatccggaaagggcgcttcgccgcggtcccgtccgggaacaccgtgtctagatgggcgttcaaaaggatgtcgtagtgatccgcgttcggtttattcgtcgcgaagagcccggggccgacagccggtccgaggtcgacaaagtttgtcgcgaacccgatcgagtcgtaatgccgcttcatgattgaggccgctttcgcgaccccttcaatattccggcttccggagtcaaacgacgtgatttccttgagatccctgatgtaatcctcgacgagcgccatacgcggttcctttctgatgaatactgccgataaggagttatagctgggaatcggagctccgtgcagagccggtcgggtttatctcaaagcgcgctttagtaattttcgtagatccactgtccctttttttgatccttctcaccttactcgagtaacccgccgagaaaaataaaagttaacgagctgcatcaaaaaatcgagctcggagatgtggaatccaataaggagagaatcatgatcgatatttcccgccgcggcatgctgaaggctgccgctctcagttccgcaatggctgccggcgcttttgcgcttcctgccgaagcgaaagagactgctctcgcccttccgaagaagtgggaccgtacgacggatgtactcgttgtcggctccggcattgctggcatgagcgccgccgtgactgcggtagataacggcgccaaggttctggtgctcgaaatgggaaagaactatggcggctgcgcccgtatcaacggcggcatcattgcgcttcggaatgacactccggatgagctctatgcccacctgacggatccgaagaacgctgaataccgcaagaacgatccgaagctgactcgccgctatgcggatatgtgctggcccaccaaggcctggctcgaggagcacggggttaagttcctcagcacgtcaaccgctgccggcaagtatgactcccagcatcatgagagctaccttcacatcttctccgaaggtaaggatgacgatgtcggcggaattcatccgcagcctaatggtggctaccgtaccggccgcggcatcatgatgccgttcaaggcttacttcgaaaagaagggcggcgtgatcctgatgggctacaaggccacggatgtgtaccgcgacgcgaagggccgtgtggtcggcgcccgtgtgcaggggccgaagggaatcgtcaacatccgcgctaagaagggtgtgattcttgcgggcggcagctggaaagcgaatccggctctccgagtcattacggatccgcgttttacacctgacatggttccgaccggctatccgtttgttgcccctgacggttccgctatcgttgcgggtctgaaggccggtgcaatgtacgtcggcgaccgcggtgaagatactccgcgcctccgccgcatgttcggtaccaaccgctacggcttccagaaaggttccaagtatggctgcccgggtcttgcggtgaagggaccgcgctggggcgatgtgatctttgtgaacaagatgggtgaccgttttgttcgcgaggaagataaggcgaaccttggcggctacagcttctacgacatggcttatgtccagccggaaaagaaggtgtggtgcgtgtttgatgatgcaaccgcgaagaagtatcactgggatacgagctatccgcagtgcgaaaaaggattcgcgtttgatgcggcctctctggatgaacttgctcagaaaatcggcaccaagaacctccaggcgacagtgacccgctacaacggctttgtcgataagaagcaggatgacgacttccggaagccggctgctctgcttaagaagaagattgagcagggtccgttccatgcagtccaggtcgtgctcttcgtgcacaacttcacgggcggtctccggatcaatgagaacggtcaggttatcgacgttcttgggaacgtcattcccggactctatgcggccggtgaaacggctggtggtctttatgtcggcaacggcatgccgcgcgccattctcccgggtcgctgggctggtgagcacgctgcgaaagtgaaggcgtaattcaggttctctcctctcccggttcgaggttctgaagactccctctccaagccccgggccgggactttttctatggctcttcaaaatgaaaacgataaagaccctagcggcagccgcacttgccgcgcttgccttggctgtggcagcagctccggctggcgccgctgccccaatgaaaaaggctgattgtctccagtgccatgggccgctcgagaagctgacgtccatgccgccgatgtatgacgcggatccgggaaagatcaacccgcataaattcattccgcatgattcaaaggatccggcgaaatttcccgagtgcaccacatgccatacacctcatccgcttcctccgcctaaaggtttcaaggataagagtgccaatgttgagatgtgctactcatgccatcacaactacacattccagaagtgcagcgggtgccacaaataaaccgctctccggccgggacttttcctcccggcttgcggcgggcagaatagttgaatcaatggggttggcggtcagtcccgggagcggagcgttatcacatgaaagggaaggaaaagctgagcggaagaccgatgtatgttctgccgcttgcggcactggcagtctgttttgccgctgctctcgcgcttctttcttttacttcatctgagccgcagagggagccaaatttctcagatctagctcctaggcccgcaagacccgagggggctccggttcgtatcgggcttgttgactttaactactcatctaccaattcccgggaaatcaatgcgtccatcgagcgactgaaagatgtgctggctccgaccccggttatcgcgacccgctataaggcagaagatctggatcaggatgtaaaggcaggaaaaatagatttctttgtcgccagttccggtttttaccgacgaatggcaccgtatggggccagagccctcgcaaccgtagtcaatagggatcgtccggatccgaataagagcagcggtgcggtttttattgtccttgcttcaagcccgatcacgaaaatctcagatatgcagggcaagcgtctttccgcaagctatccgacagcttttaatggctaccggatcgcgatggcggagcttgcggaccttgggtacgactacgaaacttttttcagaagcaccatttttgtcggcggcccccatatccataagatcatgcatcccatgatcgacggagacgcggatgtcgcaattattccagcctgcacgtacgaagagtggagtaaaaacgatcaggcgcagttccgtcttatcggtgcgagcacggacacgggtattcattgttggagctcaaccactgcatatccgggccatacgcttgctgtaatgaatggtgtgcagccagaagttgccaagcgggttgtggagaccctgctttccatgaagcggggcgacagacatgaaagctggagtgtggcgactgactttacagcggttgatcgcgcgtatcggcttctgaaaatcggaccgtacgcatacctgagagaaccgactttcaaacactggctccgagagcacagaacctcagttttgattctcctgattctcgttggagcgctttcacttcatgcctggcgatctgacgttctggtgctgcgcagaacggaagagctcgaagcagaatctgaagctcgtgaacgttcatcgcgcgaactggcggctatgaatcagaggatggagcagactcacaaggcgactctggtgggccagctttccagcatgatcgcgcacgaactcgcgcagccgctctccgcaatcagttattacttggaaggggcaatggagttagtgaagcgtcagcatgatgagaccgggctgctggcatcgtcactcgaaaaaatcagggtccagacagaccggatgggcgcaattgtcggcaaggttcgaagctacgctaaatcggacgcgaagcgtgatgaccgtgtggatttttccggcacgcttactaccgttctctcagaactgcgggttaaggggatcggaaacgtgaaggtggcgtcctcggtccccgtggggcttgcggtgcggggggatcctcttgaaattgagctcctgctctggaatctcctcaaaaacgcgacagaggcggcgcttggcactgggcatccgatgattgaaatcgagggagcggagaaggatggcgtcgtataccttcagatcgaaaacagcggcccggtgatgacagaggaagacgtgaagaacctcgactctccgctccagtcaaagaagccaggcggtaccggacttgggcttcacatcgcggagtcgatcgcggaagcgacagggggcggtattagtttgaaacctaggacaccggacggactcacggcgatgctccatctgccttccttccgttcctgagcggctgttggtgcggctactgatgcatgggatgccccgcggtgttggacaagtggattctcacggtatagtgatagggcagtttcgttcgcagaactgatctaccaaaattcataataaaacccaagatttcaactcttcaccgatccgggggaaacactcgatgactgacacgaaagaagaccttgcccgacgcgaagccccgtgcttcatttacgagaaagaggaaattgtccgccgctgcgggcttctcaaagccgcgctcccggacgtgcagtttctgtattccgtcaaggcgaatccctttgaccccgtggtccggacgatcgcgggggaggggtttgggagcgacgcggcgtcgtctgacgaagtgcagaaatcgatccgcgcgggcgtgccgcttgatcggatcttttactccgccccgggtaagacggacttcgatatccggtcgtccctcgggttctgcgtctttatcgcggacagcatcggagaggtcggccggatcgccgcgatcgcggataaggcgggtgtccgtcagaaaatcgggatccgcgtgaacccggcgtttggaatcgggggagcggccccggctccgtccaaattcgggattgatgaggagcagctcccgctgctcttccagatcgtccggaatctgaagagcgtggaagtgacggggatccacattcacctgaagtctcagatgctcgacgccggactgatcgcggactatcaccggaagtgctttgatctcgcggaacggatcgcgaaggactacgggatcacggtggagttcgtgaatttcggaagcggcatcggaacggtctataacgacgacgaggagaaaccggtggatctcaccgtactctcgaaagcctttactgagatcgcagcgaagaaccgcgagacccttaaagcggccctctatatcgagaccggccgctttccgacctgccgcgcggggacatactacgcgcgcgtggtcgataaaaagacgtcccgcggtgtcacgtacctcgtggtcacaagcggcctgaatggctttatccgtccggggttcgccgcgatggcggaacggattgccgcaaacggcgctgcctcggggcttgagcccttctacaccacaaagaacgaattccggatcgaggctctgcccgcgcaccccgtgggaacgaatgaaaccgtgacgatcgtggggaatctctgcacagcggttgacgtgatcgcggaggggattacgcttccgacgcttgaagtcggggatcttgtcgcggtgacgaacgctggcgcctatgcggcgaccctttccccaacccggttctcgagccatccggctcctcaggaattcctttgggaaggaagccggagaaactaaactctctcgtttaggggaagtgaaggagaacatttcgtgactgaggatgagaagcaaaaggttctgatccggatcgtggatgacgatcaggcggtgcgggacggaagcgaattcatgctttcctgcaagggctggaaagtgaagtcctacgcctcagcgcgcgactttcttgtctcagacaccccgagcgtcccggggtgtctggtcctggatatccgaatgcccggtatgagcggctttgagctccaggacgagatgcgaaagcgggggagcacgcttcccattattttcctcacggggcacggagatattcacgcggcgatccgaaccttcaagcggggcgcggcggattttctcctgaagccggttgataacgcgacgctgttccgcgcaattgagcggtcggccgcggattcacttgcgaggtcagatggcgggcttacgggaaccgaggcgctcgacgcgctgaaagagatgagtgaccgggaaaccgagatcctggggctgatccgtgagggaatgcagaaccggacgatcgcagagcgtctctcgctttccgaacgcacagtccaggggcaccggaacaacatctaccataagcttcgggttcatacggaagcggaactgcttacgtgcctcgcccgggcagaagagcgacaggccgccgatcaggaaatctgaaggctctgaacaaaagtcacaccgtatcaataaaaaccgccgcccgaggattatcctcctgcggcgatggttttgaagagaattcttttcctaacgcgtcacaatcatccgttcaaaccacccttcggggttgcgcttaaacgtggagcagggcggcgcgaaagcgatcgccgcgacccgcgggtcctttttgaaaacgaggtcgaggagacacgcctcaaactcctctacgccccagaagtcgtccggcgcggtgccggccgctgaaaaccgccatccggagtcccagctcccggccggggcctcccggaagcagaaaataattttggatttccccgagaggaccgaggcggatgcgagacacccctgcccccggtgaaggctcgaaaacggtctttctgtgctttttgccataagtgttgtcgccgttccgtcagtaaatcagggcttcccgcggcgggaaaggagagtttccgtgtcgcttcagtcctgttctgtaatatcatcacattcaatatttttcgtcaatcccttaaacaacttagacaactttctctaaagttgttctattttcgtttaattgacatatcgataaatatagatataatgaccggcatggaaaccgtcgatatcttcaaagcgctcgcgaacgacacgaggctcacgattctcatgtggctgaaggagccggaaaagtatttcccgccccaggggattcatattcctgagggtgattcctttgatcacagcgtctgcgtcggggcgatctgcgacaaagcggggatttctcagtccaccgtgtcgcattacctcgacatgctgcagcgggcggggctcctagaatcgcgccgctacgggaagtggacgtattaccggcggaatgaggaaaacatccggaaactcgcggactacatcgcgacccggatctgatcccaggaatagagaggctggagcaaagcttccggccttttttaagacacttttatatcgatatttatcgatatatctatttaataacaacagaggcaaataccaaaatgcatttcagcggaccgattgtgagaccgcagaccgacgcggacagtctctttattgaggtgacggtgggctgcacgcataacagctgccggttctgtaatttctacgaaggcgtccccttccggatggcgaagcttgaggatatcgagtcggacctgaaagaggcgaaagggtacctgccgaccgtccgtaagatctgggcgaacggcggaaacccgtttgtgatgtcaacggaaaagcagatccgggtgtgggagctcatcaagcgctattacccggaagcccgcctctccacctacgcgatcatcacggatttcagaaacaagacggtggacgatatccggcggatcaaggcgagcggccttgatgacctcgtgattgggatcgagagcggggatgatgaggtactcgaagcggtcgataaggggtataagtccgacgaaatcatcgaggcctgccggaagcttgatgaagcggggctcgactaccgcatgatttacctcggcggcctcgccggggcggggaagcttgaagcgagcgcgaagaagagcgctgcaatcatcaatcagatccacccgtactacatgtacctcaccacggtttccgtgcttccggggacgccgctttaccgcgacatgatggaggggaagttcaaggaggcgaccgagaaagagcgcattaaggaaatgcgtgagctgatcgcggacgtgaatatcccgatcaccgtgaattcagagaacgccgcgagcagcgtgaacttcacggtggatctgccgactgaaaaaccgctgatcctaaacgagctcgataagttcctagcgaatttctcggatgacgcggaaaaagcgatgagccgccgccgtcactacatgcggtcggtctgatagccggaacgaatcggcagccgggaaagggggacgcttctggacttggggggcgtcccgctttcttttatttatctcaggctttcttcgggtcagccgctttctcttctgtcaccgcagcttcagcgtcttttgccggagccacggtcggacggaacggaaaaccgccgtcccggattgactgccgcacaaacatgctgaccgcggtgttgagggtcagccccatttcagaaaaaagcgcgtccgcttcagctttgaccttaggatcgagccagaaagtcacattgacaggctgattcggcatggtgaaaaactccgtgtatcggaattgcgccgatataacgcaaaacccttgttatcgttaatttaaatgtgcggcgaattataagtgcggtctacgactttggaagggcttttggatcagtaaagatacctagctcacggaatttctttatcgggatcacaatggaaccctgatctacagaaaaggcggagacgtcatcatgaaaatcggcgtcatcggaatcggaaatatcggcgggacactcgcgaggaagttcgcggcttccggccacacggtgcgggtcgcgaattcccgcggagcggacgcggtgaaggattttgccgcgtcgatcggggcggagccgacagacgtcttcggcgcggcgtccggggtcgacgccgtgattctcgcgataccgcttcccgcagtcgccgctctccccgtggatctcttcaccagtctccccgccgcggtcccggtgattgacacgagtaactactaccctgacctccgcgatccccatattgaggaaattgatgaggggatgccggaaagcgtctgggtaaccgagacactccatcacccggtgatcaaggcctttaataatgtgctcgccgatacgctcgccgcgggcggccggctcccgggtgacccgaaccggctcgcttccgcagtggcgggcgacaacgacaccgcgaaacgcaccgcgatgaagctcgtgtcagaggccggcttcgatccggtggatgacgggctccttgaagactcctggcgtcagcagccggggaccccggcctactgctgcgactggaaggcggacgaaatgaaggccgcgcttgcccgcgcggtcccggggcgggctcctttggtgcgggattcgctctacagccgcttcgcggggctcgggccgaacccgacgcacgaggccgtcatccggatgaaccgcggcgtacacgaggaacccttcgctccgtaagagtgacctgaatcccccgaatggcgggtgcggagagacaaaagcgcctcctataatggatcgcgttcggttcctttacgtcctattttccacactgatgcgctggctccaatatctcgcgctgcccctcattctcttcgccctctgggcgggagtgtcctatacgggacgggtgccggcgattctgcttccgacaccgggcgcggtgtgggattcctttgtgagtctcacggtctcgggggaccttctgcatcacacactcgcgtcaggcttccggtcgctcgccggcttcgcgatcgcctcggccctggggctcgcgctcgggctcctgaatgcccgatccgcggtgtcgactcgggtttcctacctccttctcgaggcggcccgcgtgaccccgcctctctccctcattccgcttctgatcctgtggcttgggatcgatgaagcgccgaagatcgcgatcgtgtttctcgcgagcttcttcccgatctacatgaatgtcgtgaccgcggtgaaggcggtggatccgaagctagaagaagcggcgaagctcctccggttcacgaagtcggaacgccttcgctacctcacgctgccgtcgtccctccccgggattctcacggggcttcggctcgggtttggctacagctggcgggcgcttgtcgccgccgaactcatcgccgcgagctcgggtctcggcttcctcatcagcgattccgccgagttcgcgaaaacggacaccgtctttgtcggcatcatcacgatcgcggtggtgggcgtcatcgcggatcgggtgctttatgccgcctttgaagcggtcggccgccgggtcgggagggctgtctgatgtggacgattgaagtcgatcaggtgagcaaagccttcgcgtcggaccgggggcgcgtcgtgacggctgatggcctcacgttgaccgcggcggcaggagagatcaccgccgtgatcggcgaaagcggctgcgggaagacgacgctccttcggatgatcgcggggctcgagacgccggactcgggttcgatccggttcacgaaccccgagaaacccgataccgcgccccggatttcggttgtctttcaggagccgcggctcttcccctggatgaccgtgcgggaaaacgtgtcgctcgcggtgcgggaactgtcgggctcggaaaaatggggtcggacggatgaggcgctgaaggctgtgcggctctgtgacgccgcggacgccttcccgaaggaactctcaggcggcatggcgcagcgggctgggttcgcgcgcgcgatcgcgcagtcgcctgacatattgctgctcgacgaagcctttggggcacttgacgcgctcacccgcaccgtgctctatcaggagttccaggcgctgcagagcgagcgccggatgacggtgcttctgattacgcacgatgtgctcgaagccgtgatgctatcccgcacgatcctcaggcttcgcggcggcgtgatcgatgaatcttttgcggtgccgttcccttacccgaggtcactcgccaccccgggagctggtgacctttctcaccggatctacggaacgttttttacgggcgaaaaagaagaaattaaatagcagttcggataaaccgggcccttcaaagatcagaaggcccgttgtttcaaagaggagctaagacactatgaatttcatcaaagcggcggcgatcgcgatttcagctgtcattgcctgcggcgcggccgaagcgaagatgccgaaagaagtgaacatcgtctacgtgaaggcgccgttcaatctccagaacatggtgatcaaggatcagaagctccttgaaaaggcgttcgcgaaggatggcgtgaaggtgaactggaagacgatcacgtccggcgcccagcagagccaggcgatggcggcaggctcagtcgacgtttcggccgtgatgaacaccgcctcgctccttctcgcgaacggcgcggggaacccggtccagatcgcgactggggtcgcccatccttccgaaaacttcgcgatcgtcgtgaagtcaggctcgattaaatccattaaggacctgaaggggaagcgggtcgcggggccgcggggcactgtccttcagcagctgctgctcgccgcgctcgcaaagaacgggatgaaggcgacagacgcccagttcatctccatggggatcccggagtcgctcgccgcggtaacatcaggccgcgtggacgcggcgctgctcgccgcaagcgccgtggtgaaggcggaagagtccggctgccgggtgctgacgaccgcgaaaggtcttgtcgacgtgaacctcgtgatgaccgcccgtaaggggttcgcggatgagtcgcccgaagcgctcgccacgatcgtgaaggtgaaccgcgagtcgctgaagtggatcaagtctcactggaaagaagcgatcgcgatcggcgcgaaagagcaggggatcagtgtgagccaggcggaaacgcttgcccgccgctcccactattacgatgtcctcacccagaccgatatcaagggcctcgaagccgatcagaagttcctcgtggaatccggtctgatggcgcatcccgtgaatgtaaagtctctgatccttccgggcgcgatgaagtaacacgcgtaactaagggttattgagatccagatttacgagccttccgggggttttccctccggaaggttttttattgccggcggataatccatttctcaaggtttcgaacgcatcccgctatcggtttttgatcaggattttcccattatgaagcgacgcgcatttcttatttccgccgcagcgacactggccggtttatccgtgcccgtgttttcgactgtgctcggaaagtgctcgcttcgcggggcgtttccggatcgcgagctgacagtcgatacgactgaaggcccggtggttgggtcccaggccgccggccggcgcgccgaagcctatatcgggatcccgtacgcgaagacgccggtcggggcgaagcgctggaaagcgccggaaccgcccgcggcgcgcgaccgcgtgctcttcctcgggaaccgcgcccccaagggaacctcggggacgcctcttacgctttccatctggcggcctgaggggagcgcctcaaacctccccgtggtgtttacgcttgaggacgggaaatacgatggtgacgcggatcacgcgtcgatcgacggcgcgtcgctttccgcggcattaaacgccgtggtcgtcgtcgcccggactcgccccgggctctttggctttgtgtcgcttccggcgctccgccacggaacgaaactcgaaaattccgggaacttcgctctcctcgacgcccgaaaggccctcctctgggtgaaaaagaacatcgcgaaattcggcgggagcgccgcgtccgtgacccttgtcgggacgtccggcgcgggccgcgacgtgatggccctgatggggagtccagttttttccgggctcttcacccgcgcgatcgcgatttccgggggcggcgcgttaacgaaacccgatcccgccgcgagaattgacgcggatagccttgcccgtctcgcttttgaagaccgtaaggccggcaccgtgggactcgcggcgaagtggattggggcggacagccccgaagtccgccattggctttcgactcttgaaacctcccggattctaaatctcacgcgcggcgcttcgatccgtgacacttcgtacccgaggctctttgcggatggggcgttcctgcccgcgtctggcctcgaccgagccggtcccccggacccgaaggcgtcgcgcgacttcccggtgctgctcctttccggtgcgtccgaagcgaacgctctggtgtcccgcgacccgtatttcgcggccgccctgaaggattcgagcctcctcacgaaccccgcctctcaatctgaattcgcgttcgcgtcccgctacgggagcagcctgatgctctgggcgaacaccgcggaagccgcggaccgcgcgtaccgcttcggaaaccatcaggtgttcgccggaattttccgctggggggatgatgaggcggtggtcggggcggctgcgaaggcgctgcacggatcggcgtcagacgtcccgtccgcctttatcttcggaccctcgaaaaactttgacgcccgctacggcggcgcggtccgcaccgcgggaggacaggaacttctctcgatcacccgctcttacgtgaagaacttcatccgcaccggaaacccaaacggcgaaaacctcgtcacttgggccccgtggggtgaaaccggaaacgcgctggtgctcgacgccgatcgaaccaaggcgtgggccgataccgaagcgtcccgcgtggatctcacggcgaccttccgtcagatggatgacgatcagtccgtgacgccggacgcgaaggcaaagctcatctgggatgtactctcaggctacgcctggagtcagccgctggaggcgaaattcggcgtcccgaatgatcttttcgcgggcaccgtgccgaagtacgactccccggcttctgaggacgacgcggcataaagtcccggaaagcgcggaattccatccgagagggggatccattacggacgccccttttttatttttttcggttgggagaggagagggacccggccccggtctcacaaaacaggaaccgcctgattctcagggcggttaaacccagaaaaccaggcggttgggacacagccgactgcacacaagaaagccggctgctcgggatctattctagcgggtgagccgagtgttttggggcggctcacgcctttacggacggggcttcagacgattttcgcttcacgccatcgccttttcttccgcgacccggggttcgggggctttcggcatcggccagagtttcaggaactgtttcgcgaaaagcccgacgcagagcgccgagacaaacgttccctcgcggaccccgatgatgccgcctgtgaagatgagagccacgatgcacgcgatgatcactagcgaccagtcgttcacgactttcatggttccaaacgggtgacggaagaaaacggactccgcgagcacaatgccttcgcccggctgcacgatcgtccgcgaatggatctgcatcacgattccaagggcgaggatggcgttcccgaggaaactcacgataaaccgcgggatgtagcctgacggcatcacggccgcggccggcgtcatcgtgaaatcgataaacgcgctgaagacgaaaaccaccggcacctgaaagcacatgaaggcgtggaagacgcctcgtttcttcagaagcagccactcaatcacaaagaacacgacattcacgataaaggtcgtggtgccgaaggtgagccccgtgagcccggtaatggtgtaggggagggagctgatcggggtggtcccgagatgcgtctgcgtaatcaaagaaatgccggacgcggcgacaaacatgccgagcgcgagaagcgcccagcgcttcccgtaatcaattaacttttctgaattcaacctctttctccgatttatccgcgcgggttccagcaggacgcccgcgcggacctgaccattctaagagggtcagagaaggccgtcggccaatctcagcttatgagtcctttgaaatgtttttggcccagtctttgatcagccctctgaaccagacggcggaagggtcatcatggatcgcctgcgaccagacgagagaaagccagggattgtcagtttctgaaggcggaatctgaacgcaggagatccaaggaaccagcttgatcagatactgagcgcctgtaaaaccgcagattgccagcgcatcggtttccttcaggacgccgagtgccgtggcaatgctgtaaacacggagcatggcggagtcctgaatggattccgcaaggagtccggaatccatgcttgggaagtctcgctcctcaaagcggctgacagataccgtcggatgttttttcagaatctgcgaccagtgttcgggcgtttctcgcagttcggagagtgagggatgatctgcccggcagaggatgacccgcttcagctcaaaaagcggaatggagtggagcccatcaggaatcgttcctgaaggcataaaggcgaaatcgagatcccgattcaaaagcgcctgtccgagtttcggatactcgccccggaacaccagtctgacgtgcggagcttctatttcgagtcgctttacaagttcggcgagaagagattccgtcgcgattgaaaagctggaaatccggaaggttcttgtcgactccgctggatcaaaaggaattccggcccgaagacttttgatttcagccacgatgggtcggagacggtccccgagattaatcgcgaaatcggttggctgcagccttccgctgacaaccacgaacagcggatcgttgaaatgaacgcggagtttatcgagcatccgcgatgcccctgataccgaaagatcaaaccgctcggcagccgcgctgaggctttcccccttctccagcagatccagcagaaattccagtgcccagaatttgaaggggtcgtttgtttgcaagatctgaaacctccgtataccagcttctgccattgagtcaatagaactaggtcgccagaattagttcatacacattctgtatcactggagagtttacgatgaaactgaaaaccctgacaattgtggcttgcatggtgacggcctcgtttgcctgtttgtcgactgcacaggcagcggatgacgccaataaaaatccaacatttacaaagtacgcgccatggaagggccaggggcagctgggttacgtttacgttaacccgtatgggaatacacccctcacagcgattattgatcgaggcagtaaaaacattactggggttgtcgttacggtacacggaaaaggcgcgaagggtgtcacgatctcttatcccgtctcagacaaggccgtcatgaatcatgacggcattccggtgttcggtctttacgcggacaccctgaatcaggtgaccgtgagctataagctcgatggcaagcctgttaccgaaaactatcggatccagacaagcggtattgattttccggtcgctgatatgagcatccgtccccatcctgaggctgaggtggtcgtgaatactggcaagatgaatgggagcctctacctcatcaactcgctgggacagatgccgaacgcgaacgaaatcatctgggcccgaggcggcgccgcgcagtataacagcgtgccggtcaatgtgattttcgatacaaacggtgatatccgctgggtgctgaagccggacgctttcacgaattacgatttccgcaatcttgatcgccgcggcaacatgatggcagtcacccaggtgaaggacggggatttgattttcgcgcagggactcaggcacttcaagatggatctggtgggtctcgtgaagcgtgatcagcggcttccgagaggctacatcgactattcccatgaccagattcagatgccgaacggcgacctcctgcttcgtgtcggcaagagaaactacaagcgtccggatggcgtcgttgtcaatacgatccgcgatcagatcattgaagtgaatgccgatggggacctggtggatgaatggaatctccccgagattctggatcctcttcgcgataaccttcttcgcgctcttgaccagggagcggtctgcattgagattgatccgaagaaggccggtcagaccgcggaggcccgtcccgatgctccgcttatggacattcccggtatcgaagtcggccgcaactgggcccacgtgaattcgattgagtacgatccgaaggatgactccatcatcctctccatccgacatcagggcgtcatcaagatcggccgcgataagcaggtgaaatggattctcggcacgcctgcggggtggtccgcgaagttcaaggacaaagtcctgaaaccggtggacagccacggcaaggcgcttacttgcgataacgccgggtgtgaaaacaccgactttgactggccgtggatgcagcacgccgcaagtctgacctcgcgcggcacactcatcgtttttgataacggtgatgcccgtcacctcgaacagcctgccctcccgactatgaaatattcccgcggtgtggagtatcggatcaatgaaaaggacatgacagtccagcaggtctgggaatacgggaaagaccggggattcgcttggtacgcgccggtcaccggaaatatccgttacgacggatcgaaggacgtcatgcagatcttcgcttcgtcgacaggcattttcgataagtcgaagaaggccatcgaatcgacctttgatgtcattgactacaagacaaagaagatcgagctcgagatgaagatcaagatgatggggaagaagaacatgccctatcgcgctgaaaagattgatccgaagatcgctttctgacgctccctcagactgattcatcggagaccgcctctcgcgcttcccgctgaccgatcccggtctccgatccaaccctaaaccaaggaggaatttccccggcactgaccaggctctgtttttgtcaggtcggcgggacattccgaaaagaaaccccgcggagcactgctccgcgttcactggagtcattcatcatgcaacgccgtactcttttctctgctgtctttgccgctgccgcctctttctcccttcccgctctcgccggcaatttcaaggaaggcacggattatgtccgtctcagcaagccgatcgccagccgcaaaaataatgtgatcaaggtcttctcttacgactgcccgttctgctaccgctatgacatcggtgtggatcccaaagcgatcccgatgattgagaaaatggggatgacctttgagccgcgtcatctcgaaaccaagggcaagtatggccgcacagcctctgaatttttcgcgatgtgcattcttcgtgatcaaaaggccggaagaagtcttgaggccaaggattctcttttcaagaaggcaaaggacgcggtctaccacgcttatcaccggaagggagaacgctggaccaagggcgaagccgcctttatcgaaaccctcacgggagccacggggattagcgcggatgaattcgccaaggaaagaaagactgccgctgtgcagaatctcgtgaattcctggaagtccgtctatgacgtggcaaagattcagggcatcccggcttacgttgtgaacgggaagtggctcatcatgacaaagagcattcagagcattgatggattcgtcgccctgattcagaagctctccaagatgtaaggggaggggctgatatgaaatggtcaatcagctgcggcaggatcctatcgggacgattgccgactggcaggatatgcggtggccctggattctgatggcagcggtctgtgtgcttctcgtcctggtggcccactacatgttccaggtgtggctctatatggccccttgtgaacagtgcgtgtacatccggttcggttttcttgtgatggcgatcggcggactgctctgtgccatcaatccgaagaatctgatcctgaaggtgctggggtacgtctttgcttttgccggcgcgatctacggtctgaagtgctcggtgaagcttgctgctatccatcacgccattcatagtgacgatccgaccgcgatgttcggcatgcagggctgctcaaccgacccccattatccgtttgatcttccgctcgcgcagtgggcgccggattggtttaagccgacgggtgactgcgggtacgacctcgcggtggtaccggatggagtccagctctcgagcctgcagcagtggtttatcgatatgtataacagctcggattcctggtacctgattccgaagtggaagttcctcagcatggcgcagtgctgtgagctggccttcggtttcatgttcctagtgctggtcatcatggcagtgtgctttgtctggaaacgctttatccgcaaggcagcctgagaaaccataaacagtcaggtgtaaaaatgggcagttccttccccggctatctctcctcgggtttaggaactgcccattcttctacggattccgacggatctgaaagagaaggcggaatgctggggtcagtcttccagagccttgaacgctgaattgagcttgatttccgcgtcgcggaggagcttcactttcgactccagccatgcggtatcagtctcgagcgacttttccgccgctttgaagaggcgatcgagctcgggcttctgcgggccgccctcggaccgccgggcttccacgatcgacttcgggtcgagaagcgaccggaacgcgggttccgtaaacgggaattcggacggaatatgcttgagtccttccttcttcaccatcgtttcgtagagcgacttcgcggcttcatacggaagcgtaatcggcgtgtactcatgcgctctcgcgaacgtcacgagttcagaggaatagtggtgcccctcccggaacgggatcccgaacgcctgcatcatcacgtccgcgatattctgactcgcggtccagtcgagattcagttcctcgagcgcccggtcggggttcaccttcagaagcccgatcactttcccgaacgcgtcaaagaccgacgcggcgtcagagaggagcgtcgcgttgcttcgctgatccttcgcgtcgtacatcccgggcgcgagatcatgggcccggaagatgacgcctgagatttcgccgagcacctcgttcgcgtcgcggcgcacatcgatcagggcgccggggttccgcttctgcggcatcgcggtggaagcgtaggtagcggagacaaggatccagggccgcggctgcgcgtactgcgtcatcacgtcctgaatgaactgcgtcacgtgaaggagcggctcgacgagcttcagctccgcctcaatcgcgacatcggtccccgcgatctgccccgcgtcgtacgcgttatcaatgatcccttcaaagccgaggagctttgccatcccgtggcgatcaagcggccagggggtgccgttcagcaccgtggttcccatgggggagaggttgagacgcgcccagaattccttcaggttctcgatatcgcgccggaacccctcgaggtgcccgagccacgtgtgaccgaggctgttaggctgcgccgcgaccccgtttgtgtagcagggggcgatggtgtcccggttctgatcggcaagtgtgaggagcgcggcgcgcgccgaattgaggttccggataatccgcacgatctgatcgcggatcatcgcgcgctgaaacgtggcatgcatgtcctgggacgagcgcccggcgtgaatgagggtcacctcgattccggcctccttgataaggaggggttcatagcgcacatacatcttcgggcgcggattcccgggggtgttccccgttttgatcacccgctcctgcgccttgcaccaggcaccgaccgacttccggtcgaggaggcccgccgcggtattcgtcacaaaggtcgctttattgatttcggagagccaataaaactcgtcccgcgggggtgtcccgctccagggctccagatccgctttctttccggcttcgccgactgacggtacgccaagcgccatgctgtgttctccttctccaaaaattcacgatgtctcacaccgggtctttccgcccgggtttgaggacagtatggagaagatttgttttgtcttctatgacaagtattgcaaaaagaatttgcttttttctacaatcaaggccatccgccggacacttgcccggcctgaagcggacggaaaaggacttccccgatgaaacgcgatctcaatcttgaaagctggaaagtgtttgccgcggtggcgcggaccggaagcattacggaaacaagcgcggagcttgagatggacgccccaagcatcagccgcattgtgtcggggcttgagaagtcgcttggcggcatttcgctctttgaccggagctcgctcccgctcactttgacggacaacggccgcttcgcgctggagtacgcgacaaagatgatcacgcttcacgatcagctggtgacgggccttgccgcgaacaccgacgcgatgtcgggggtgctccgggtcggcgtgccgcccgcgctccttcaggggttcctgatgccgttttttgtctcattcggccgccggtacccggagattcagcttgaggtgagcgagtatctcggcgggattccgattgatttctcataccccgcggggtcgctcgatgtcgtgatgtcatacggcccggaccccacgcactcgaacttcgtccagatccggtacggagacgccggattcatctgctgcgcgtcacccacctacatcgcccgctacggaatgccgaagacgcctgaggatctcgcggaccatgtggggatccggtttaagagcccgctcagactcggcaccgtggggcagcagctgatgcgggggagcgaacaccgagcggtgcgctttaagcgggatatcgtcttcagttcggcactctccgcgaagtccgcgacgctgatcggcgccggtatcgctccggatctcggagaccttcactgctaccgggaactcgctaaaggagaactgatccccgtgctccgcgactggagttatccgcgtcaggcctgctacatctacacgcggcccgacctcgtgaaactgaagcgcgtccgtacgtttatcgacgagtaccgcgcgaatgtggagccgctcctcgccgaatgcgccgaagtgatccggaatgtgatggagtagggcgggaatcgggcgtccgttcaccgttctgtgcggttttgttcttttttacaaagaaactttaatccgattgccattgttgcaaagcggaaaatcctcgatccttaagagcatccggactaggtcgttcggaagagaaaaacgattcttcagctacccagaaataaggagagagttttatgaaccgcactgcgctcaccgcggcgttcgctgccgccgcttctgccgctttcgtgtccgccccggcgcttgccgcgccgagtgtcacgctttatggcctcgttgatatggggctttccgtttcccggtcgtccggcgacgcgtcgaacgcgaatgacggaaaggctcttttccagctgaagagcgggcagagaaacggctcccgcttcggcctgaaaggcgttgaggatcttgggagcggcaataaagtcggctttattctcgaggatcagttcaaagcggacgacggcacgctccaagactcgagcttctgggcccgagagtcttccctctgggtgtccgggcggtatggccgtgtgacggtcggcaaggtggggcagctgaagagcccggtcgggtccaccgcgctcgcgggcaccgccatgtatcccttcgggacgctgatgagtaactttatcgggggtcttaagtacatcacgacggggaattacctcacggtcgataactccgtcacctacgtgtccccgaactaccgcggcttcacgttccacgcgcagtattcattcgcgatgtcgggtcaggaaggcaccggaatgaacgacaaggaccgcatgatggcggccgccgtccgctataagcagggcgcactcacggcgctcgcgcttgctgacatgattcatctgaataccgcggactcgaagctttatgacgacccctggaccgtgaacctcgccgcgaactacgacttcggcttcatcaagccctatatctttgcgcagtactttaagcacagcgcctttaatacggtgggttccgactatcagacccggatcagctcaggcaccgggaagaaatacaacggtttcggcgtcctcgccgcggtccagtggccgatgttcggcggcaaagcgaaggtcggcgcaggctacgcgaagggtgagggagatggctcgaacacgacagacgtcgtccgctattccgcccacgtgggctacgactatgcgctctccaaacgcaccgacctctacgcggatctcggctgggtccgtcaggatctgaaaaacacccttgaccgctcgaacctcaccggcacggaactctcagccggcattgttcaccgtttctgaatccattcggagataactcgtcatgcatgacatcatgccgtatctcgcgcttctcgtcgtgattctgactggcgtcggaatcgtgaagaagctgcaggtgaatattcttctgcttttcgccggcatcgcgctgaacctcatcgcgattctcgggggcgtcaccgatctgatgccaaagggcgcccacggcaccggctttatcggttttgacctcttcgggctcctctccgcgctttcccgccaccaggcggcgacgaccggtttcatcattctcgtcgcgggcggcttcgcggcctatatggatcagatcggggcaacggataagctcgtcgccgtgtgcctgaaaccccttcagcggctccggaacccgtacctcatcatgggcgcggtctttatccttggaaacttccttgggctcgtggtgacgtccgccgccggcatggcgatgctgctcgcggtgtcggtctacccgctgcttatcgggatcgggatttccggggtcgccgcggccgccgtgatcggcagtgtcctcgtgatcagctacgcgccgagttccgcgatcgcagtgctttccgctcacaccgcgggtgtcgacccgatgacctacctgatccagtatcagctgccggtcgcgatccccgcgattctcgtcaccgccgtggtccacgtgattgtccagaattacctcgataagcgggataaggcgacggggtcgctcctctcgatcgacccgaaggtggtggaggaaaagacccgccgcgcggcgaacctccccgggtactatgcgctcctcccgcttgtgccgcttgtccttctcttcatctttaacaagatggtctataagaccgtggtgctcgatgtcgcgatcgcgatgttcatcggctgggtgttcgggatcctcgtcgacctcctgcaccgccggaacctccaggcgtgcttccaggacggtttcgcgatgttcaaaggcatgggccacatgatgcagagcgtggtgggtctcatctttgtcgcggcgcttttcgcagacggtctgaagaacgcgggcctcgtcggtctcatgattgacgccgcgaagtccgcggggttcggaatgatgggcacgggtctcgtgctttccgccgtgatcggcattgtgacggtgctcacggggtctggtgtcgcgtccttcacgggactcgtcccgatcgcgccgaccgtggcagctgggttcggcggcgaccccacggtgctcgccatgatgctgcagctcgcaagtgaattcctccgcccggtgtcgcctgtcgctggagtgatcattattgtcgcgggctttgccggggtgtcgcctgtcgctggagtgatcattattgtcgcgggctttgccggggtgtcgccgctcgccgtggttcgccgcacctggatcccgtgcttcgcggggctcattgtggcgcttgccgcaaccgtgattctcttctgagggtcagaacacgatccagatcctttggagtctgaagcggattccctggacatgaaactcttctgaatgtggaatccgcttccttttctcttcctgccggggctcacgccccggctttttttgtcccggtggggagagaggcggttttcgtccttccatttctctttactcttttccgatcttttgacggcggatcatcgcagatcccggctgattgatgatttttatcaaagagacgctttcaggctccgggcgattacggtaaacccaggcggctgttaactgccccgtttcggttttctgccgtaaagggatcagacccgaagtttccggttctgacggaaaacgcctgatttcccccataagacctagtaattaagcctgcgttgaaaatcagtatcggcccattcccgttgtttgattgattgacatctttagttaacttgttctgttaacttctgtcaacttttatcgtttgtgaaacacaaataaaagtctttcgagatcttttgttagtaaaggcttataccatatatggtcgtctggtattgaaaaacaggaagatttggaaaataatgcaataaaagaatgtttattttcgtgtcgatgacaccgcttcgaagttatgaaatattgtcaagcaggatgacatatttcaaaatttgtgaagcaaaagtcacccctccggaacgcagaccggggggaggctgtcagaaggtgtcagcgttcatgaaaaacaaagccagatagataaaaagaacgagaaaaccatgagacacacagataccatcaggctgtctcaaaagacagccgctgccgcgcctcccgcggcggcttcaggctccacccggcttaccgggttccaggagatccttgctgacacggtcgatgccgcgtcgctgatctccggcggcagccccgcccccatcctttcctcccttcgccctggtgcccggactttcggcacctacatcgcggcgaaatcccgtttccgggccaggcggctgaggcttttcccttgaagaagccccaggaccggcggtctttcccaatcctcatggcagaaaaatatccgcagtgggtcttttcactacggatttgtcattaagggttttgggaacgtttttcttcagttgtctcaatctgtagcgtaaaagcaacaaattaatggggtttgctacccaaaaatcattacaagatattacaaatgaattgctatttgataatatcgaattgaaatttgcaattatttacgcaatttttacgcgcctcggatctttaagaattccgaacatttcggagaacgcggtgtttcgcggatcggggttctgagagtccctcgcgcggggcggattgactgacttgcaggccttttaaccatttcccggtgtcagcgcggtttaccggcacgggaacagaaatcggatcaggttctcgacagaaccgatccttacttataagagaggcagaccatgacagagcagaaaccgtacgcaaaaagacaggcagtcgcgcttgccgttgctgcggcgctcctcgccgcttcaggcgcggcggccgcggatcaggtgaattacgatcggatcaccgaatctatcgatagtcccacgaccgacgcggttgtgacatacacagatcagactgctgacacttttgtcacacagcctccggtgatgcccgaggatcgcgatgctcaggcgaccggcatgacgctgacacttaattccctcaccgttaccaatgagacgacggaaggctactccacttccggctcgcgtaatggccttggaatcaccactaacggaggatttgtggggacctccgcctggaaagatccgtcaacgggcggcgtacatctggctatcacaggtgacgtgtccgttaccgcgcgggggaacgcccttcaggtatcgaataacaacaatatcgacggcacaatcggcggcaatctgaccgtgaaaacaacgcctgttggcggtggagtggggctctatgcatctgcgggagagcacgacgcgaccattgaccgtggcattctcctcacgcttaatggcggcgaagcctcaattactacggatggtttcggtatcgagacggattcgtcgtccgctacagtgaaaattgagggggcttccaagaccacgatttcttctacatacgtcgccatcgctaactacgcaggtgaagtggatattttcggctccgggaagggcggcgcgggcggcagtgtggttgttgaaagcacgggagtgggcactccttatgccgttatgtcaatgggtagcggaatggttgcccttcaggccgggagcgtgaaggttcaaaaccttaatcaaacttctgacgccgtcgccgctataggtggcaatgttgtcctgacctctctagacgcgaatggaactggggttcaggtatacagtaacgcgcccgcctcagataatctcaatgcgcaggttcccactatctatgcggggcaaaagggcggtgttacgatccaggcgcagaacagcccgatcgaggtcctcaatcaggcgggcggtcaggtaattacgaccagcggggagagcagcgttgccattaacccctcgcagatggctactggcgtccgggtgaacggcaatgtcaccaatgatgacaaaagcagtgtcggtatttatgaaaccggaacgggttcttacctgaaggcggataagatcaccactacggcttcgagctcaacctacgttgtgctgcatggcgacgcggcttacacgtcgctcagcggcgggacttcggaagcgacggtcgacgggcaagagagctacctggtgattcagggggctgatacggggaaggcgctcgcgaatgtgaccacaacccagggtgccttatccggtctttcctttgcgggcaattcgactctgaccggtaatctgaattcttttgggatcgcgcccgggtatgaatcgaaagacgacgatatgacccggagctgcatcacgctgtcgctctatgagaacagcgcctataaaggcacgtcgaccgtgacggatggcggtcatatttacggaaccttctcaggcgctgccacgatggaaggcgatgtgaatgtttcaggccggtcatcaggggatattccgtcaacctggaatttcaatggcagcggcacaggatcctttaccggcaacatgagtctctctgacggcgccatggctgagctctgggtgaccgatacggtgaaggctgacggcgactttaccgcgaaagacgataaaacgctgctctatctgatggggtcgggtgaaagcgtcctcacgggtaatgttgacgcgtctgccggcgcgacggcagcggtctacctcggggacacagcgatcctgaatggtgatgtgacggccaccggaacgggcaccaaagtgacggaagtgttttaccccggcaccacggtgaacggggatctcacgtcgtctgacagcgccgcggtgacaacgcagctcggcggtacctggaacggcacatcgacgatctctggcggcacgacggatctggaattcacggacgcgtccgcggtgtggaatatcgccgcgaattctgaagtcacgagtctcaagcagtcttccggcacgatcaatttcccggcggctccctcgaccggcttcacgggcaccacgcttacgattgacggcgattactccgctgacggcggtaccgtgaacatgagcacggtgctccagggtgacacgtcgccgcacgacaagatcgtcgtgaacgggaacacgtccggcaccgcgaacctcgtgttcacgaaggtgtcggggtacggcagccaaacgattgaaggcatcaaggtggtccaggtggcggggacctctgacgcggtcttcacgaagccggactcgaatcgcctcacggccggtgcctatatctacgatttgaagaaggtcggtaacgactggtacctcacgagcgagcgggatccgaacgccaaaacggttatgcttccgcacacatactccaataccacggacaatccgtccgtgacaccgaccgatgatctgtccaataattcggcgtctggcgatgatgtgctgccggatgtgctgccggcgaccgaccccactgatccgaccacgcacatcgtgaagccggagctcgggagctacgccgcgaacctctatgggtcgaacacgctcttcacgatgtcgctttacgaccgccttggcgagacgcggtactcagacgctctgaaatcccagaagaagtccgggaacgtctggatccggatgcagggcggaaagaaccataccaacatgtacgacgatcagctgacgaaccgcggcacgtatggaatcgtgcaggtgggcggcgacctcgtcacgtggcccggttccggtgaccaccggttccatgtgggtctcatgggcggctatgcgcatcagagcacgaagacccggtcaagcgacatcgggctcacgtcgaaggggaagctttccggctattcggccggcttctacgcgacctacatgaatgacaagccggaagcgacagggccttacgccgacctctgggtgctctatcagcacttcacggataaggtgaatccgagcaacgcgagtgaggaaagttaccactcgaaaggctggaccggttctcttgaagcaggctacacgtttggtctgaaggactgggtgagcgcgagcggtacgcagaacgcgacccgcctccagctccaggctcaggtgatccgcatgggggtccgcgccgatgaacatatcgacgccgaaaacttcacggttcagggaaccggtgccgggaacgtccgcacccgcatcggcgcgaccgcgtaccacctcttcacgaacccgaagactggacgcgcgatcaagccttatctcaccctcaactggtaccacgacacgaagaacttcggggttgtgtatgacggcgtgaaggaccggatcgaaggaacgcggaacttcggcgaagtgaagttcgggatcgaagggaaggtctctaagaacgtcaacctctggggtgcggccctttaccaggctggttctcacagctactggaacgccggtgcctttatcggggcaaaggtgctcttctgacctgagaagagggcagggtgtctggtgccccggctgcccggtcctcttcagaaaaggaggcgcttcggtgatttcgatcgacgcctcctttatgacatccatcagtcttccggccaaagagcggtcagttccgcgatgttttccgattctgaaccggccgcgcggtttcattcagcgcggatgaatggctgagagatcaaaaccgtgaatccgtttcagacagccatctgaacggagactgagaaaaggattccattgatttcagaaacggattccgaaaaacagaggaaaaagaccatgagacacgcagaaaccatcagactgactgggaaagccgtgaccgcggcggtcgctgccgcgcttctcgcgatggcgtcaggcgcgggcgcggaaactctcacgcggatatccacatcaataaatgagccagacacggatattgagattcactacaccagtgatacacccgcctccgatgtgatccacgccccggtcgaaccgggagcggagggcggcatcacggtgaccgcgaaatctctcaccatcacggatgatggcacctccgattatctgtatcagacttacagcggtatcgccacaaacagcgcttacccggggtctgacattacgcttaatatcgcgggtgatctgtctgtcacggtcccgagagtcgcgatcaaaacgagttacggttcttccgtgaccgcgacgatcgggggagatctgacgctgacaacctcggatggcaatggttcgacgatccaagctactgatactggagaacacggatcagatgatgccacagcaggatccaatgtgaccctgaagctgaatggcgggaaggcggtgatccagtccctcgcgggagctccttccgggaacgcgattgaccttgagtctgccccctctgtgctcaggatagagggggcttccgaaaccgtcatctcttccatggcgtatggaatttacgttaatgaaggaagagttgaagtatccggttcaggcgagaacggaagtgaaggcagtatctctgtggtttcgcacggtatcgggaccgcgggaatttatacgtacggagggtctgtaacgcttcaggccggcagcgtcaaagtctggggggatggcgaagagaatgatgctatggaaacgaagggcggtggttccatatatgcctttggcggttctgtccacatcacatcactcgaccccaacggaactggcgttcagctgctgagcttcaatggtaatcaataccctaacggagaaattccggtgatcatgacgatggatgacggcagcgggaatgccggttccgtcacgatcgaggccagaaatagcccaatcgagatactgaatgacgccgatctgtcctccattatggccatgggcggcaatgtctcggtcaacagcggtcagatggcgacaagcatcaaggtaaacggagacatcacggcgagccaggcgagctacgtggggatttatgaaaccggcaccggctcatatctcaaagcgaataacgtgaagagcgaaggcgggagttctgtcgcgatcacgcttcacggcgacgcggtgatgggaccgatcgccgcggaccaggacaaaaccagcgtggtgtcgcaggatttccggagttttgtcgtggttcaggcacaggacacggcgtcagtgaccgcggactttacgtcttccggaggcgcgtccacgtcgctttcgcttgccgggaactcgaccctgaccggcgatcttcatgcgaccggcatcgcgccggatcacgagtcggatcagaacgacaactaccgaagccttattacgtttactttcaccgaaaattcaacatataccggtgactcaacagtcgaggatggcggtcatatctacggcgtcttcgaagcggcttccgctatgaaggggaacatcaccgttgccggccagtcctcaggcggcgttccctcaacgttcagcatgaatggcagcggcaccgcatcctacacaggaaatatgaatgtgtcaggcggcgcgttaggcgagatcgcggtcagtgattcggcgaccgcgacaggcgactacacggtgaaagacgcgaattccatactttaccgggtcgctgaggatgaaggcgtaatcaatggaacaacgacggcgtccgcgggcggcaccgccgggcttttcctcatgggttccgcggtcctgaatggcgatgtgtcggggaccggctctggcaccaaggtgattgagtcctttgaaccgggcactacggtgaacgggaatcttacctcttcaaacggcgcggcggtcactacgtcgctcggcggcacctggaacggcacctcaacgctttccggcggcacaacggatctggaattcacggacgcgtccgcggtctggaatatggcggcggcgtccgaagtcacgaccctcaagcagtcgtccggcacgatcaacttcccggcggccgcgtcgaccggcttcacgagtactacgctcacgatagacggcgattattcggctgacggcggtaccgtgaacatgagcactgtgcttcagggtgacgcgtcggcgcatgacgaaatcaccgtgaacggaaacacctccggcaccgcgaacctcgtttttaccaaggtgtccggctggggaagccagacggttgacggcatcaaggtggtccaggtggcgggaacgtctgacgcggtcttcacgaaaccggaatcgaaccgccttacggccggcgcttatatctatgagctgaagaagatcggaagcgactggtacctcacgagtcagcgggatccggacgccgcgaagatcattcttccgaaaacgattgacgatcccgatccggtccagccggatgttattccagcagtagatccgacagatcccactattcactatgtgaagcctgaactcggaagctacgccgcgaatatgctcgcgtcgaacacactcttcacgacgtcgctttacgacaggctgggtgaaacgcgctactcggacgccttgaagagccagaaaaaatccggaaacgtctggatccggatgcagggcgggaagaaccacaccaatatgtacgacgatcagctgactaaccgcggcacgtatggtgtcgtgcaggtgggcggtgacctcgtcacgtggccggggtccggtgaccatcggttccacgtcggtctcatgggcggctacgcgcatcagagcacgaagacgcggtcgagtgacatcggacttacgtcgaaggggaagctttccggctattcggcgggcttctacgcgacctacatgaatgacaagccggaagcgaccgggccgtacgcggatctctggatgatttaccagcacttcacggataagttccacgcgagcagtgcggccgaagaagagtatcactcgaaaggctggaccgggtcactcgaagccggctacacgtttgggctgaaggactgggtgagcgcgagcggaacccagaacgcgacgcggctccagctccaggctcaagttgtgcgcatgggggtccgggccgatgaacatgtcgacgccgaaaactttacggttcagggaaccggtgccgggaacgtccgcacccgtatcggcgcgaccgcgtatcacctcttcacgaacccgaagacgggccgcgcgatcaagccttatctcaccctcaactggtaccacgacacgaagaacttcggcgtggtctacgacggagtcaaggatcacatcgtgggcacccggaatttcggcgaagtgaagttcgggatcgaagggaaggtctcgaagaacgtcaacctctggggcgcggcgctctatcaggccggctcccacagctactggaacgccggggcgtttgtcggcgcgaagatcctcttctgagagaggaaaagcgggttccgggctgagccccggagcccggcatctcaagcttcatggcgcaaaaaaggggaaccggttgattagtccggttccccgtcctttcccggttaacgggaaggtcccaccacagagatctttcttacttcaagccacgcttcagagcagcttctcaatttcaggcgcgatcgcggaaggcactgtcgtcggctcaaaccgatccacgacgttcccctcgcggtcgatcaggaacttcgtgaagttccacttgatgccgtccccctcgagatactcggggaatttttctttaagaaccccttcgaggatcttcgcgatcgggtggctttcgtcaaaccctttgaagcccttctgagacgtcagccacttaaagagcggctgggcgttttcaccccggacgtcaccctttccgaatacctggaacgtcaccccgtaattcagctggcagaactcatggatttcggcgtccgtccccggatcctgctccgcgaactggttgcaggggaagccaagcacctcaaggccccgatccttgtacttcaggtagaggtcttcgagctccttaaactgcggcgtgaagccgcacttgctcgcggtgttcacgatgagaaggactttcccttcgtagtcgcggagcgatttttcccctttcggggttttgccgctgaagtcatagacgttcatgctcaattccttttcacatagacggagcggcaggggaggcgggaagagaggggtttcccgggcagctcctccgccgctccgcgaggagtatccgttcactgttaatatcgattataggcgtcggtttaaataatgcgaggcttttttattgttgcaatttcaattgtttaagcattatttaagaatcggttttattcgttttatgagagacttttgatacacggaaaaacgcaccgggacgcccggaaaatggggtaagaaggggttctgaccggtccccgaaacgaggaacccggaaggactcgcgtccttccgggttccagggccgcactcctgcggcagggctcctctcagccgaaaccggttgactagccgaagcggccgctcacgtagtcatccgtttccttctggcgcggatgattgaagacctggttcgtctcgccgtattcaacgaggcggccgaggtacatgtaagcggtgtagtccgagcagcgcatagcctgctgcatgttgtgggtgacgatcgcgaccgtgtagtcacgcttcagttccgtcacgagctcctcaatcttcattgtggagatcgggtcgagggcggagcagggctcgtccatcagcagcacttcaggcttcacggcaatggcgcgcgcgatgcagagacgctgctgctggccgccagagagaccgtagccgctctgatcaagcttatccttcacttcgttccagagggccgccttcgtgagcgcccactcaatacgttcatccatgtctttctttgagagcttctcgaagaggttcacgccgaacgcgatgttgtcatagatgctcatcgggaacggggtcggcttctggaacaccatgccgacgcgggcgcggataagggccggaggcgttttcgtggtgaggaggttttcgccgtccagcatcacttcgccttccgcccgctgacccgggtacatgcggtacatgaggttgaagatacgaagcagcgtcgacttgccgcagccggacggtccgatgaaggccgtcactttgttcgccatgatcggcatcgatacgtcgtggatcgcgtggaaaccgccgtaccagaagttgacgttattcacggcaatcttcacttcttcctcgtccacttcgcccggcatcgcggggggaaccatagtctgagtattcgtcatgttgtcaatatccaaatgggtttacttgcggttcgtctggtttctgaagagaaggcggaccgaaatgttgattgcgagaacaaggaacgtgatgagcgcggcaccggcccaggcgagctgcttccagtcatcgaacggcgaggctgcgtactggtagatcaccaccgggaggtttgccatcggggcattcatgttccagctcatgaactggttcgaaagcgcggtgaagaggagcggagccgtttcaccggaaatacgggcaacagcgaggaggacgcctgtcacaatgccggctttcgcggcgcggcagatgacagagagaatcatcttcgacttcgggcacccaagagcgatcgcggcttcgcggaggttattcggaacgagctgcaggaggttatccgtcgtacgggtcaccaccgggatcacgatgagggagagcgcgatcgcgccggcccagccggaatagtgaccggacggggccacaaccacggcgtacaccacgaggccaaggacgatggacggggcagacagcagcacgtcattcaggaagcgggtcgccggagcgagccagccgcctttcccgtattccgagaggtagatgccggcgagaataccgatcggcgtgccgatcagcgtaccgaaggtcgccatgaggacagaacccacgatcgcgttcttcaggccgcccgcggctcctgggggaggcgtctcagccgtgaagagcgtgagtgacatcgcgccgacaccgttctggacgagggtcacgaggatccacacgagccagaagagaccgaacaccatggcaccgaacgcgagaatcttcatcaggcggtcagtggcggagcgaagcgggaaagtcgcttcgcgcgcgaggatccgcttacgggcctcctcgtcacggttcaccgaggcctcgtaattcgcggcgctcgtatagtcagttgcgtgagattgcgtcatgatgcgcggccctccttgcgggaaaggcggaagagaagcagacgggaggctgcgagaaccgccgtcgtaataaggaagaggatcagaccgagttcaatcagagcggacttctgcagcccagcggcttcgttgaagccgttcgcgagcgcggaggcgatcgagttcgaggggtcgaagatcgaggtggggagcgcgaaggagttaccgatcacgaaggtcacggccatcgtttcaccgagcgcgcggccaaggcccagcatgatgccgcccatgacaccggcgcgggtgtaggggagcaccacatgccagatcgtttcccaggtggtgcagccgataccgtaggaggattccttgaggagcgggggcaccatgtcaaacacttccttcatgatggaggcgatatacggaatcaccatgatggagaggacgagaccggccgtgaaaagaccgatgccgaacggcgcgccggagaagaacttcccgatcacggggagcgacccaaggccttcgatcagccacggttccacgtacgtctggaagagcggcgcgaagacgaagagaccccacataccgtaaatgatggaaggaactgcggcgagaagctcgatcgcgatgctgcagggcttgcggatccagaccggagcgagttcagtgaggtaaaccgcgatgccgaaagacaccggaaccgcgatgagaagagcgatggctgaggtgatgagtgtgccgagaatcggcgagagcgctccgtaaatatcctgcaccgggtcccattcggacgaggtgaggaaggagaacccatactgattgatggtgtcgcggctctcgaacccgagggacacgagaatcgccgcgaggagcagaaacacaaaaatggccgcgaaccgggagaggttctcgaagccagtgtctgcgagcgtggatttggtaatcatagagatgagagaagagccagatacggaaaaccgcccctgagggtccgacagatgcgggtcggtctcaggggcggatagggaattacttcaccagcggctttccgtcagcagccttgaggtccgacttccagatcgcgcggatgcgggtcgtgacagcggcgggcagcggcacgtagtcgagcttttcagcagccttgccgccgtgcttccaggaccagtcgaagaagttcaggacagcgcggccctgatcaggcttcgtctgggtctgctgcaggaggacgaaggtggcggaggtgatcggccaggacttggcaccgtcggtgttagcaagcgacacacccatgcccttcacgctgttccacttggcgttcgaagcggcagcggcgaaggcgtcaccggacggctgcaggaacttgcccgccttattctggagctgggtccaggcgaggtggttctgcttcgcgtaggcgtattcgacgtaaccgatcgagttattcagctgaccgacgtaagcggcaacaccttcgttgcccttgccgccctggcccaccggccacttcacagccttgccggcaccgaccttcgacttccagtcagcggagacctgggagaggtagtcggtccagaggaacgtggtgccggaaccgtcagcgcggtggatcacaacgatcggggaggccgggagcttgaggcccgggttcagcttcgtgatctgggcgtcattccacatcttgatcttgccgaggaagatgtcggcgagaacggggccggtcagacggagctggccagccttgacaccggcgatgtgaacaaccggaaccgcgccgccgatgacggccgggaactgcacgagcttatgcttctcaagttcagcgggggacatcggatcgtcagacgcgccgaagtcaaccgtacccgcgataatctggcgctgaccgccgccggagccgatggactgatagttcacctggttaccggtagcagccttgtagtcagaagcccacttggcataaacggggtaggggaacgaagcgccggcaccggtaatcgtggaagcgtgcgcgacggagagcgtcgaggcagcgataagggcggcgagagtgacagctttgaacggcttgagagtgatcattttcga

SEQ ID NO: 1421 - DNA, 1028 bp, Unknown
  gut microbiota DNA sequence
gtgataattcgccgatttaaattccgatgtctttgtataaggaacatttcttccaaagggaatgccttttggctttatctggccatcaaaactatcaaggtcatacctggggcctttcccagcatccttaaatccccctccattcataacaaatccaccgcggcaattcaagttaccaatcagaacgttaagcgtgattacggagaaagcattaagaaagccgctgcctgacatcatgccgccatgagctatagcgcttgacttaacaccgtgtgacgtaaattcctgagcaagcttagcaatttgttcggccggcaccccgcatgctgctgagtattcgtgtattgaactgctgaaactttcttccttaagtagacggaaagccgatttaacgtgtaccttctcttcgccgatggtgatctcttttgatatatcgataagcgctggacctgatgcttgatctgtggattgcagactaccgtcttccatcacaacaacagaagcgtcctttcctccatcaagaccaaggtctgatgctctgacgtatttaccgtactttttatgtttttcgtcaattacgacaagccacgatgcgctcgaaaatgaggggaatcccagcctttttgcaacgccaatgttcggacagctaagaaactcgctatttatcctcttttggctgatcatccattggatcatgcccataaccagcgcgccatcggtacccggataaatgggaatccaattagcatttgccccgcttgctgcattggccgcattggtcattaccggatcaaccactacgtatgagagtttttgggttgatcttccttttgcaaccagttcagctgttctcttaaacgggttcccagcctgtcctggtgccgtaccaataaacagaataaattccgcattctcgaaatctggtttcccgtgcggcatttttttcatgtcaccgaaaatagcggcagaacctgagcgataagatccaccgcaccatgatcccggtgagtgtcaaatgatctttcgcc

SEQ ID NO: 1422 - DNA, 686 bp, Unknown
  gut microbiota DNA sequence
actccgcgtacattgcaaaactggcggcatgcccctgatggcgatggacggctcgaccggagcaattttacgagctcccggcaaatcccggaggatttgcgggagcagatcgtggagcgattctgtcgggaggatgtgcgcgatctcagcctgacgcaggctttctacaagcttctggatgaaaacaaggagtactggtgttctctctctacgctttaccgtcttttcagagcgcggggattgaacgcgcgccgcgctcccacccggaaagcccgtctccgcagcaggccgaccgcttacagcgcggagaagcctaatgaagtatggacctgggacatcacctatcttcgctccagcacttacacgggcaggttctactacgcgtacgtcattgtcgacgtctatagccgtatggttgtgagtgccagggtgttcgacgcagacaatgctgattttgccgtgcgctttctcggagatgccttcagaaaatatggaatcaggcccggacagcttgccgtgcactcagacaatggcgcgagcatgaaagccgcgcccactatggctttgcttgagaagaacggaattatcttctcgcacagccgtccgcgagtcagtaacgacaacccgtattctgagtcctttttccgtacgcttaagtacagcggcgattgcctgtatccccgaga

SEQ ID NO: 1423 - DNA, 538 bp, Unknown
  gut microbiota DNA sequence
gttgacaattgtgttaattagatttattaagctcgcggattcttaatggaaacaattcgccggcacccctttcgctccgggcttgcaacagaatacgctaccgcttagtggatattcctcaagctgttcctcactcaatccagcacgggcggtcgttatataaagcgtgtcgagcttatcccctccaaaagcgcatgacgctacgtggggggccggtacgacaatttttgtcaacaggtcgccggtatagggattgtaacaataaacaccgccacctccccattgagccacccaaaggttgtcgttgcaatctatcgtcattccatccggggagccggtgccctcgggtatatttacggctacgccatcgtacaatatgtcaccggagctatcgtcataccggaaacgtatgatcttacgggtaggtgtgtcgttgtaatacatgtatttcttgttggcggaccatacgatcccattggagatcgtgacttttgtcaacttagtttcgacggttccgtctgcccatacacaataaagg

SEQ ID NO: 1424 - DNA, 628 bp, Unknown
  gut microbiota DNA sequence
aagaagtgcccaaagccaccacctaagaagggagcagcacctgtttgccaaaagagccagttgagaacctccgtacgttttgcgtgatcagttggaatgagttttccgaatttttcagccaagtaaagcaggatgttagctgattcaaagacacgaaccggttggtcttcagagtaatccatcatggctggaatctttgagtttggattgattgaaacaaagtcggatccgaattggtcaccgtcaccaatcttaatacgataagcgtcatagcctgcttgagtcacaccgagttctttcagttcttcaagcatgatagttgccttgataccattaggtgtcggaagagtatagagttggaaaggttggtcacctttaggtaaagtttgttcaaaacgtgcaccagctgtaggttgattgaggccgccccaggcacctcccatagaggttggattttgccaaacttctggtaaaatatagtcagacataaagtttctccttgtattcttgatagttacatcctaacaaaatgctaatggcatttcaagaatctactacgtcctattaggtgcgacaccttgactttttctataagaatgataagatagtaaaaattaatttttatctg

SEQ ID NO: 1425 - DNA, 140 bp, Unknown
  gut microbiota DNA sequence
gcggaagcctgggcttcatgctgtctcttgtctacggcatccgggtgtttgctgaaccattcggcccatgcatccacagtggatgcgagatagccgtgtttacggcagtattgaccgaagtcagtctcgctcaggaatgc

SEQ ID NO: 1426 - DNA, 137 bp, Unknown
  gut microbiota DNA sequence
tggtaaaacatgcgatattcgcaggagtttatagataacctcgtggcccgcattctgagcaaagagctccgaatctctgaagcctccgttcagtactcgataggcaaatcaacaatcaggtactggctcgagaaggc

SEQ ID NO: 1427 - DNA, 157 bp, Unknown
  gut microbiota DNA sequence
agactatgttcggttgttctttaacaattaggaaggaatgaaagttctaagtgcctggaatacttgatgagggtatttcagggcagttatgaacatgggttgtgattgcattcacaaatttgcaagtttctccaagaaaccgaagcaacatttagag

SEQ ID NO: 1428 - DNA, 515 bp, Unknown
  gut microbiota DNA sequence
cgtttgctcaaaggtgagcatatcggtcttgtcggtgctaacggtgaaggaaagtcaaccttcatgtctatcgttactggaaaattgcaaccagatgaaggtaaggtagagtggtctaagtatgttacagcgggttacttggatcagcatgcagttcttgaaaagggaatgacagttcgtgatgtccttcgtacggcttttgatgagctttttaaaactgaagaacgcatcaacgaaatttacatgtctatggctgaagagggtgctgatgttgatgctctgatggaagaagtaggagagcttcaggatcgcttggaaacgcgtgatttctatacattagatgctaagattgatgaggttgctcgtgctcttggtgtcatggattttggtatggacacagatgtaacagacctttcaggtggtcaacgtaccaagattctcttggccaagttgctacttgaaaaaccagatatcttgcttctcgacgagccaaccaactatttggatgcagaaca

SEQ ID NO: 1429 - DNA, 1035 bp, Unknown
  gut microbiota DNA sequence
catgatggaggatccaggggagagagccggaagctcaagctccatccagccggcgcgggggccggagctcatcaggcggaggtccttagcgaatttggaaagcgtgcaggccacttccttcacgatgccggaaaccgtcaccacggtgtcgctgttctggaaaccgtcgaagaggttatccatcggggtaaccgtttcgccgagatcctcggaaatgaacttgtagaaagcgtccttgtagcccggggcgccggagagaccggttccgacggctgacccgcccatcacgatttcaaggcagtccgggcgcacgcgctcgagcttcttgatgagacggttgacgacagaggcgtagcccgagaattcctgaccgacggtcagcggcagagcgtcctgccagcaggtgcggccgaccttcacgacatccgcgaactcagcggacttcttctcaaaagccttcgcgagggtgcggagctcaccgatcagggcgtcgatccggggaacgatcgcgaggtgggtggcggaaggaatcgtgtcgttcgtcgactggcccatgttcacgtgggtgttcgggtgaaccttatcctgacccttgtggccggtgaggatctcgttcgccatgttgccgagcacttcattcacgttcatgttaaggcaggtgtaaccgccgccctgccagaaatcgagcgggaactccttatcgtaagaaccgtcaagcgtcttatcggcggcttcagcgatcgcttccgcgatctcaggatcgagagcgccgaccgaggcgttagcgcgggcggcagccttcttgatatgagccatcgcgcggaaaatgtccggatagaaaacgatcggcaggtgagcggcgcccgacaccttcttcatgcgggtcgtctgaatgccgtagtaacggtcattcgggatttccatttcaccgaggcagtcacgctcaatgcgggtatcagccattcttttctccttaggaatttggttgctgcatctccaatgactcccattttggagacagactcccaatccata

SEQ ID NO: 1430 - DNA, 402 bp, Unknown
  gut microbiota DNA sequence
cggggcggttaccgcctccgcctttcgctgagaaccatcctacggacgcgcgtctgtgaccgtgataaggtaaattgacagctaacgatggatttctgccaattcggatttctcacttatgacgccttatgaccttccgcttccggatgtggatccgccccctccggctcatcccgctcgccgcgccgcggtcatcgtgacccccggaaccatcacgtatctcctttcaatcccgtggctcgtcatgcagacgctgccgcctgagaaacaccggtggcttgtcacgctctgcgctgaggaacccgggaacatccgggcgctcggcgggattgacgtaccggtctccgcggggcttgaggcgctggatgacgcggataccgtcctgatgccgcactggacaga

SEQ ID NO: 1431 - DNA, 1912 bp, Unknown
  gut microbiota DNA sequence
ggcggggctgtgtctcggcgcatatccgctcgcctacgccggtattctcgacggtcaccgggcggtcacccactggcgttacgcccgggacttccgcgcgaggtttccccgggtggaactcgatcccaaggcgctttatatcgatgaccggaaccggattacgtctggcggcatcgcggccggcaacgactgctgcctctaccttctccgtaagcatgagggcgcggccgcggcgaacgacgtcgcccgcaatatgctgattccgccggtgcgggacggaggccaggcgcagtatatcgatgagccgctcgcccgcaccacaccgtccgcgcgcctcaacctcgcgatgcgttacgccgaggagcatctgagagaggaaatcaccgtggggactctcgcgcgggtcgcctcgatgtctcctcggaacttcgcccggagcttcaggaagttcgcgggcgaaacccccgctgcctggcttcgcatcctgagactccggaaagcggaagagctccttgaaaccaccgaccttccgatcgccgtgatcgcggaggacaccgggttccagtctccggtcactttccggcaggcctttcaggccgcgaagtcggtgtcgccgcaaagctaccggaagaccttccgggcagaggaaacagagcctgagagcggggaataaaaaatccccgaggctcgcgggagacccggagggatcggtgccgttcaggacgcagccgcgcgggccgcggcgaagaacctcaccgcttccgccgcggtacggcggaggttatctttcgcggtttcggggtccatcgcggaggcttcggtcgccggactcccgataatcgggaagaaagcgtcgatcccgagcgcgtggatcgtctcaggacgctctccaatcgagccgcagagttccaccgcgacgcactttggattcagccgcttcaggaaccgggcagcgcccgcgggggcttttccccgcgcggtctgagagtcaagccgcccttcacccgtgataaagagatcggcgtccgtgaggtttttggaggccccgatcgtttgaaggacgaggtcagtgccggacacgagttccgccccgagcgccgtccggaacgcgaacccgaggccgcctgccgcaccggcacccggggcttcagccgcgttctccgtccccatctgggtttcaatcaatcgcgagaaccggccgatcgcctcatccatttcggcgagcatatcgggggttccgcccttctgcggaccgaacacaaaggagcatccattctctccgcagagcggattcgtgacatcgcaggcgacgcggaagtggcacccgctcgtgagcttcagaaggtcacctagatccgcctccgtaacccgcttcacatcgtccccggtgccgccgacaagttccccgttcgcgtcaaaaaatcgggcgccgagtgactccatcatcccaagcccgcagacgttagtcgcgctcccgccgattccgatcacaaagtccttgatcccgcgggtgatcgcgtgccggatcaggtcaccgagcccggccgtcgtggtcttccggggattccggaagtacgccggcacctgcgtaagacccgcggcatccgcggcctcaatcagcgcggtaacgcggggcgtacccgaggcgtcttcgacgcagaccatgccgtatgaactttccacgagtgtcccgagcggtccccggaccaccacgggcaccatttcgccgccgagcgcgttcacgatagcggataccgtaccttcaccgccgtccgcaagcggcatcaggataatgtcggcgtcaggcagcgcgtccgtcgcccctttcgccgcggcctctcccgcctcaagagaagtaagcgatcctttaaacgaatccatcgcgatcacgattttcatagtccagtaactc

SEQ ID NO: 1432 - DNA, 451 bp, Unknown
  gut microbiota DNA sequence
gttttggtgactacgcgcctccaacaaataaagaaacaatgcagacagaaggataccaaccaaagcgattcctcctgccagaggactgtaaaatacaagaaacaatatcaagacgataactgtaatatagccattgacaacggtgttgaccatgttcatggcatacatttccataaacgaacagttcaaagggttccttctactctgaataggttaaaaatgctccatttggattttgaatttttatggaacaatagaaataggctctgctcctcacgatgaatgagatcattacttcaacaaaacaatttgcttcactttttggaagatgaataaaatgatttctgcaccaaaaccagttccatgaagcatggcaaccctttgaggaagagccatcttatttgtgtttttggccattgatattatcttctcttttaaataaacagtggtc

SEQ ID NO: 1433 - DNA, 1166 bp, Unknown
  gut microbiota DNA sequence
ctatgcggaaaccatcagctccctcgaatactccgaacatccggtgattcgcctcaccagtttcggcgtggacaccacgttgaccggccatgtgcagctcgacgcccagaacccggccgaattccgaggggatgaggccaaggcctcccaaggcatcgaaggcctgctcgatgccggcttccacgtcaccatcaccgccgctgcggccggcaccttggccaggctcaagcgtgcgatcaacactaccggcatcgccaatttcgacgtcatccgctctcaggccatcgacggcttcgtggacaaagccgccaaaatcgccctgctcaccgaacgcgacctgaccggccgcacttcagccgtggccgtggccaaaacgccgaaacgccggcgcaaggccatcgacttggtggagctcaaaaaaggcgattacgtggtgcacgagcagcacggcattggccggttcatcgaaatgcgtcagcgcatcatcggcaccggcgccaacaaaaccactcgcgaatacctggtcatcgaatatgcgccttccaagcgcggcgccccggcggacaaactgttcatccccaccgaccagctcgaccaggtcagcaaatacatcggcgccgaagcccccaagctcaacaagctcggcggctccgactgggcggccaccaaggccaaggcccgcaagcacgtccacgagatcgccgacgacctgatcaagctgtactccgcccgccagcgcgccaagggcttcgcgttcagcccggacaccccatggcagaaagagctggaagacgccttcccctatcaggaaaccgccgaccagctcaccaccatcgacgaagttaaatccgacatggaaaagcccgtgccgatggaccgcctcatctgcggcgacgtgggcttcggcaaaaccgaaatcgcactgcgtgccgccttcaaggccgtgcaggacggcaagcaggtggccgtgctcgtgcccaccacgctgcttgtccagcagcattacgagacgttcagcgaacgattcgagggtttcccggtcaatgtggcggccatgagccgattccagaccaccaaagagatcaacgaggccatcgaggggctggaaaccggcacggtggacgtggtcatcggcacgcacaagctgctgaacccgaaaatcaagt

SEQ ID NO: 1434 - DNA, 20415 bp, Unknown
  gut microbiota DNA sequence
gccaccgctttgtggggcttacggcccgtaatattcatattattttgtgtttacatagcacaaaaaatgtgctaaatttttatgtaaagtacagtctcaaatgactgtaaataagacataaggtggttgatagaatggtactggcagttgagataatagtctgctgcttaatatttggcatatacagagtaatacggataaagcgggatccggcatataagataagcaatatgcccgagaagctgcagaaaaaggtcatgcatatgcgcggctacagaaatcggaatatccgtatcatgacagactgggagaagtttgtaaagaagcttccgacacttatattctggacgatagcgcttgtcatactgacatcgatagcaggggcaacaagcttttcaacgggctttgtgtttgcgcttttgatatggatggcagttctattgtttcttgaactggtagtatactgtggctggtatgcacatacaccgaaggtgtggataaagggcaccgaggatatggcgaaaaagacatataccaattatgcacattatatcgggctgataccacagagagctctgatgggaatagtggttgctattatagtgggtcttgtgatagatatgattccaaggcttgacaacaacaattattcgccgaaatatacagagatagaggataccttaaaggcggcctgtgacaattacaggattccgggcatggctgttgaggtggtagatgcagagggcgtgcttttctccggtacatatggggattgcaagagccttgacacgccgtttatcaccggttcactcagcaagtcgtttactgcggcatgcatcatgaagctgtatgagggaggacatctgaatattgacagcccggtaaatccttatctggatgcagctgaggtattcaaaaatccaaaggatgcgacaaggattacaataagacagctgctcaatcataccagtggacttggcgtgtaccagcatgtgggaaatgcaaagattgttggcaaaaatggagaatatacctatgcgaatgtcaattatgacatacttggtcttatagtggaaaaagtatcaggtgttagctacagcgattatctgacaacgacattttttacaccacttggcatgactcacagcagcgcagcctatgcaaaagcgaaggaggatggtctgattacaggccacaacaattatttcggtttttctgtggaaagcgatgtgaagtatccgctcagcgattcgtggtccactgtaccggcgggctatattgcatcaagcgcaaatgatatgggaaaatatctgcagatgtatctgcgtggcggctatggaatactctctgacaagagccttagcacaatgtttcgggcaacagttcctatggatgagtcaggtgagacaggctatggtatgggctgggtacgttcggataaatatgtcgagacagtgtacaatcacacaggtctcacggaaaactatatcgcagacatgtatctgcttccggagagcggcgtgggtgttgtattcctcgcaaataccaatgactatatggtcacaaacaatctgatgaacaaggtaacctcaaaggttgtgatgacgcttatgggatatgcaacagacgagcttgacccaaaggattatgtcgatgcgcacctgttctatgaccttgtttttgcagcatttatattggttgcgctgatggagattatcaagtcgcacaaatggagaacagacaatagcggaaacctgatagcgaatatttttctgcatctgtttttgccggtgggcatagttattgcgcctattgtcggaggcataccatactgggtaataaaggattatgttcctgatttgtttattgtttcatgcctgagtgtagtacttcttgcaataggtggaatcctgaagcttaaaaacaggagaaattcataagataaaagcagaagaaatagaaatgcggctactgtaatatgtagccgcataattttttgaccatagcatcgtgggaggagtcacagcacactccgacagtacatgaagagtataagccggaggctttgacaaattcattgtcatctgctgaaagcctgataccacaaggatattccttaccatctattgtcacatatgcaagcctgtccttatatttttcaaggacggctttatccagatatttgcttatatcttcaaagcagacatttttggcgtaataatcaaaggtcttatcatccataaagcatatatcgtattcgttagaagcaaagtatgctgtgaggactgccatgttctgatagtctaggccgcttttgtctacatcgacacagatatttttgtttaaggcaatttcatcctttgacaaatcatagccgttatctgtgagaaagtcattgaaaatatcggcgccgctgtcctctgtggtgctgttttctgcatttacgcataatacgctcaaaacagtatttttctgcgcaagccggccgcaaataaaggttgtgactgctatgattccgataatgacaagaaatatcggtattttgtaatagtcccatatatattgtattttctgactgaatgtcagctccttaaaaggtgtcttttgttccatgattttatctccctctgatatgatgtgctgtagtttaaaaatattataaggtaatttatagaaatttaccaataaacattctattaactgcctttttctttttagattattatgctataatgagccaaaacacagataatacaaaaggagaataatatgaaagcaagccacagaaaagatgttataatcgccagactgatttttgcagcaatatgtctttttcttattgccctgattgttacaatagtgattaccgttaattcaaagggcggcaaaaaaaaggagcaggacaaggtacaacagaatgcagttagcgaaagtgaaactgacagtgtcggcgatagtgatacggagataggcgccatatatctgccacagcagactacagagggtacagaaaaaacttacgtcaccactacaagcagtgtaaacatgagagagaagcctgataaaaacgcaaatatagttactgttatagcacaggatgtgaagcttgagtttgtatcagaggacaatggctggacacaggttatcttccagggacagacaggctatgtcagctctgactacgtcaagtcagatatggctgacagcactacagacagcggcacatcaggtgcggcagatagcggggctgccagtcagggtacagcagatggcagtacaacaggagctgcagatagtgctgcacagtcacagtaatagatacgtggtgaggtaatgtatatgacaggaattatatgggcatgtgctgcaacgtttattgcagcatgtgtgcctattttggccaaggttggaactaaaaagacagacccggcgctggcgggaagcattgcagggattgttttatgtgcgtctatatatttttacaggaaagataatataatgggaagcagcctgattgcactcggccaaaggagcgttatatttatacttctggcagggcttgcaacagggctttttggcatctgtttttttaaatccatacatgagggctacacatttcaggttacagctatagttaaatgcagctatataatcacgcttgcagcgggattttttctgtttcataacactcatgacacttttgactatatagcgattgcactcatgattgctggaacggttattttaaatctggatggaaccggtattttgtttgcgcttcttgctgcagtttgtgcgtcggcagcacatattctggtgtcacttggcgggatacagccggataagggctttattgcgttctggtgtgtgtttataggaacgctggtgcttattatatttactattgcaacaggaggcatgaagaaaatcagatccatgtcatttgttgatggtatatgcctgattcttgcaggcattgcatacccgttagcatatgatttttatggcagggcagtttcaatgtccggcagctatgcagggtatatttttaatttgacgattattgtgatgatgatatgctccagcgtgatactgaaggagaaggtatcgggaaagaaattcctgggcgcatgcatttttattgcagcattgtttgttatagcatgcaactaatagctgaatatagcatataatgattaaaaagaggttttttgatgttacctttttataaaacatttccgtttatggattactataaaaatgaggatgcatttgcaaaggacctggggatgataaaggatatgtatccgcttgatacggcgatgatacagtccgcagtagagcagcgcatggatgagctggagtttgagggcagctttatctatgatgaggtgcctgacaggcagcgtcttttcgatgaggcagacaggattgccggcagatttatctcagagcaaagcagcaggtgctttatctgtacaatagcgggcatactttttaactgtgaactctgcagacgcagatgcagatacagaaggtaccaaagattctggtagatataaggatatgattttatgagtaagaaagtgataaagccgatagtacttatagtagtatttattgcagcattaattacattttgcataactacaaacaagggaaataaggatatgaccacgaagcaggcggatgcaacgctgccggttatgtcatttaatctggataaaataaagataaacaccctccatggatatactactgagatggatccgacaaagatgcgcgattgcgttattccgatttcggatgacaggaagctctcattatccatttcaacatatggtatggctgttgacagaatatcatataagatcagaagcatggatggcaagaggctggtggccgatgacgagatatcttctttttctaataaggataatactattcaggcggacgtaaacatgccgaatgttatggatgaaaatactgagtatcttttggtgtttaccatcacaagcggtcaggataatgtatattattacagcaggattatgcagaccgatggaaaggcagctgcaaaggttgttgagtttgcaaagaagtttcatgatgagacgtttataaaggatgacaaatcattctttacaacatatatggagacaacaaccggtgacagaaatacgcttgcacatgtggatctgacatctacggtgagtcagattacctggggctcaatggccgctgcacagtatacgaatcctgtcatagccctaaaggaaataaacgattcttatgatgtggttacaatagactatgtgatgagctgtgtggacggtaagggtgagactgagtattacaatgtgagagaatatttcaggctgcgccagacggaaagccgtatgtacgtgctcaactatgagagaacggcaaatcagatttttaacagtgaaaacagctttatatcggattcaggcagcgtaatgcttggcatcagaagcagtgaggcagagtacagggccaatgaagcaggcagtgtgatatgctttgtccaggagggagatttatactcctatgatatcaacaatggaatgataatcaaggtattcagcttcagggacgctgagggcattgatgagcgtgagaactggaatcatcacgatataaagattgtcagtgtagacgaagcgggcagtattgattttgtggtatacggatatatgaacagaggcacccacgagggagaggtgggaaccggtgtgtaccattatgacggtctggcacatactatagatgaggaagcgtttattccttctaagacatcatatgaggtactaaaggctgagatgggcaagatgctttatctcaatgagaagaatgaattctatctcatgatggatgacagtctctataggattaatttaggttcgatgtcagtaaagaaggtggttgagggcttgtctacaggctcttactgcgcatcggagagtaacagatactttgcatgggtggattctgcaaatcagtactcatcaaataccataaaagtgatggatttaaagagtggcaagacctttgaggtcaaaaaaggcgacgaccagtatctgcgtccgcttggcttcataggtgaggatttcatatatggacaggcgaatgctgctgatgtggtctctgatgcagccggaaacacgacatttcctatgaatggccttattattcttgatacatctgaccagtcggagcttaagacatataccccttcgggcggctatgtcgagaaaatttctgtggatggatatacggtaacgatagatctgattgcgcaaaacaatggtgtgtatgcagaaatcggtcaggataccattatgaaccgggaggctgattcgaagcagaagatagctcttgatacgagccagtccgatacaaagctgacggtcagcgctattagtatagcaggtggtaaaaagccggataagctgaagcagctgacagcacagatgactataaattcgcatgatactgctgttgatttaaagtttgatgacaatacagtccatttctatgtttatgcaaagggggatgtgatttttgcatctgataacatctcggatgccataaaacaggcaaatgacagtatgggagtggtaattgactcaaaccagcagtatgtatggatgagggcaagaaaaaatgcagtaaatgcatttgcgaatattgcatgtaatgaaatcgataaggatgctgacagtgtcgtgaagtcagtaagtgcaatgcttacctacaatgatgttacggtaagtgtgtctgagctgattggagcaggcagcagtgctgttgatgtgctcaaaaacaacctgccggacaaggaaatcctggatttacagggagtgtcttctgaggatattatcttttatatcagccagggcaatccggtatttgcgatgacgggaaatacgtcggcagtgcttgtgacaggatactcttcaaatggagctttatatatttataatccggataatggcgcaacaacatcgatgagctatgaggatgctgacagaatgttttataatggtggcttgcattttatcacgtacatgacaaaataaacagaataatgttgtaataatgccgattttgtgacattaaatgtaagctccttaggtaaagtttaacagaaattttcataaggattgaaaagcggttacaattgggatatattaaataagtatgaaacaggtttaatactttttgtttaaggagaacgtatgagtaagaagagtattgtcgttacaaaagtatgtgaaggtcatgataatccaatcgcagagcttgttcaagtggcatgcaagttcgatagtgagattacattggagagtgacaatcgcaaaatcaatgcaaaaagcatcatgggtattatggcatttaatccttcagatggaatgtctgttgatattgttacaaagggtgatgatgagcaggaagctttagttgcaattgaaaattttttagtatgtgaataatgagcatgaggaggaaaatagtatgcgtaaaaagaataactcaaagacagttaagcaggcagtaaagccggttgaagttaaaaaagaggaaacagtggcacagccggtttcagagcctaaggctgatgcaaaagccgatgtaaaggctgaggtagaaaaagccgtagagaagacaactgagaaggttgagaaggctgttgaaaagacaactgagaaggttgctgagaaggccgctgaggttaaggcggatgtaaaggacactgttaagaagacaacagcaaaggcagcaaaagctgcaaagacagctaaagaggcaaaacctgcaaagaaggagccggtaaagccggagattattgttcagtaccagaacagcgaggttgatacagcagctgtcgaggagcgtgttaaggctcagttcgttgctgagggacacaaggcaggcttcatcagaaagcttaacatctacatcaagccggaagagtattctgcatactatgttataaatgataagttttcaggtcgtgtagatttattctagtcagacattattagggaatacatattttatctagcgcataataaaagccgatacatttcgtggagacacggtgtatcggcttttgttttgtgtataagtatgtgtaaaagcagctgtatgacagtttaaatgcataaatacttagtggacaaacaaaaaagggtaacaaaaaagcgggtgatgggaatcgaacccacgtatccagcttggaaggctggtgttctaccattgaactacacccgcataggaatatttaatttgttgtataatgcccagttccggaatcgaaccagagacacacggattttcagtccgttgctctaccaactgagctaactgggcttgcctcacaacaaaaattattctacacgatttgtcttttgatgtcaatattaaaattgagaaaatttggatagttacaataaataaggaatgtagtattaaaaactatataaaatagaaaatgatataattttatcttgacatgaataccttaaagggctactatgtatatatgtttgattatcaaataatttgaatatcaaacataaaaatgaaatttatacatgttcggaggtacatattatgttgagagaactgagaatcggagatatggttgcaaagcttcctatcattcagggaggtatgggagttggagtgagtcttagcagactggccggagctgttgctaaggagggtggtgtaggagtgatttccaccgcgcagattggctttgaggagccggagtttgaaaaggaccaggcaaaggctaatctgattgctatcaagaagcatattaagaaagcaaaggagcttgcctgtggacatggaatggtaggagtcaatatcatggtggctttaaagcattacaaggagcatgttctggctgcggttgaagcaggtgctgatgttattataagcggggcaggacttccaatggaactgcctgagctggtcgatgaaaagtcacatacaaggattgctccgattgtttcttcaaagagagcagcaaatctgattcttaaaatgtgggcacacagatacaaccgcacagcggactttattgttatcgagggaccaaaggccggaggacatctgggattttccaatgaacagcttgcagatatggagcatatggattatgacagcgagattaaggagattatcagctgtgcaaaggcatatgaggagaagtttaaaaagcacattccggtaattgtagcaggcggagtgtttacacatgaggatgtcatgcactgcatggagcttggagccgacggagtgcaggtggcgagccgttttgtggcgacagaggagtgtgacgcatctgatgcctataagcatgcttatctgaacgcgaatgagtctgatgtgcagattatacaaagcccggtcggaatgccggggcgtgctgtcagaaatgagtttatcaggggtttggaaaagaaaaagcagcctatcacaaagtgctacaattgtcttgagaaatgtaaccctgcaacagtgccgtactgtattacgaaggcactgattgcagcggttaaaggagatatgcaaaacggtctggtattctgcggtgccaatgtgggccgcataaaccggatgactacggtccacgagcttatgagtgagcttgtgggagcataggcagtacatcctcacagtagcagcgaagcacttcacctacactccatgcctgcgcatagcagccacggccggtgtgaggggcatcgccgtcaaatatctcgcatattgagccgatacagttgttgagcagatgctcccttacagggtcaagcagcttgtcagcgcataaagcggtcgccttcgtacggccgtttacctttacataggcactgataaaaccaccgagcagaaagccccaggctgttccctgatgataggcatggtcgcgctttgagagagagccgatgtaaatcggatggtaatccttgtggtcaggatcgagcgaacgcagtccgcagcctacgtacagcttatccattaccgtatccacaattgctttttcacgctccatgtcaggcatggtaaatggcaggcttacggcataaatctggtttggacggattgtatcgtcatcctcgtcaaccacatcatacaggcagcctgtgttttcattccagaagcgcttgttgaaggaagcctttacgagagaagcaagctgtctgtagctgtcatcgttatcgccaaacttagcctgaagcatatccatggtgcacagtgcgttgtaccaaagtgcatttatctcgacaggcttgccgtgacgaggcgtagcaacccagtcaccgacacgaacatccatccatgttacctggtcgagtccgcttccggcatgaatgagcccgtccgtgtccatatatatggaaaaatcagtgccttttttataagtagatatgatatcctttaagcatggataaatatccttctttataaattcataggcatcgggagtggacacatattcaagatatttgtagacagcataaaaataccacagtgatgcatctacagtattgtagagaggctcaagtccgctgtccgggaacatattcgggatgagcccgtccttacagtacttggcaaaggtcagtagtatatcgtgagctttttcaaaacggccggtgcaaagtgtcaggccagtgtatgaaatcatagtgtcacggccccagtctgtaaaccaaggaagtccggcgagcacagtgtcatagcctgttgactgtctgtgtgcgatgaactggtttgcagccacagtaagcttcacggcaaagtcatcagtgaagccgcttcttttaatcagctcatcggtgtagtcaagctgcgcatgtagtatttcaaaagcactttcgttatcagaaacaaggtgtttggcgaaggctgaacctgcgttgccgttacaggcttcaagtggtacgatatcgcacattacagaaaaatgcattgattcaccggcaggaatatccacgctcacgtcatatgggcaaaatgcacagtcgaggccaggcacttcattgtccacctcggtctgagcctcaaggtcacagatatatttgtcgtctctttcagtaagctccccgcctgaaaaagcaatgcggatacagtggtcatcatgagcttttgggatgagactaaagccatgctcctgcttttggacctcgaattttaatgaatcgacggtggaactttcagagtgctcacggaagttcataagaggcgtgataaaaagcttagacgcttcgcctttgttttgaatctcatatgccacggcagcgagattttttccctgtgccagtgcgatgtgtttttttatggtgatatcaccggcctcatatgtaaagcatatggttccatcgtatgtgaactctcttatatattggatgccgtctgtgtggcatccgcccttgaactggtcacttgagagatcataggtgtggctgtctgtgactattttttcgtttgtctttgagaagcagacatatctttgcacaggagagcggagacttgcaatcagatagccctgatgcgtacggtttatcgcaccggtgactgaaccgccggcatatccgccaaggccgttggttaaagcccactcccttcttatgttgtttttgaaatcattttgcagttttaagttaaattgcatcttaaccctccgaaatttcactaaatttttataatattttaacctataaccatgaaaaaatctatacgaaacggcaaaaatctgttatcattataaagatatatattttcaatatgcaaaggagaattataatggaagtatttacattgattgcgcgtaaaaaaaatgtggcgctggtatttgtttcgtacctgcttgtggctcttgctgcgataagtcttctgactatctgcatcggctttgcaccgggtattttatttgcagtagtatttggacttattgcatatcttatgataatggcacagaacaccgagtttgaatattcatattttgacggagagctgcgctttgccaaaattaaaaacaagagccgcagaaagcgccttggaatatacagcatggagtctgtagcagcaatcgcaccggcaggtgacagaagtgtatacaattacgagaatggaaatgagatcaagaaaatagactatacctcaggtcagaaggatgtaccttattatgatatcgtcatcaaatcgcctgatgagaacgtacttataaaggcggagcttgatgacaagttcctcacagaggttgagaaaaaatacagatcaaaggttaaaagaagagaggagtaattactcctctccttccaaatggtacattttggattttgttttgccggcatcgtatccggttgagtatcctttgttgccgtttaacagtctcagacatttgggacaaagagtgccgaaggtaacaggtgcaccgcaccgctggcagtgaagaccggctatagtggaggctgattcagactgcttgtactcgatgcgtccgtcctttatccagctctttacctgtctaagcggtatcttaaaatgttctgcaacctcgtattcatttacgtcgtgggtacggataaattcctttacctcgcggaataatgccagatcaaggcatcgtgggcagagattctctttatagtcatgtggcagaggccttttacagttttcacatacttttgtgttgttgttaaaaagacttttaggattatccataggcgcctccttaagcttgttttattcattatatcataacagattttataaagaaagtagggacttttataatgtcaattgcagttttcgattcaggagtcggcggaataagcgtcttaaagagcctggttgaagtgatgcctaacgaagattttatatattatggtgattcagcaaatgcgccttatggtaccaaaacacttgagcaggtgcgagctttgacctgtgagcatgcaaaggagctgattttaaatcagcatgcaaaggggcttgttgtcgcgtgcaatacagccaccagcgcggcagtgcgtatattaagagaacaatatcccgatgttcctatcgtagggatagagcctgcagtcaagcctgcgatgctttttatggaaaatccgagagtgcttgtgatggctacacctatgactatcagggaggaaaaacttaaaaagcttatggacagatacagacacttgggtgagattattccattgccttgtccgagacttatgaatttcgttgagagaggtgacttgtacggtgatgatgtgagacagtatctcgaggaacttttgtattcatattcgcatggtgagatagatgcggttgtgctgggatgcacacattatccgtttgtcagaaaaatgatacaggaggtgcttggagatagggtgcgtgtgttcgatggaggaaacggtacagcgcgtgagatgaaaagacgtctcgcagaaaaaggtctgctgacagacagcaccgctgcaggtattgtggattttcaaaacagcctgaccggacagagccatgaggataaaatacagctctgtaaggcactttttgacaaaaaaatttagttgttatttacaaaatattacaaatctaaaaaaagtataaaataatcacgacctttttaataaaatatttctaaaatgtacattgttaggacataattaccacatatacttatatctgtaagaggaacaaaaccttttacattattccctttttattaataaacattttcataactaaactcctcgagaaaggatcgcgttgttaccgcgtgtaacatcgcggtcctttctcacgttttgcatgcaggctgcggagccgcagccttactgttttagttatgcacaacgcttccacatatatcgttcagcacacacatgtcacagtgcggtgtggttcgggcagtgcatacggcgcgtccatgatcaaccagcctgtggcagaagtcattgctctcctcgggtgggatgattttccaaagctccatctccacttttttcgggtcctttattccatctacaagtcctatacggttgcaaaggcgtatgcagtgtgtgtcggtgacgatggcaggcttgccgtacacatcacccataatcaggttggcactctttctgccgactcccggcagcttcagcagatcggtcatattgtcaggcacaagaccgccaaaatcatcgcgaagcattctcatgcaggcacttatatcacgtgccttactctttcccaggccgcatggacgtacaatttcttctatgtcggaaacatcagcatcggcgagagcctcgatggaaggatattttttgaacaaatccaccacgactacatttacgcgggcatcagtgcactgggctgcgagcctgactgatacgaggagcttccaggcctcgtcgtactcaagagtgcaatcggtgcgaggatatgcggtttttagtctttttattacttcaatggctaatttttcttttgtcatatgattctccttatatttgttttgtaactattcagcaactttattttatagtatacaaaaatgcgcggagattgtaaaatggatttacgtggagcggattacgtgagaggaacggtgtggaactggaaaatatgaataacgcatatgcaaataaaaaatgtacaaataacatatatataaacaacagatatgcaatagaagtaactaggaaaagaataaaaaacatgtatcttcgtgtgaaggacacggatggcacactatcagtgaatgctccttatggcatgagtgatacagaaatcagaaaatttgtggagagcaaatcagactggattgagcggaccatgcaggaaatgcttgtcgcaagacaacttaaggaacaggaaccggttttggcgccattcatggagagagagctgcgcaggaagcttaaaatgcagctgcagaggcttatcgacaaatgggagccggttatgggagttaagtcagccggctttacgataaagaagatgaagacaaggtggggatcatgcaacgttaagtcacatcatctgaatttcaaccttctgctggctaaggtgccgtcggagtgcgcagagtatgtggtggttcacgagcttacacatctgcttgagccaagccataatgccaggttctggtcgctgatggaatattatctgccggaaagcaaaaagctgcgtaaacaacttgctggcttttctgcgcaggatatgatatgatattattaaagactcacttagagaaaggaagcttcaaatggaattttgggatatatacgataaggataaaaagccgacaggccgtacaatgaaaaaaaacgactggatacttaaggatggagagtatcatctttcagtgcttggcgtgattcacagacctgatggcagattccttatcacacagcgtgtcatgacaaaggcatgggcaccgggttggtgggaggtttcaggaggagctgcacaggcaggtgagagctcatttaccgcagtctgcagagaggtgaaagaagaggtgggccttgatgtatcacagtgtccgggagggcttgcctatacctatcacagagagaatccgggcgagggtgacaactatttcgtggatgtttaccgctttgagcttgatttcaaggagtctgacgtacagattcagacagaggaggcacttgggtttaaaattgccacactcgatgaaataaaagagcttgctgcgcagggagtgttcctgcactatgacagcataaagcaggtatttgaaagttaattgctatgattatgataataagataacatagaattataagattacatagaattataaggagcagattatggcattaccaaaggatccggttatgctgcttagctttgtaaacacacagcttcgggacaattattcaggattgaaggagcttgcggcagcatatgatattgatgagaaagagctttgcgacaagcttgcacagattgattacaaatatgacgagactgtcaatcagtttaagtagattttcagcatacatattaaaagtgatggaaggataagataatggagacatgctgcgatttttgtgcatacaatgaatatgatgaggatgatgaggaatattattgctcggtaaatatggacgaggatgatatggcgagatttgtccagagcagctataagcgctgtccgttttaccgctcaggcgatgaatacagggttgtccgtcaccagatgtgaagcattataacaaaatataataaatataattaaaaaataaattgcattaatcaatttaaggctgtataataagttggttattttaaaaattaagaatttacaaatatacaaagcatattgataaggaggaaaattatgcctgtaaaatacgtgttcgtcaccggtggagttgtttccggtcttggaaaaggaattaccgcagcgtctcttggacgtcttttaaaagctcgtggatacaaggtgacaatgcagaagttcgatccatacattaatattgatccgggtaccatgaaccctattcagcacggagaggtgtttgtaacagacgatggagctgagacagatcttgacctgggacactatgagcgttttattgatgagagcctgacaaagaactcaaacgtcaccacaggaaaggtatactggtcagtattacagaaggaacgtcgtggtgactacggcggaggaacagtacaggttatccctcatatcaccaatgagataaagagcagattctacagggatttcacatctgaggataccacaatcgcaatcatcgaggtgggcggtacagtcggagatatcgagagtcagccgttcctcgaggcaatcagacagttccagcatgaggtgggacacgacaatgccatcctgtgccatgtgacactgattccatacatcaaggcgtcaggagagctcaagacaaagcctacacaggcaagtgtaaaggagcttcagggcatgggaatccagccggatatcattgtgtgccgttcagagcatgagcttgatcagaagcttaaggacaagattgcgctgttttgtaatgtaccgaattcacacgtattacagaaccttgatgtggagtatctctatgaggcaccacttgccatggagcaggagaatcttgcaaaggttgcatgtgagtgcttgaatctcgactgtcctgagccggatcttgcagactggaagcagatggttgaggatctccgtcatcctgataaagaggtcaagatcgcacttgtcggaaaatatacagcacttcacgatgcatacatttcagttgttgaggcattgaagcatggcggtattcctgagcataccacagttgatataaagtgggttgactcagaggagcttaatgatgacaatgcagcagaggtattcaagggtattcagggaattatcgttccgggaggctttggagaccgtggtgttgagggcatgattgcagcagctaagtatgccagggaaaacaatatcccatatctgggactctgccttggaatgcaggtggcaatcatcgagtatgcgcgccacgtatgtatgttccatgatgcacacagtatagagcttgatccgaacactactcatccggttatcgcacttatgcctgaccagaacggaatagaggatatcggaggtacacttagacttggatcttatccatgtgtcctcgacaagacatcaaaggcatatcaggtatatggcacagagaatataagcgagcgtcatcgtcaccgttatgaggtcaacaatgactacagaacagctctcacagagcatggcatgaagctttgcggtacatcaccggatggcagaatcgtggagatgattgagattccggagcatccgtggtttattgccacacaggcacatcctgagcttaagtcacgtccgaaccgtccacatccgcttttccatggtttcatagaggcggcaaacaaggtgaacagataatttttcgttatatttaatacaatatttagaaagtgcggttgattttgaccgcactttttcttataataaagttaagcttcacactttatatatggtgaggagacggtttcatatacaatatattccttggaaaataagaagtctgtaatgatatttttcggggatagggtttcatgggaatgactataaaaattataggtcaaaattgccttgaagcttgtaataaataagaaaagaacggagaaaatatggataatcagggacctaataactataattacaacaatggcccgggcaataatgggtccggtggaaacggaaataacggtggtaacagacctggtggaaacggtggcagaaacaaccgtggcggacagggtatcatggcatttatcctgctgacactcgtggcattgtttgtgtatgcacttatatcaaacagcatatcgcatgccagcacacaggaaaagtcatacagtgatttcataaaacagcttgataagggtaatgtcaagagcgtggagtttgattcctacgagatagactacaagcttgtggatgacggacacaaggattatgacatcacatattacacaggccgtgtggctgatgatgagcttgtgccgacactcaaaaaagcaaagacctcagagggcgagtctattgagataaaggcagcgatacctgataatacatctacatggatttttaatatattaagctttatagttccgcttattttactgtgggtgcttttggcatttgtttcaaagaagatgggcggcagcatggggatgggagtcggcaaatcgactgccaaggtatatgtggagaagtccacaggcgtcaacttcaaggatgttgcgggacaggatgaagccaaggaatctctccaggaggttgttgatttccttcacaatcctaagagatatacagatatcggagccaagcttcctaagggagcgcttctcgtgggacctccgggaacaggtaagacactccttgccaaggcagtagcaggagaggcaggagtaccgtttttctcacttgcaggttcagactttgtggagatgtttgtcggagtcggagcttcgagagtgcgtgatttgttcaaggaagcacaaaagatggcaccatgtattatctttatcgatgagatagatgcaataggaaagagccgtgacagcagatacggcggtggcaatgacgagcgtgagcagacattaaaccagctccttgcagagatggatggctttgatacatcaaaaggattacttatattagcagcaactaaccgccctgaggtgcttgataaggcacttcttcgtccgggacgttttgacagaagaatcattgttgacaagcctgacttaaagggacgtctggagaccttaaaggtacactcaaaggatgtcaagatggatgagtcggtagaccttgatgcactggcacttgccacagcaggacttgtgggctcagaccttgccaatatgattaatgaggctgccatcaatgcagtcaaaaacggcagacagcttgtaaaccagtcagatctctttgaggccttcgagcttgtagcagtcggtggcaaggaaaagaaggatcgtgtcatgagcgataaagagagaaaaatcgtctcataccatgaggttggacatgcacttgtatcagccctgcagaaaaacacagagcctgtacagaaaatcacaatcgtaccacgtaccatgggcgcactcggatatacactccagacacctgaagaggagaaataccttgagacaaaggatgaacttctcgccaaaatcacaacatatatggcaggtcgtgcagcagaggtgctggtatttaactcagtcacaagcggagccgcaaatgatatagaaaatgccacaaagatagcccgtgccatggtaactatgtacggaatgtcagataaattcggcatgatgtgccttgcaacagtacaaaaccagtacttagagggcggagcaggattaatctgcggagagaatacagcatcgcagatagatgatgaggtactctcaatcataaacagcagctacgcagaggccatgaagctcctcgatgaaaacagagaaatcctcgacagtatatcagattatctctaccagaaggaaacaatcacaggtaaggaattcatgaagatgttccgcgatatgaagggactccctgacccggacgaggaaaaagatggtgaagagagcaaagaacaggaaaatgcacagaatgatgcacagaaagatacgacatcagcagcagatccactccttcgtaatgccacagaccagcctgcagatacaaatgaatcttccgaatatacagcgccggatgatacatctaataattagtaccttaatcagcgttaaagatatttaatctctgaacgc

SEQ ID NO: 1435 - DNA, 65162 bp, Unknown
  gut microbiota DNA sequence
aggtaagcaagcgagttttgaaaaaaacaagctaccagcaaccaagcaattttcgcgtagcgaaagagcgaaaaaagaatttcgcacaaaaaaagcgcagtagaaaagagtttcgcacacataaactgaaaaaagccggagggtacacagtgtattcctcaggaaaatatgaactgccgcgggcttccagataagagaagggacgaaaaagccttgcaaacaaagaaaaccaaacggagagaaaacccgcggctgacttcatattttcctgaggaatacactgtgtgccatgccggcaacctcacaacctgaaagtgcgaaacttcaccacaacctaaaatagcgaatatggaaaaaacatttgatatcaaagaagagttaaaaaaactcccggatgccccgggagtttatattatgcatgacaaggatgatgtaatcatatatatcggcaaagccaaaagcctgacgaagagagtacatcagtactttcaggcgagccacaatgagggcatcaagaaaaaacagatggtagagcatatagatcattttgagtatatagtcaccgactctgaacttgaggcccttgttttggagtgcaacctgataaaggagcatacaccaaagtacaatactatgcttcgtgatgacaagacatatccgtacatcaaggtgacactgggagaggactatccgagggtgctgttttcgcgtcagatgaaaaaggacaaatcccgttactttggtccgtatacgagtgcctctgcggtgaaaagctcgatagatctgataaacaaaatctataagcttcgcacctgcaaccgcaggctgccgcgtgatataggagcagaccggccgtgcctcaactatcatatacaccagtgcaatgcaccatgccaggggtatgtgacgaaggaagagtatgctatatctgtaaagggcgcgatagatttcttaaacggcgactatgagcagacaataaaggctcttagcgataaaatgctaaaggcttcagagagcatggagtttgagaaggcggctgaatacagggatttgataaacagtgtgaaacaggtagcgcagaagcagaagataacaaatgccgacggcgaggataaggatatcatagcacttgcaaatgacgatactgatgcagtagtgcaggtatttttcataagaaacggaaagctgataggcagagaccatttccatgtgagggttggaagcgaggaggctgcggatgatgtgttaaataactttgtgaagcagttttattccggaacaccttttataccgcgcgaggtcatgctgcagagcgagatagaggatatggctgttttggagcagtggctcagcgaaaagcgaggcaggcgggtgaatataaaagtgccgcagaagggcatgaaggaaaagcttgttgagcttgcctataagaacgcactcttagtgctcagccaggataaggagcggataaagagagaagaggggcgcacaataggagctgtaaaggaaatcgagggacttttgggcttacatggattaaatcgtatggaggcctatgatatttccaatatcaacggctttgagaccgtcggctccatgatagtgtatgagaagggcaagcctaaaaagagcgattacagaaagtttaagctacgcacagttacgggacctgatgattatgcgtcaatgcacgaggtgctcacacgccgctttacacatggcatggaagaacagaagcagcttgaaaaagatggttctccacaggaaataggcagcttcaaccgttttccggatattataatgatggatggtggaagaggtcaggtaaatatatgccttcaggtgctttctgagctgggactcgacatacctgtgtgtggcatggtgaaggatgatttccaccgcacaagaggtctttattacaacaatgtggagatacctatcgaccgccacggcgaaggcttcaagctcatcacgagaatacaggatgaggcacaccgctttgcaatagagtttcataggtcactgcgctcaaagagtcaggtacattcggtgcttgatgatattgaaggcatagggccggcacgcagaaaggcgcttatgcgccgttaccagtcgctagagaagataaaggaagcagatgtcgaagaccttatgcagacagagaccatgaacgaaaaagcagcacaggcagtgtatgcatttttccactctgccacgtagattttgaagctaatctgtggtatactaaaaaacaaatatacatcaagggggaccgcgaatggatgcattacactcagtatcagttgcaaaggtagcagaattgctcgatctcaacaatctcacaaaagagatgaacctaaaggagagggcgatagagtgctcggacgtcaacagaccggcgcttcagctctcaggatattttgatcattttgaggagagacgaatacagattatcggaaatgtagagtatacctatatagagaagatgagcgacagcgagaaaaaagagcgctatagccgcttcatggagtttgatataccatgtatcatcttctgcagagatttacagccggatgagatatttatggaagaggccagagagcacggtattccggtgctgtcaacaggtcgttccacatcaagctttatggctgagctcatctattgtcttggtgagcagctcgcaccatgcatcacagtgcacggcgtgctggtagatgtatacggcgagggagtaatgatcacaggcgagagcggtatcggaaagagtgaggctgcactcgagctcatcagacgaggacatcgtcttgtgacggatgatgtggtggaaatcagaaagatcaacgagcatacgctcatgggtacttcgcctgagattaccagacactttatagagcttcgtggcatcggaatcatcgatgtcaagacactttacggagtagagtgtgtaaaggaaaaacagcagatagacctcgtaatcaagctcgaggactggaaaaaggaggcagattacgacagactcggcctcgaggaagaatatgccgagtatctcggcaacaaggtagtgtgtcattcactgccaatcagaccgggacgtaatctggcggtcatcgtagagacagcagcagtcaatcacagacaaaaaaagatgggctacaatgcagctcaggagctgtatcgccgtgtccaggcaaatcttacaaaaaattcggaggtataataaatcatggcaatagaaaagaaaaacgcttgggagaaatatccccagggacctgaaagagaaaaattatttgcatttgcagaggattacagaaggttcatatccggctgcaagacagagcgcgagtgcacggctgcagtttatgctgacgccacaggacacggctttgtggaccttgatgagctcatcgagacaggaaagagcgtaaaggcaggagataagataatagcaaacaatatgggaaagggactggcgctgtttatcgtgggcagtaagcctcttgagaagggtatgaatatccttggagctcatattgattcacctagaatggacttaaagcaggtgcctttatacgaggacacagacatggcacttttagacacacattattatggcggcatcaagaaatatcagtgggttacactgccgcttgcacttcacggagtcatctgtaaaaaggatggcagcacagtgacagtcaatatcggagacaagccaaatgatcctgtagtgggtgtgagcgatctgcttattcatctgtcaggcgagcagatgggcaagaaggcttcagaggtcataaagggcgagagccttgatgtgctcattggaagcataccgggaccagaaaaggacgaggacgacaaggatatcaaggagagagtaaaggccaatatcctcacaatactttcacaggagtacggtgtggacgaggatgatttcctttcagcagagatagaggtggtacctgccggagaggcaagagactacggacttgacagaagtatgatcatgggttacggccacgacgacagagtgtgcgcatatccttcatacagagctatgcttgagatagagggcgcaccggaatatacaagtgtatgcctgctcgtggacaaagaggaaatcggctcagtgggagccagcggcatgcagtcacgcttttttgaaaactgtgtggcagaggtgatgaacctggcaggagactacagcgagcttgcagtcagacgtgcactgaaaaactcaaaggtactctcatcagacgtatcagcagcctttgacccgaattatccatcggttatggaaaagaagaactcggcatactttggaaagggccttgtattcaacaaatatacaggcgccagaggcaaatcaggctcaaacgatgccaacgcagagtatgttgcaaggcttagaaatatcatggatacagcagatgtttcattccagacagcagagcttggaaaggtagatgagggaggcggcggaacaatcgcatatatcctcgcaaactatgacatgaatgttattgacagcggtgtgccggtgctcaacatgcatgcgccatgggaaatcatcagcaaggtcgatttatatgaggcattcagaggctacattgcatttttgaaggaggcataggctaaaggaatataagatgaatcagacatttgtaaaaagtgtaacagaacaattgccgcagcttggtctcctgcaggatgagccgatgaaaaaacacacgacattccgcataggaggctcggcagattactatgcagagcctgatatgagtcaaatttcaaagcttatagagatggctaaggcatgtgatatgccggttacagtgataggaaacggaagcaatctgctggtaggagataagggcatcagaggccttgtaattggtattggaaaaggcctgtccgaaatcgatgtgacagaagctgtggcgcagcaaagcacagcgcaggacctcacagcacaagacaacggtcatatcatcacagccggcgccggggctatccttgcagcagtggcggcaaaggcagcggaggcatcgctttcaggtcttgagtttgcatcgggcatacccggaagtgttggaggcgcggtagtcatgaacgcaggagcctacggtggagagataaaggatgtcctaatcgatgccacagtgctcacagcagagggcgagctaaagactgtcacaagggatgagcttgacttatcctacaggcacagtatagtccaggaaaagggctatatagtgctgtcagccagattcaggctcacaccaaagcctaaggatgagataaagtcatatatggcagagcttcgcacaaagagagtggagaagcagccgcttgagtacccaagtgcaggcagcacctttaagagaccggagggctattttgcagggaagcttatcatggatgcaggtcttcgaggttacagcgtgggagatgcacaggtgtctcagaagcactgcggctttgtagtcaataagggcgaagccactgcagcggatgtcctgacactcataaaagacgtgcaggaaacagttttaaagcagtttggagtaaagctcgaaccggaagttaagatgattggagaattctagtgaaatttgtaatagtgacgggcatgtcaggtgccggaaaaagcacagcaatgaaaatgatggaggatatgggatatttttgtatagacaatctgcctatacagctattagataagctcatagacttttcaaataccttccacagtgatgtgtccaaggtggcagtcggcatagatgtgcgaaacggttcaggaattgatgcgattccacagacgctcgagcagctaaggcagaaaaattttccgtatgagatacttttcctcgatgctgaggatgaggtgcttgtaaagcgatacaaggagacgaggcgaaaccatcctctcgcaggcagtgagcgcatcaataagggcatcgtgcttgagagggaaaagctgcagtatttaaaggacaatgctgactatatcatagacacaagccagcttctcacaagggagcttaaaattgagctggaaaagatatttgtgcagaatgaggattacaaaaatctgtttatcacgatactgtccttcggcttcaagtatggcataccgtcagactctgatatagtcatggatgtgaggtttctgccaaatccctactatgtggacggactacgcgcgaaaaccggcaatgataaggagatacaggactatgtcatgcagtttccggaggcaaatgagtttatcgacaagcttgatgatatgataaagtttctcattccaaactatatctctgagggtaaaaaccagcttgttatatctataggctgcaccggaggcaagcaccgctcggtaacgcttgcaaacgagctgtacaagaggcttagcggctgtaatgactatggacttaagatagagcatcgcgacataggaaaggatgcattgagaggtaaataacatgtcattttccagtgatgtaaaggaagagctggcaaagcaggtatcaaagagcaggcactgtcagctcgctgagcttgcaggcatcatagagctttcgggccgtatcaatgaaaaaacaaagggacttgagctcgacaccgaaaacctgctgcttttaaataaatatgccacacttatgaagcgcgcctttggcacagataccacaaaggcgctggatgagcaggataccggaaagatacttgcagcgcttaaaatcacggcacagcctgtcaacagacagaccgcagacggactgcttcttatgcagacatgctgcaagagagcctttatcaggggagccttcatggcagcaggctcgataagcgaccccaacaaagcgtaccattttgagatagtgtgtcatacgaaagagcaggcgaagcagcttcaggagctcttgtgcggctttgatacggatgccaagatagtagagcgcaaggggcactatgtagtgtacataaaggagggcgcccacatcgtggacagtctcaacatcatggaggcgtatgtgtcactcatgaagctggaaaatgtgcgcatattaaaggaaatgcgcaacagtgtaaaccgtaaagtaaactgcgaaaccgcaaacatcagcaagactgtgaatgcggcagtaaagcagatagaggatatcagactgatacagaaaatgagaggactcgatgatttaccggcgcagcttcgggagatggcgctgcttcggcttgaatatccggatgcaccgctaaaggagctcggaggctatctggatccgccgatgggtaaatcgggagtcaaccacaggcttagaaaattatcggcgattgcggaggaactgagatagatgaagaaaaagcttttatttgtatttaatcccaaatcaggcaagggactcataaaggagcacctggtaaatatcgtggacatcatgacaaaggcaggatacaaaatcaccatttatcctacacagtgtcagggagatgccataaaaaaggtcaggaaaaatgctaagaagtatgaccttgtagtgtgcagcggcggagatggcacactcgacgaggtagtgaccggcatggagcaaagcgaggtaaatgtaccaataggatacatccctgcgggcagcaccaatgactttgcaaactctctcggcataccaaaaaatatggaggaggccgcaagagttgccgtaaacggtactccattcccgtgtgatgtgggaggcttcaacggagataccttcgtatatgtcgcagcctttggcctttttacagaggtatcctaccagacctcgcagcagatgaaaaatatactgggacatgcagcatatattttagagggtgcaaagcacctgatggatatcacctcgtacaggatgaaggtgagccatgacggtgagataatagaggatgagtttatatatggaatggtgaccaactccctttcggtaggaggcttcaagggcatatcaggtcctgacgtactgcttgatgacggcctttttgaggtgacactcatcaagaatccaaaaaacccaatcgagctcaacaagatacttgcgggactggcaaaccgtgaaaatgacaatgagctcatatactccttcaagaccagagagctgcatgtggagagtgaggaggaggtaccgtggacactcgacggagagtttggcggcagccacacggatctgaccatcactaatctgaacaaacagattaccattatgtgctgataaatacaaaatcggacataaaatagtaatagtacacaattttttgtctgattgtgttaaaaatttaactttatttttataaggttatgtaatataataacattagcttttaattaacaggaggaaaaaatatgttagtatctgcaacagaaatgcttaagaaagcaaaagaaggacattacgcagtaggtcagttcaacatcaacaaccttgagtggacaaaatcagtacttttaacagcagaggagcttaagagccctgtaatccttggtgtatctgagggtgccggaaagtacatgacaggcttcggtacagtagcagcaatggttaaggctatgcatgacgagctcggtatcacagtacctgtagcacttcaccttgatcacggcacatacgaaggatgctacaagtgcatcaaggccggcttcacatcaatcatgttcgacggatctcattatccaatcgatgagaacgttgcaaagacaaaagagttagtagcagttgctcatgcaatgggcatgtctatcgaggctgaagttggttcaatcggtggcgaggaagacggagttgttggaatgggcgagtgcgctgatcctgacgagtgcaagagagttgctgatcttggtgtagatatgcttgcagcaggaatcggaaacatccacggaaaatatcctgcaaactggcagggactcagctttgagactcttgatgctatccagcagaagactggtgttatgccattagtacttcacggtggtacaggaatcccagctgacatgattaagaaagcaatcgaccttggagtatctaagatcaacgttaacacagagtgccagctttcattcgcagatgcaacacgtaaatacatcgaggccggaaaggatcttgagggcaagggatttgaccctcgtaagcttcttgctccaggtgctgaggcaatcaaggcaacagttaaggagaagatggagcttttcggatcagttggaaaggctgaataatattattgcaatttagtatttttgcacatactactttacaaaatatttatatcttgtagtaaaattttataaaacttaacttttttaacataaacgcttgatttttgatactcaaaggagtatcttaatttcagaaataatgttaagcgaaatgaacgagggcgttccaccatagatggagtgccctcttttttaataaactaagaagtccggcataaaacaagaatattcgagtttatatgttgtgcagctgtttaaacattatttgaaaataacaattcactcaaggggattgatgaacagaaaggatgtaagatatgagcgaacaggaatatttcaacgtagcagacatctttggagagaacgtatttaacgatgcagttatgcaggagcgtcttccaaagaaggtttacaagaagctccatgaggttatggacgaaggaaaggagcttgatctcgagactgctgatgttatcgcacacgagatgaaggaatgggccattgagaagggtgcaacacactatacacattggttccagccacttacaggcgttactgctgagaagcatgattcatttatcacttctccaatgccaaacggaaaagtacttatgagcttttcaggaaaagagttaataaagggtgagccggatgcttcatctttcccatcaggtggtcttcgtgctacatttgaggcgagaggatatacagcctgggattgtacatcacctgcatttgtcagacaggatgcagcaggcgcaacactttgcattccaacagccttctgttcatacacaggcgaggctcttgatcagaagacacctcttcttagatcaatggaagcaatcaacgatcaggcactgagacttcttagattattcggaaatacaacatcaaagaaggttacaccttcagtcggaccggagcaggagtacttcatcgtagaccgtgagaagtatttacagagaaaggatctcatcttcacaggacgtacacttttcggagctatgcctccaaagggacaggagatggatgatcattatttcggagctatccgcgagagaatcgcagcttacatgagagatgtaaacaaggaactctggaagcttggtgtttcagctaagacacagcacaacgaggtagcacctgcacagcacgagcttgcacctatctatgctgagtgcaacgtagctgttgaccacaaccagctcatcatggagacactcaagaaggtggcaggccgtcacggactccagtgcttacttcatgagaagccattcgcaggagttaacggttcaggaaagcatgacaactggtcaatcacaacagatgatggtatcaacatgcttgagcctggcaagacaccacatgacaatgtacagttcttacttgtactcacatgtatgttaaaggcaatcgacgagcatgcagcacttcttcgtgcggcagcagcagatgtaggaaacgatcacagacttggagccaacgaggcaccacctgcaatcctttctatctaccttggagaccagcttggagacgtattgaaccagcttatcgcaacaggtacagctacacacagcttaaagggtgagaagcttgagacaggtgttaagacaattcctgatttcatgaaggatgctacagaccgtaaccgtacatcaccattcgcattcacaggaaacaagtttgagttccgtatggttggttcacaggattctgttgcacaggccaacatcgtgctcaacacaatcgttgctgaggcattctcagacgcttgtgatatacttgagaaggcagacaactttgacctcgctgtacatgatctcatcaaggattacgcagtagagcaccagagaatcgtattcaacggaaacggatactcagatgagtgggtagctgaggcagagagacgtggacttccaaacatcaagtctatggtagatgcaattcctgcatacgttgctcctgagtcagttgcagcattcgagaagttcggtgtatttacaaagacagagcttgagagccgtgccgagatcgagtatgagacatatgcaaagactattaatatagaagcaaaggctatgattgatattgccggaaagcagattattcctgcagttatcaagtatattacatcacttgcacagtcagttaactcagttaagagtgcagttgctgatgcagatgtatctgttcagtcagagcttcttacagagagctcagatcttctctcagatgcacaggttgcacttgcaaagcttaaggatgagacagcaaaggccggtgctatggaagagggcagagagcaggctgtttactacagagatgttgtaaagactgctatggatgctcttcgtactccggttgatgagcttgagatgattgtcgacaaagagatgtggccaatgccatcatacggcgatttaattttcgaggtttaatccttgtagtttaaggcccaaagcttacggaaagctgtttagagtggcatatatgatttaatttaacataataataaaatggagacattttgctgaaccacgaagctgtggaaattggtgaagtgtctctgttttttttataaattttattttcgataaaatgaaaaaatgaaagaagaaacaggaaagagaggacattactatgacagaagagattagtggagtaattttcggagtctggttccttattggagcagcattggtattctggatgcaggcaggttttgctatggtggaagcaggttttaccagagcaaagaataccggtaacatccttatgaaaaacctcatggatttctgtattggtacagttgtattcatactgattggtttttcacttttattaggtgaagatgttcttggtttcatcggtaaaccgggatttgacatctttacatcttacaaagattttgactggtcaaactttgtattcaacctggttttctgtgcgacaacagcaactatcgtatcaggagctatggctgagagaacaaaatttatttcctactgtgtttattcaggagttatttcagcacttatttatccaatcgaggctcactggatctggggtggtggccggctttcacagattggcttccatgatttcgcaggttcatgtgccatccacatggttggtggtatcagtgctcttgtaggagctgcaattcttggacctcgtatcggaaagtttacaaaggataaaaacggaaagattacaaaggtaaacgctattccgggacataacatcacaatcggtgcactcggtgtattcattctctggcttggctggtatggattcaacggtgcagcagcaaaatcagtagagcagcttggttctatctttgtaacaacaacaatcgcacctgcacttgcaacagtagtatgtatgattttcacatggctcaaatatggcaagcctgatgtgtcaatgtgtctgaatgcttcacttgcaggacttgtagctatcacagcaggatgtgatgtaacagatgcactcggtgctatcattatcggttccgtagcaggacttctcgtctgcttcggtgtatggttccttgacaatgtacttcgtgttgatgaccctgtaggtgctgtcgcagtacatatgatgaatggtatctggggaacaatcgctgttggtctttttgccacaaacagtgctccgggatattcaattgctgattcaaagggtaacgagctcgtaggacttttctacggcggtggatttaagcttttaggactccagctcacaggatttgtttctgttgcagcatggacagtagttactattacaatcgtattccttgttatcaaggctacactgggacttagagtttcagaggaagaggaaatcatcggacttgacccaacagagcatggtcttccatcagcatacgcaggatttgctatcatggatgtatcaggtgatgttatggatgtcaatgaaaatacagaccttggttcttctgagtatgcaacagcttctcaggcaaagaaggatgcagcagtgcctgttgtaaatgcaacaacaccggcttcagcaagcggtatccacaaggttgttattatttcaaagcttacaaagtacgacaagcttcgtaaggctatgaatgacttaggtgtaacaggaatgacagtgacacaggttatgggctgtggtatccagaagggtgccggcgagaaataccgtggagctgagcttgatgcgacattacttccaaaggttaaggttgaggtaatcgttggcaagattccggtagaaaaggttattgagactgctaagaagactctctacaccggacatatcggagatggtaagatcttcgtttacgacgtggcacaggttgtcaaggttcgtacaggcgaggaaggaattgaggcattacaggatgtagagtaatgcaaattattatctaatccccttagcatatatacatcaacaaaaacccccgaggatatgatccttgggggttttgctttagataattaagttgtaaatcgtaatggttaacgatgagtgttaccggatgaaccggagctgccggtatcagtaccacctgaaccggagccaccggtaccggaagcaccggctccagaaccgcttgaaccggaaccgccagtgccagtaccggagctaccagtaccagcacctgagctagcaccggtaccagtttcagccccacctgtctgtgctccagccgcagtgccatcagtactgcccggtgtagtaccggaattggtaggatccgtggtggttggtgagctgttaatcagcgatgttgcatcatgtaatgtacatacggtattcatgaacgtatcatctgccatgaattcatattcagggctgcctgatacagcgcctgttataaatacctttgatgttttattcggacaatacggaccggcaatggctcccgaatcggcacaaatctcaagtgcaacatgatggtcgcagctgtctgtcggcacagtgtccgtatcaaaatattcggttgtcagcattgatcctcgaggatcattgtcacatgttccctctaaaggaacaagtcctgatttgctgcataccgtggtatttgttataccatccggctgtacaaagtctttggtttcaagtccttcatggattctgctcatggcattcctccatatattcttagggtaggatgtgagcttgccggactgttttgagttgtcatcatagccgccccatacgacacatgtgtagtatggtgtgtagcctgcccacaggcagtcgcggttgctggttgtggtaccggatttacccgcctgggctatctggctgtcaaagcgcgccagctttccggttccctgtgtcagaacatccttcatggcatctgtaagaagccatgccgtagtatccttgattacagtacgtgtgtcctgtgtagtggtcttgtcaagtaatacattgccatcgtggtcaagaacctgagtgtagaactttggctctaagtatactccgccgttggctatagtagcatatgcacctgtgagctcaaggtttgtgacaccctttgtcagtccgccgagcgccagtgacaggtttttgtcggaatcggtgagagttgaaataccgaaatcctccgcatatttgtaaccgagctcaaccccgatatcctgtaaggttttgactgttacaatattgatggactttgttattgcccatcggatggaggtaaagcctccgaaagatttgtcatagttgttaaaggtttttgaacctactgtaaacggtgcatcatcctgcacggatgcaagtgttttgccgcctgcatcgagagcagcagcatagcagccgattatcttgaaggtagagccgggctgtctgcatgtatctgtagctctgttccatgttctgttgccggatttgtcaccgcgaccgccgaccagtgcctttacttcaccggtgctctggtcgatgactgtcatggcaacctgtggttccagcgtgatattgacagcttcagaaccctccacaattgaatcgccctcctcaagtacatcctgctcgtactgtgcaatagctgcattgcattcatcagggcttgagtagttgatgctgaaatcatcattgttggttttcttcttataaaaagagagcatggtctggttcgtgtaggtcttgtacgaaccgtctgccttttttacttcgaaggaaagctggaacgaatactttgcgtcggacggatagttggatggattgtttgcctcctcgtcgcatatagtctgcatagtaaggtcctgggtcgatttgatagtcagtccgcccttgtaaatcagcttgtaggcttctgtctcagagtaaccggcggctgtgagatcgtcgaacacgttgtcgatgagtgcatcaataaagtatgtgttcacagagcctgagcctgtggtgttgtactcagcaattcttgagtagacatcatcggccatggcctcatcatattgcgccttggagatatagccctgatccttcatgttatttaacaccttttcacgtctcttggcatttttgtcagggtgtgtgatagggttgtagccggatggattctgagtgatacctgcgatgacagatgcttcggaaagcgtgagctctgagacatccttgttaaagtacttcttggatgcggcctgcacaccgagggtatttgctcccagattgaccgaattcatgtagttttcaagaatccagtccttgtcgtttacctgcttttcgagctcaagggcaaggtactgctcctgaatctttctctgaagcttttctacaaaggaagtttcgcttgtccagctggtcagtacgttgttcttgatgagctgctgtgttattgtgctggctccctcactgaatctgccctttgacagaccggagataaaggctcttccgataccatgcaggtcgatgccgttgtggtcgtaaaagcgttcatcctcgattgcaacaaaagcatgctgcaaatccagcggaatctcatcgatggtgacatactgcctgtttgccccctgacctacgagtgtggcggtttcttctccgtttgccgccagaacggtagttgagtagccggtaggagtgacatcgatctttgatatgtcaggtgcggaatcaatgattcccttcatgacaccgattcctgaactgatgccggctgcgcctgctacaattactacaaccagaagaatctttagaacaatgagcttgaacttgtttttgaccttagagctcttattgtcatatttccggagcagctgcattgtagcttttttgccgtaattcatatataggcctccttgtcattataaagatttgtaatcttgtttgtatatactgtgattagaaaataaacagtatacattattatatcaaatatagcatttaaatgcaatttacagattggttttcatattatataatacaggtaacaattataaagtgtttttaagatgcatgagtgtaatcaggcaatatcaggatggaaagaatatctatgtcagagaatactataagcctgtacgtgtacaagggcggacagggtgagataacagagaagaaatcgaggtttatagcaaccgtaaggccggtagagtctgagaatgaggctgtaagcttcatcaatgagacgaaaaagaaatactgggatgcaaggcacaactgcagtgcctttgttataggaaagagacaggagctgaccagatgctcggatgacggggagcctgcaggcaccgcaggccgtcctatgcttgatgtactccttaaggaaaatatccacaatgccgctgttgtagtaacgaggtacttcggtggggtgctgcttggcactggcggactggtgcgtgcgtatcagcaagccacaaaggcggggctttcggcaagtgagataatagagaagaaggagggtgcagtactgtttatcaggacggactataccggaatcggaagacttcagtatctgttggcacaggagaagattacggtgatggacacagcgtatgaggcggatgtgctcgtgaaagccgttatcccggaaaatgataaaaaacgcatagagaaaacaatcatagagcagacaaacggcacggcaaagcttgagtggggcgatgaggtgacatttgctgaatatgatggcgaggtattgttgtttaaaaattagccggtgctcatattttagcaggacaagcagaatttatattcaattacattcaattaaaataaaaaaatgcttgacactatataatcacatgtgtataatatcatttgttgagacaacacattggcccatcgccaaatggtaaggcaacggactctgactccgtcatttcaaggttcgaatccttgtgggccagctaaagagaacttcgatagaagttctctttttttcttgtgtaataatgcgatttgttataaaataaaaacgtatatgacttaaacagttatagaaggatggtgtaatatgaacaagaattttttgagaattattaatcttatagaagaactcggctctgaaaaaaagacaccaattactatacagcaataccaggatatcattaataaaagctcaaatctttggatgtccaatggtgtggatgaagcgtttagatttatcagaagttacttcaattttatagactagaggaattagatatggctttttcatttgacagcagaatacgttacagcgaggtggattcgtcatgcagactgagccttacagggcttaccaattattttcaggactgtagtgtgtttcactcacagtcacatgatgtgggaatcagatttcttgcggacaatcatatagcatgggtgctttcatcatggcagatatgcataaacaggcttccactgcttaatgaacaggtaaagatatccacatgggcatatggtatgaaggcgttttacggttacagaaatttcacacttgaagatgcaggcggcagcacactggcatatgccaattctgtctgggtacttgttgatacacgaaccggcagaccggtgaaggtgcctcaggagtttgcggatacatacggtcttgagccgcagcttgagatggagtgtgcaaagcgcaagcgtcatattcctgatgatatggagaaaaagggtgagattgtggttcctcagttttttatagacagcaaccatcatatgaacaatgagaagtatgttatgctggcgcagcagcttctgccgaatgattttgaaatatctgagcttcgtgtggagtacagaaaagaagcaaagcttggtgatacagttatatcatacgtgaagtacacatcaaagagtgtgacagtggtgcttgcggatacggataaaaaaccgtattcggtggtggagtttttgagtaatccggtaccgggaaaataattataattccattatttaataacgatacagttttgatacagaaaggacggaaaaacatgagattaggagaatatcaggagcttgtatgtgtaaagaaggttgattttggcatatatctgtcaacatcttcggcttcggaggagagggtactgcttccggcaaagcagattccggatggagtaaagcagggggataagcttaaggtctttgtatacaaggactctaacgacagacttattgctacgacaaacgagccaaagctgacacttggaggtttatcagtgcttactgtcaaggaggtgactaaaataggggcgttccttgactggggacttgaaaaggacctgtttcttccttacaaggagatggtcagaaaggtcagcgccggagatgagatacttgttacattatacatagataaaagccagaggctttgcgctaccacaaagggtatttaccatatgctgagcaccgattcgccatacaaaaaggatgatatggtttcaggccgtgtgtatgattttagcgacaatttcggtacatttatcgctgtggatgacaaatattcagcaaagataccggtttttgagaatgccgcttatctgaagcttggagatgtgatagaggcaaaggtcactgatgtcaaggcggatggcaagctggacctgacaatgagggaaaaggcatatattcagatggattccgatgctgaaaagctccttgaactgcttgattcatacgcaggtgtgcttccgttttcggaaaaggctagcccggaggtaatcaagagagaaacaggacttagcaaaaatgcattcaagcgtgcagttggtcatttatataaggaaagaaagattgatctcacggatggcaaaatccgtcttaagaaataacagtctttttaataaattttaacaggaaagaaggacaataacatgaaaaacgttatcagtacagacaaggcaccggcagcaatcggaccatattcacaggctatcgaggtaaatggtatggtatatacttccggagtgataccggtagttccggagaccggtgagattcctgagggctcacaggcgcaggctaagcaggcatttacaaatctgtcacatctgcttgaggcagcaggaacaagcatggacaatgtggtaaagactacagttttcatcaaggagatgaatgacttcggtgcaataaatgaggtatatgccacattttttaacggagcataccctgcaagaagctgtgttgaggtcgcaaggcttccaaaggatgtaatgcttgaggttgaggctattgctgtaaaataaaattattacataagtatttcatgcgacataagtcctattcgttggaaaaagtcaagattttcttaagaattcactaagaaaacgttgacatatatatgttgctttgttataatgacaaagtaatatttgtaacaaattcgtaataactgttacaaattcatacaacggagggtaaaatgaaagtaaattatgtgaaactcacagccggggtacttacaggttttatggctctgtcatcagtgccatatgcagtatatgcggctggacctactgcaggagtagcaagttatacatcagatattgttagtacatcaaacactcttacagccggtgttacatctatgttgacagatgtaatgttaaaaggtgatgagacatcagagactgcaacagatgttgcgacaacagatgctgagccggttaaatcagcatatgctgatacagcagttgcacaggttagcgacagcgttaatatacgtgcgagtgcagatgaaaacagcgagtctcttggaaagctctataacaatggaattggaacagtacttgagacaaccgataacggatggtacaaaatccagtccggttcagtaacaggatatgtaaaaggtgattatgttgtagttggtgacgatgcactcgtacagagcgcaggccgtcgcgtggcaacagtcaatactgagacactcaaggtcagaacaacagcatctactgatgcagaagtacttggtctcgtgtccggagaggatgatctcacagttgtggatgagtcaacagacggatgggtaggtgtatctacagcagacggtaccggatatgtatctacagattatgtgacactcgatacagagttcacttatgctgagtctaaggaagaggaagcagcaagacttgccaaggaagaggcagagcgtaaggcggctgaggaagcagctagaaaggctgaagagaaagctagaaaggctgaggaagcaaaagcagccaaggcagcagcaaagaagtcatctaagtcttcaagcaaatcatcaagcagttcttcatcagagaagagctatagcgcaccaagtggttcaaacggacaggctgttgttaattatgcatcacagttcgttggcaatccttatgtttacggtggctcaagtcttacaaacggaacagattgttcaggatttgtaatgtcagtttatgcacagtttggcatcagcttaccacacagctcatcagcaatgagaagcgttggatacggtgtgagcacaagcgatatgcagcctggagatatcatctgctatagcggacatgttgctatctactgtggtggaaacactattgtacatgcaagcaacccatcagacggtatcaaatatacatcaccggctaactacaaatcaatcattgcagttagaagaattttctaataaattcatgccggataggtaaatatgaatctataaagaccttcatctcatcgagatggaggtcttttttacatagagaaactttatttttgtttatgatatttgaaataagtggcctgtatgatatacatatatgtttaaaaacgggactaatttaaacagaatggaaaacagggctgtcaagcgtaatttttattacatatatcaaaatagcaacatgcacaaaaaagtggatatgctaaacccggtaaattcggattggggataaatgtggataactatcaacaaaagtaaacctcaaagtgcccttaaaatgagttatgcacggagttatgcacattatccacatttttgaatgagagcaaaagaacaactgttttgtaaagttctgataaagttgcactaaattagtaatatttcggaaataatattgacattttaattgtaaataatatgattaaaatgctttataattgtcggacaacttgaaaagtgttgattatgtaagttaattttgttatacttcaaattatgattaaaaagatagatattgcagggctacaacttgataactatacagtacgtgagatgctcatgagagtcgacaggcgtatttcagagaagatactcactacaatagaggaagtgaatatggatacgctgacattggcggagtctgatgaagaggtgaagcagtcactggaggcatgcgattatactgtcattgcggatgaaggtatactaagggcggcatcggcagataccttgcagcgtcggcatgagatagaagatcatgacttcttttatgagctttttaagaggcttgagagaaatgataaaaaaatctttgtgattgcagagtcgcagaaagctgttgatgaggctgaggaatttctgcttggattatttgacagagcgcgaatatctggcaagggtgttcttgatgactcaccgggatgcagcgaaaatcttgtcaatgaaattaacatcgtttcacctgatgcgattgcatcatttcttccgtctccgtcacaggagaagttccttttacacaacagggaaaagctgttgatgaacctctggtacggaatcggaaataataagttcatggggaaaaagcatggatttattggaaaaataagaaaaatgcttgatgtgaagcgccttacgcatcttatcaacacctatgaacatagacaaaacagttcaatatagttaattcttataacaataaaagaaaaaataagaggaaatgtgtaaaaattgtacatttacctctttatttttttgtgcgaatgtattaaaataatagcaagtatttatgcaattagttataaagtgactgtgagggcaatgcacagttaccaaaaaggggagaaggagaacgatttatgatttccaatcagatacttcaaaatacaattgatggccttaaaggtattacgagaaccgatctttgtgtgatagatgttgagggcaagattcttgcagctacgtttccgaatgcagaggcgtttatagagccggcacaggcctttgttgcatcaccggcagacagtcaggtgattaatggatgccagtttttcaaggtctttgatgatcaccagctggaatatgtgcttttagcttatggtgacagcgaggatgtctatatgataggcaagattgcaagcttccagattcagaatcttctggttgcgtacaaggagagatttgacaaggataattttataaagaatctgcttttggataatctccttctggttgatatatacaatcgcgcgaagaagcttcatattgatattgaagtgcgacgggtagtatttattgttgagacaaacagggagaaggacggcaacgagcttgagaagatcagaagtcttttcggcggcaaatcaaaggattttgttacagctgttgacgagaagaatataatagtagtgaaggaactggcagaaaacgagacctatgatgatctcagaaagacagccgaggtgattttgaatctgttcagatccgaagcggatggggtacatattgcatatggtactgttatcaatgagttgaaagaggtgtcgcgctcatataaggaggccaggatggctctcgatgtcggaaaaatctttttcgaggagaggaatattatagcatattcccagcttggaataggtcgtctgatatatcagctcccgattcctctatgcaagatgtttatcaaagagatattcgatggcaaatcccctgacgattttgatgaagaaatattatctactataaataagttctttgagaatagcctgaatgtatctgagacttcaagacagctctacattcacagaaatactcttgtatatagattggacaagcttcagaaaagtacagggctcgaccttagagtgttcgaggatgccatcacatttaagattgcccttatggtagtcaaatatatgaaatatatggaatcaatggactattaaggagaaagtaatgattaaacttgaacatgtcagtaaggcatattctgcaggtatacctgctctcaatgatgtcaatctcgagattgatgatggagagtttgttttcgtatgcggagatagcggatccggtaaatccactttgattaagcttcttttaaaggagcttgatcctacagacggaacgattactgttgacggaaggaatctgacgcgcattcgccacaagcagattcctaaatacagaagaaatgttggagtcgttttccaggacttcagattattaaaggatagaaatgtttatgaaaatgtagcttttgcactcaaggttatcggtgcatccacagctgttattaagaaaaaggtgccacagatgctttctatggtagggcttgctgcaaagtacaagtcaaagccgagagagctttcgggaggagagcagcagagagtagctattgcaagagctcttgtcaatgagccgagcatgctgcttgctgacgagccgacgggtaatctggacaataacaatgcgtgggagattatgaaactgcttgaggaaatcaacgagaaaggcacaactgttatcgttgtaactcataatcttgagattgttaaggttatgaaaaaacgtgttatcactataaagaaaggtcttgttgtatctgacagcaaggatggtgatagtgatgaggattaatacgtttttttattcaatcaagcagggatttaagaatatattcagaaacaagatgttttcactggcatctatagcgacaatggcagcctgtatttttatgtttggtctgttttatatagttgtgactaacttctcaagcatggttaagacagctgaggagggtgttgctgtcacagtgttctttaatgagggcactacagaggatgtaataaaagcggacaaggctcagatagaaaagagggctgaggttggcaaggtggattatcagtcggcggccgatgcatggagtgattaccagaaggagtattttgagggctacgatgatgctgcagcttcatttggtgatgataaccctctcagtaattcagcaaatctgcaggtttatttgaatgatgtctctatgcagcagactcttgtcaactatatcaaggggcttgagggcgtcagaaaggtaaaccagtcgcaggatgtggccaatacactgaccgatttaaataagcttatcagctatgtatcgggaggtatcattctgattcttctgtgtgttgcgattttccttataagcaacacagttactacaggtattgcggtcagacgagaggaaatagctatcatgaagcttatcggagcgacggattttctggtcaggtctccgtttgtggtagaaggtattctcattggactgataggatcagcgattcctctgggattgcttagtgtcatgtatggaaagatttgtgcatatattgctaataagtttagttttataggaaatatgatgacatttatcccgacaaaggagattttctctacacttgtaccggtagcgcttatactgggcgttggaattggctttttgggaagccgattcacaattcggaaacatttaagagtataataataattatgacggcctggctccgatcggagacaggctgttttaagttcatatcataatatagagaggacaggactgaaatggataattcaaacaacaacggcttagaatatgatgataattcagatatgagcgataaaaagcctcatagaaatggatttagaaatgggttcggtgtcgggattgctacaggtatagtgaccaccattgtgcttggattgattgtgctctttgcatacacaatgattacaggcaggagcgtgcataccgttgcaaaaagcgcagatgtgcttgacgacaagaccgtgcagaaaatcgatgagcttgcgaactacatagacgagtactactatgaggattatgataaggatgagttggaaaacggtctgctgcatggtgtgatggagggactaaatgatccttattcggtttattataccgcagatgagtataaggaactgcaaatcagcacgacaggcacttattatggtatcggggctgcgttaaagcaggacccgaacacaaagcaggtgacagtttcgaaggtatacagtggtacaccttctgaggaagcgggacttaaaaaggatgacgaaatagtttctgttgatggtgttgaggcaacatccgaggatctcacaaagcttgttgccaaaatcagaggtgaggagggcactaaggttacgcttgaaatcaggcgtggcgaggatacagacccatttaccgttgaggtggagcgtaaaaatgttgagctgccatcagtggacagcaagctgcttgacaatggagtgggatatatccaggtcagtgagtttcagacaaacacggcaagtcagtttgaggatgcacttgacggacttacaaatcagggtatgaaaggccttatagtggatttgcgtgctaatccgggaggactacttaccgcagtgacagaaatggttgacagactgcttccggcagaaacagttggcaagcttcctgcaggaactgtcgtgtatacaaaggataaaaacggaaatatccagacctttggtgatgacgatggaaaacagattgactgtcctatcgtagtgcttgtcgatgaaaacagcgcaagtgcgtctgaaatttttgcgggagccatgaaggattacaatgaggatggttatattgatgcaacacttgtaggcaaaaagacctttggaaaaggaattgtacagactatttacaatctttccgatggcgacgctgtaaagattaccacatcgaagtactacacaccaaacggtcacaatatccacaaaaagggtatcgagcctgatgtagaggtcgattatgaatatacaggagatacaaatgcagactatgacatgcagtatgatgtgcagcttcagaaagcgattgaggtgatgaatgaaaagcttaaataagattgcatgctttctcatgctgtgctggatggtagtcatctttatgttttcggcggagcctgacaccgagtcgtctgagctcagcggcagcgtcagctatcgcatagtttctgtggtcaatactattaccgcaagccactgggatgagaaggagctgctcgataaggcagagcttatagactatccggtgagaaaatgtgcccacatgagtgagtatgccattctcacattgcttggctttttgacattttcgttcttgcatggaagaagaagatttttgattccgataggcgtgaccttcctatatgcctgcacagatgaatttcaccagctgttcgtgcccggccgggccggcagattcacggacgtagcgattgataccgcaggcggtatcattatgcttctatttattgcgcttgttacacatgtggcgcgtaagaagcatacagcaggcactgtgaaaccgaaaatatgaaaacatgaagacacgaagataagtgggctgtaattgttgccagtcacaacactgttaggtgagacccgcaacagacatgataataagcttgatgataagcatgattataagtgccaaatttagttgcagttttctaatataatcggtataataaaggtattgacgctggccgaaaaacatggcagataacatattcttttaaatatgtgccacaaccagcttcccgccccgtaaacccaggtttacggccggcacacagcatgttccgaagaaaaatatgaactgccacggggttccggaaaaaatatgaatgaaacaaagtgaaaataaaaaatcactatccgaaaaaaatcccgtggctgacttcatatttttcagaggaatatactgtgtgccggccgcaccccacaacctgaatgcgggaagcgtagttagagtcataaagcgtctaaaatgtatagaaagaggtgattctgtggtagagttagataatttcaagtccacgctccaaggctacaaagccccactacaggaagtgagggattcactttgacctggctaataaagaagaaaaaatccaggaattagagcgagaaatggaagctcctgacttctgggatgacccggagaagtcacagagcaagatgaaagagcttaagagtatgaaggatgatgtagctacatacgcaaagctcaaggaacagtacgaagatatagagacgatgattgagatgggctatgaggagaacgatgagtcactcatacccgagatacagcagatgcttgatgattttgaaagcacatatgacggtatcagaatgaagactcttttgtcgggagaatatgataaatgcaatgcgattctgaggctcaatgcaggtgcaggtggtaccgagtcgtgtgactgggcgtccatgctgtttcgtatgtactcgaagtgggctgataaaaagggctttacccttgaggtactcgattcgcttgatggcgatgaagccggtatcaagtccattaccttccaggtaaatggagagaatgcatatgggtatctaaagtctgaaaagggtgtgcacaggcttgttcgtatttcgccgtttaatgcggcgggaaaaaggcagacctcattcgtatcatgtgatgtcatgccggatattgaggaggatctcgatattgaggtgaaagacgatgatatcagaattgatacctaccgctcaagtggagcaggaggacagcatatcaataaaacttcgtctgctattcgtatcacacattttccatcagggatcgtggtacagtgtcagaatgagcgttcacagcatatgaacaaggacaaagccatgcagatgttaaaggcaaagctgtatcttttaaagcaggaagagaatgctgcaaaggaggcgggcatcagaggcgaggtcaaggaaattggctggggaagccagatacgttcgtatgtgcttcagccttacaccatggtcaaggatcacaggacagatgtggagaccggtaatgcggatgcagtgctcgatggcaatatagatatatttatcaatggttatctgaagtggcttgcaacacgttcggattaaggaggcaaatgtgggtttagttatagctgtggcgatattagcagttctgacagctgccggagtgaccgtttacattaaagtcagacggttgtctgaaagtcttcttggtacacctgatgtcacagagggcatcaatcgtatcagggagaatgtctctacgactcccaagtcggtttcaggcatgacgcgccttatggagccacagataaaaagggattttccagagtttgtctgggaacagtttaagagaatgtcagaaagagtgcttgtgtcagcactttgtgcaatcacgactgaggatatttacaagctggaccgtgaggcttctgatgaggtaagacagcaggtgctggtgcgtatagacagcaatgaagcggctggttttacagagcattttgacgagatcagggtgcatcagactgaaatctcaaactatgtgaaaagagatggaaggtgcgtcatcagtatacagagtgcggttgagtatttttactacaagactgcctcaggaaagcttatcagtggtgataaagagtataaaaagcagaccagatacaatatggagcttgtatacatacaggatatagatatgctggataatgcagggataggcagtgcagttggcactacatgtccaaattgcggcgctccggtcagaagtcttggagcaaagaaatgtgaatattgtggctcatatgttgagcctgtcaatataaaagtatggaagctgcagagctttcatgaagttgattacaaccatatctaaggaggaagaaaatgggaattattaaggcagtaaaacaggcaattggaggcggctttgcagatacatggcaggaggttattgagccggataatataggcgaccagacagtctatgccaggggtgtgctggtaaacagggggcagaataaaaaaggctctgacgatattgtttcaaacggctctatcattcatgtatatgacaatcagtttatgatacttgttgatggtggcaagattgtggattacacagctgagccgggctactacaaggtgagcaattcatctatgccatcacttttcaacggacagtttggggattctttaaaggaaacctttgaccgtgtgagatttggtggacagacaccacagtcacagaaggtttattatatcaaccttcaggaaatcaagggaatcaagtttggtacgagaaatcctataaactactatgatacattttataatgcggagcttttccttcgtgcccatggtacatattccatcaaaattgtgaatccgcttcagttttatgcagaggctattccaaagaatatggatcatgtggagattactgatatcaatgagcagtatctgtcagagtttttagaggcattacagtctgccatcaaccagatgtcagcggatggtacaagaatttcattcgtcacaagcaaggcatctgagcttggaagatatatggcgaagtgtctcgatgaaagctggaatcagatgcgtggtatggaggtacaaagtgttggtatcgccagcctttcatatgatgagaagtctcaggagctcattaacacaagaaacgagggcgcaatgctctcagatccatctattgcacagggatatatggtcaaaaatatgtcagagggtgtcaagaacgcaggcagcaacagtggtggagctatgcagggcttcatgggtgtcggcatgggaatgagcaccatgggcaatatgatgaatggttttacacagatggcacaaaataaccggtcagccggaatgaatgcgccgggaaatggtgcagcaggtatggcagcaggagtggattcaggtgccacacagcaggaggatgcgtcaggctggacatgtgagtgcggacagaaaaacacaggtaaattctgcagtaattgcggcaagcctatgccacaggagattacagagtggacatgtgagtgtggccagaaaaatacaggtaaattctgcacaaactgtggcaagccattacctgtaaacacagagtggacatgtgagtgtggacagaaaaatacaggtaaattctgcagtaattgtggaaaaccaagagcataagatgttgcaaagctgtaatctttgtgttaaaatctttgagtcaaggacaaatgtcggtgtgtgacaaacacacaccggccattttggaggtaactaaatggcggagaaatcaaactacttcgttttacgggcaaaggctgtaccggaggtgctgcttaaagtagttgaggcaaagagactgctggattcgggcaagcttgaatctgtgcaggaggcaacagatgctgttggcataagtagaagctccttttacaaatataaggatgatatttttcctttttatgagggacgtaaaggaaagacagtgaatcttgtaattcagatggatgacgagcagggcatactttccgttgtgcttaagtcggtagccgatgcgaaagcaaatattcttaccatacaccaaagtgtaccggtaaatggcattgcgtcactcacgttatctgtggatgtatttccggagtcggatgatgtggatgatatggcaaagcagattgagtccttaaagggcatacattacgtaaaaattttagccagggagtaacaaaaagatgaagattgcagttatgggttacggcacaattggatcaggtgtcgtagaagtattagaaatcaacaaagaaaaaatcgcaaagagagcaggagagccaatcgaggtcaagtatgtgcttgatttaagagagttcccgggtacacctattgagaacaaaatagttcatgattataaggttattgcagaggaccctgagatcggtatagttgtagagacaatgggaggcgttgagcctgcatttacattcgtaaaggcaatgcttgaggcaggaaaacaggtagcaacatcaaacaagaaccttgttgctgcaaagggtgctgagctcatcaaggttgccagggatcatggagtgaacttccagtttgaggccagtgtcggtggtggaatccctattatcagacctctcaacaagtgtctcacagcagacgagattgaggaaatcacaggtatcttaaacggaacaaccaactacatgcttacaaagatgacagaggaaggtgcagactttgatgaggtattaaaggatgctcaggataagggctatgcagagaaggatcctacagccgacgtagagggatatgatccatgcagaaagatagccattctcacatcgcttgttgcaggacagcaggtggatttcgaggatatccactgtgagggtatcacaaagattacacctgaggatattaagtatgcaaaggcaatgcaccgtgcaatcaagcttcttgcttcaagccgcaaggtgggtgacagctatacctgtctcgttgcaccatatatgatagatgacacacatccgctctcaggagtgaatggagtgttcaacggcgtatttttacgcggaaatgtgctcggagatgctatgttctacggcagtggagcaggaaagcttccaacagcaagtgctgtagtggcagatgttgtagatatgacaaagcatcagaacacaaatatttatatcgactggaagcctgagaagctcacacttgtaagctatgatgacagtgtaaacagcttctttgtgagaactgactcaccaaagagcgaggttgaggctgtatttggacatgtagactacattgaggatgtggttgacggcgagtatgcattcacaacaggcgacatgacagagaaggattttgccgacaaggcatcaaagataaacgttatcaacagaatcagattataaaggacaaaaatatggtaaaaggcttatacaccgctcacaccggtatggttaatgagatgaagcgcatggatgttcttgcgaacaacctggccaattccgatacctatggatttaaaaaagagggaaccacctcgcattcatttaaaaatgaacttgctataaagataaaggatacatcaaactacggactgcacaaaaatctgggcagcatgacatacggagtgcatctcggtgagacatataccgactgggatgagggcagctttaaggtgactgacaatcctacagacttggctatcggtggaaaaggcttttttgccgttgcatttactgacaaatccggtcagacaagtgtaaagtataccagagacggtgctttcaaggtcaatgctgacggttatctggtcacagcagacggagaccatgtgctcaatgcgacaggtgcattgagtggagatggcggtgaggcaaactgggtaaaggtagacccgaatgagaagttttcggtaaactcacttggatatatcacacagaacaatcagttagttggcacaataggcgttgtcgatgtggataattatgactatattgaaaaatatggtgaaaatctctacaatctgacggccgggggtaatattatagcttccgatgccgaaatagaacagggagccttagaaacttcaaatgtcaatgtggtcaatgagatggtcaatatgattacgatacagcgtgcatatgaagccggacagaaggttattacatctattgatgagacattagacaaggctgtcaacaatgtaggaagagtataaggagatatgccatatgatgagggcgctttacacagccgcaacaggtatgcgtgctgaacagacaaatgtagatacaattgcaaacaatctttccaatgtcaatacgacaggctttaagggtcagaggacagagtttaagtctcttttatatcagacgatacagacccgttctacatccggaaatggtgatgcaaagccggtaggagcgcaagtggggcttggtacccgtgtggctgcaaccacatccacttatactcaggggccgctcaattctacggagaggcctactgattttgctttggagggcgatggcttttttgcagtgagaggtactgacaatcagacctattacacgagaaacggtgccttcacatggagccagtatggaaacggacagactatacttactgattcacagggcaatcctgtcatggatacaaacggtaatatcatagctgtgccggcaggtgtgtctgctgagaagatgagctttggagaggatggcgcggtaggttatatgactgcacagggcaattatattaatctgaatcagcgaattgctgtgtatcagttcaataatccgtcaggtcttgaaaaacagtcagggagcctgcttgcagcaacagccaattcgggcaatccgatgcttgaagctgcaaaccctgctctgaaaagcagcaaggttgtgacaggatatcttgagggatcaaatgtgcaggtagcagacgagatggttaacctcattgtggcacagcgtgcctacgagctcaattcaaaggccatcacaacagcggattcgatgcttgagacagcaaataatttgaggagatagtagcatatggatataagcgcagtatcaacacttgcaaactcaaataatacgtctgcagtggcagacaagcttaaaaataatgtgaaaaatctgtcatcagactctacagaggacgagctcaagagcacacttaaggattttgagtcttatttcgtggagcaggtcataaaggaaatgaaggattccatgacactaaagagtgatgatgaggattcctctatgtcgcagtacaaggatatgttcatggacactgtcatagagcagatgagtgatacgatagtggagaagtccggagagaacatcacacagcagctttatgagcagatgaagcgcaattacaatatatcataataattgataataaaaagccggttcggcatgcttgcatgtggttaccggcttttttagtgcaaacttagtaattgcagatacgcatgctctagggtataatatttaaaaaataaaactattcagagtcacaataaaaacacacagatacggagaaattcaattggaaaccgaaacagtcacaggatacgttgatcatataatatacagaaatgcagaaaacgggtatacagtacttgttcttgtagtgaacgaggaggagctcacatgtgtgggtactttttcggacattgctgagggtgaaaatatagaggctcacggtgagtatacagagcatgccacctatggcagacagtttaaggtagtaagctttgaagagaaggagccggaggatgagatggctattgagaggtatctgggctcaggagccatacatggtataggacttgcgctcgcagcacgtattgtcaggcgattcaagaaggataccttccgcatcatagaggaagagccggagaggcttgctgaggtaaagggcattagccagagaaaggctatggagattgcggaccaggtcaatgcaaaaagagacttaagggaagccatgatttttttgcaacagtacggcatcaatatgaatctggctgtgaagatatataataagtatggcggagagatatacagtgtgctcaaggaaaatccgtatcgcatggcggatgatatcgacggagttggctttaaaactgcagatgagatagcggcgcgggttggcatcaagactgattctgattttagaataaaaagcggtatacagtatgttttgcagcaggctgccatggacggacatacatatctgccgatggaggagcttacgaggcgtgctgtatatctgctcggagtggaaagctcgcaggttgaggcacattacatgaatctggccatggacaggaagattgtcatgcagttaaaggatgatataacccagatttatgctaacaccttttattatatggaggcaaacacggcagccatgctaaagcagcttgatgtgacgtatgatgtgccggatatcgagatagaggctgcaatcagaaatatagagaaaaagacagagatggagctcgatgagcaccaggctgaggcggtgaaggaagcagtcagaaatggccttttagtcattaccggaggacccggaacaggaaaaaccaccactatcaatactattatcaagtattttgagctggagggcatggatatttttctggctgcaccgacaggccgggcggcaaaacgcatgagtgagacgacaggctacgaggcacgcacaatccaccgtatgcttgagttaaacggcggcatggacacaggaagcacagctggctttgagagaaatgaaaggaatccgctcgagacggatgtaatcatcatagatgagatgtcgatggttgatatatcactcatgtactcattgctaaaggcggttgtggcaggtacgagactcatacttgtaggagatgtgaaccagcttccgagcgtgggaccgggcagcgtgctaaaggatattattgattcaggtgccttccacacggtaaagcttacaaagatttttcgtcaggcgagcacgagcgatattatagtaaacgcccacaagataaataatggagaagaggtatcgttagataataagagcatggatttcttttttctaaagagatatgatgccgacaagataataaatgttacattacagctaataaagcagaagcttcctaagtttgtaaatgctacagagtatgatatacaggtgcttacgcctatgagaaagggactccttggagtggaacgtctaaacggtatattgcaggcgtatatgaatccggcagacaagagcaagcgcgaaaaagaatacaggggcacgattttccgcgagggcgacaaggtgatgcagataaagaacaactatcagatagagtgggaaatcaggacaaaattcggactttgtgtggataagggcatgggaatcttcaatggagatacaggtatcattgaggaaatcaacgattttgccgagaccatgaccatatcatttgacgagggcagaaaggtggagtatccgtttaagcttttggaggagcttgaacttgcatacgcggttactatacacaagtcgcagggaagtgagtacccggcggtcgttatacctcttttgagcggcccgagaatgcttatgaacagaaatttgctttatacggcggttacaagagcaaagaaatgtgttaccatagtgggtgacgaacagacattttatgagatgatacaaaacaactcacagcagagacgctatagcgggcttagagacagaatagtggaggagactatctgatgaaaataagaaaacttacaaatgaagagataaaaggggcatgtgcctttgcggtaagtatatacaatatcgcaatcagaggctgctttcggacacaggactgtcatcgatattttgatgaatatatggatgcagacaggctgacggacgaggaaagggccggtgttcttgtagtatttggtgcgtttgatagcaatgtgctgtgcggagtgtgcggcatgacgaacgaggggcatatcaccatgctgtacgtgcatccgcagtatttaagacgtggaattggcaaaaagcttctggagagagtcaggatatatgcgcgcatgcagcttaatctcatgcaggtgtctgtaaatgcaatgccggcatacacggcagaatacttcatgcatgtgggctttaagagtgcatatcagggaggcttttgcaatggacaaggcgatatgtacgttcctatgacagcaaaaagcatatatcaggtggagtatacaccgcgacatatagctgataagacttttattgcaatttcagttggctttacatgccttgtatttttttcaggactgatatatgcggtatgcgcggggcttactccgtaacgctcagatgcagttttaatgggctacaatagttgccggtcatactttggtgtgaacagtaactaatattgtatacataaatatgcatatttatgtaacaaaaaacagttgaaaaatcggctgtattatgatacactttttacaatttaagcagatatactatgcaactacactttataagaaaaaagagacgccctctttttttttgcgcagacgtaaggttagttgcagctaagaagcttatggttacaaagtataacacgaaagggcagggtaaagatgaaagatttttaattcttgaagatggtaatgtatttaccggaaccagcattggttcaacaagggaagtcattagtgagatagtatttaacacatcaatgacaggatatctggaggtacttacagatccttcctatgcaggacaggctgttgtaatgacttatccacttatcggaaattatggaatcacaccggatatggagtcggaaagaccatggccggatggatatatagtaagagagctgtcgcgtatgccaagtaatttccgctgcgagggtacgatacaggatttcctcgagaaaaacgatattccgggagtggccggcattgatacacgtgcgcttacaaagattctcagggaaaagggtactatgaacggaatgattaccacaaatgagaattacaatctcgatgagattattccaaagctcaaggcatatactacaggcaatgtggttgacaaggtcacatgcactgagaaaaaggttttaaagggccaaggaaagagggttgccctcatggatttcggtgccaaaaacaacatcgccaaatcactcaatgaaagaggctgtgaagttacaatttaccctgcacacacaaccgctgaagagatacttggtgacaatcctgacggaatcatgctctcaaacggacctggagatccaaaggagtgtgtagatattataaaggaaataaagaagctttatgacagcaatgtgccgatttttgcaatctgcctcggacatcagctcatggcacttgcaacaggcgcagatacacacaagatgaagtacggacacagaggtggaaaccatccggttaaggatcttgcaacaggtcgtgtttatatttcttcccagaaccatggatatgtggttgacacagataagcttgaccctaatgtggctgagcctgcatttataaatgtcaacgacggcactaatgagggacttaagtatgtgaacaagaatatcttcacagttcagttccatccggaggcatgccctggaccacaggattcagcatatctttttgaccgctttattaacatgatgggaggtaaccagtaatgccaagaaataatgatattaaaaaagtattagttatcggttccggtccaatcgtaatcggacaggccgcagagtttgactatgcaggaacacaggcctgccgttccttaaaagaggagggcattgaggtatgtctggtaaactcaaacccggcaactatcatgactgataagcagattgcggatcaggtatatatcgaaccacttactcttgagtcattaaaagagattatcataaaagaaaagcctgacagcatccttcctacactcggtggacaggcaggactcaatctcggcatggagctcgctgagtgcggcttccttgatgagcagggagtaaagcttatcggaacaacagcagagaccatcttcaaggctgaggaccgtcaggccttcaaggataccatggagaaaatcggtgaaccaatcgcggcttcacaggttgtaaagaatatcgaggacggtattgcatttaccaacaagattggttaccctgtagttcttcgtcctgcatttacactcggcggttccggcggtggaattgctcacgatgagcaggagcttatagacatactttcaaatggacttcgtctgtcacgtgtcggagaggttcttgtagagagatgtatcgcaggatggaaggaaatcgagtacgaggtaatgcgtgatgccaacggcaactgcatcaccgtatgtaacatggaaaatatcgacccggtcggtgtgcatacaggagattcaatcgtagtagcaccttcgcagacacttggagataaagagtatcagatgcttcgtacatcagcactcaatatcatcaacgagcttcagattacaggaggctgtaacgtacagtatgccctcaatcctgactcattcgagtactgtgttatcgaggtaaacccacgagtttcacgttcatcagcactcgcatcaaaggctacaggatatcctatcgccaaggttacagccaagattgcactcggctatcacctcgatgagatcaagaacgctatcacacagaagacatacgcaagctttgagccaatgcttgattactgtgtagtcaagattccaagacttccgttcgacaagttcctcacagcaaagcgtacacttaccactcagatgaaggcgaccggagaggttatgagtatctgcaacaacttcgagggtgcccttatgaaggctatcagatctctcgagcagcatgttgattcacttatgtcttatgactttacaggtcttacagatgatgagcttgagaaacagcttgcagttgttgatgacagacgtatctgggttatcgcagaggcgctccgccgtggagttaaatacgagcatattcacgagattactaagatagatctttggtttatcgataaaatcgcaatacttgttgagatggagaaccgtttaaagacagaggagcttacagttgacctgttaaaagaggcaaagcgtatcgagttccctgacaaagttatctcacagcttacagatattgatgaggctgatatcaagaagatgcgttacgacaacggcattgtggcagcctacaagatggttgatacctgtgccgcagagtttgaagcagagacaccatactactactcagtattcggcagtgagaatgaggcggcagagacaaatccacagaaaaaggtgcttgtacttggttcaggacctatccgtatcggacagggtgttgagtttgattactgttcagttcactgtacatgggcgtttgccaaggaaggctgggagacaatcatcgtaaacaacaaccctgagaccgtttcaactgactttgatattgctgacaagctctattttgagccgctcacagcagaggatgttgagagcatcgttaatattgaaaagcctgacggagctgttgtacagttcggtggacagactgccatcaagcttacagaggcacttatgaagatgggtgtcaagatacttggaacaaaggctgaggatgtagacgcagccgaggacagagagctcttcgacgagattcttcagaagacaggtatcccaagagcagcaggtggtacagtatttacagctgaggaggcaaagaaggtagcaaacgagatcggttaccctgtacttgtccgtccttcatacgtgcttggcggacagggtatgaagattgcatggaatgatgatgaaatcgaagagtttatcggcatcatcaacacaatcacacaggatcatccaatccttgtagataagtaccttatgggtaaggaaattgaggttgatgcaatctgcgacggtacagatatcctgattccgggtatcatggagcacatcgagcgtacaggagtacactcaggagactctatctcagtttaccctgcacatactatctcagaaaaagcaaaagagactctggttgagtatacaaagagacttgcacaggcactccatgttgttggtatgattaatatccagtttatcgatatggacgacaacatctatgttatcgaggtaaacccacgttcttcaagaacagtgccatacatcagcaaggttacaggtattccgattgtagacctcgcagcaagaatcatcatgggtgagacaataaagggcatgggctacacacctggacttgctccgacagccgattacattgcaatcaagatgccggtattctcattcgagaagctgcgtggcgctgagatttcactcggacctgagatgaaatcaacaggagagtgtcttggaatcgacaagaccttcaatggtgcgctttacaaggcatttgagggtgcgggagtcgagctccctaagtacaagcagatgattatgactgtaaaggatgccgacaagcctgaggcagtaggcgttgcaaagcgttttgagaagcttggctacaagatttacgccacaagaagcactgcaaagtacttacaggagcacggagtaaatgctcttcgtgtaaacaagatatcacaggagtctccaaacgtcatggatcttatcctcggacacaagatagacctcgtaatcgatacacctacacagggtaacggagacaagacaagagacggcttccttatcagaagaaatgcaatcgagacaggtgtttattgtatcacagccatggatacagccaatgcacttgcacatgcattagagactgcttctgacaagaagacaccggttgacattgcaacagttaagaatctttaaaagtatatagaatatattttatccccggacagtatagcggatatgctgcccggggattttttataaaatcaaaaatatgatgtgttatgcctgtatgcatgccgcaggttataatagaatcggtttttgttaatctgacggaatagtataagtaatacgcgtgaaaaatatgcaaagtttaatagaaatttgacaaattattaacaaaagcaattgatttttacataaatttgtagtataataactttgttaaaaaattaacagcacggatgtgcaatacaatttaaaggagataatataatggcaaagaaagttgtaatcgcaagtgcttgccgtacagcaatcggcaaaatgggcggagcattaagcaatactccagccgcagatttaggtgcaatcgtaattaaggaggctttaaaccgtgcaggtgttgctcctgagatggttgacgaggttaagatgggttgtgttatccaggcagctcagggacagaacgtagctcgtcaggcttctatcaaggcaggacttccaatcgaggttccggctatcacaatcaacgttgtttgtggatcaggtcttaagtgcgtaaacgacgctgctacaatgatcaaggccggtgaggctgatatcgttgttgccggtggtatggagaacatgtcaatggctccttacgctatgacaaaggcacgtttcggatacagaatgaacaatgcaacaatcatcgatacaatggttaacgatgctcttacagatgcattcaaccactatcatatgatgatcacagctgagaatgtatgtgataaatacggcatcactcgtgaagagcttgatgagttctcagcgaactcacagcagaagtgtgaggcagctatcgcagcaggcaagttcgatgatgagatcgttcctgtacctgttaaggttaagaaagaaatcgttgagttcaaaaaggacgagggacctcgtgccggaacaacagtagaaactctttctaagcttcgttgctgctcaggtaaagagggcggacttgttacagccggtaacgcatcaggaatcaatgatggtgctgcagcagtagttgtaatgagcgaagagaaagctaaggagctcggtgttaagccattagctacatgggtagcaggagcacttggcggagttgagcctgagatcatgggtgttggaccggtagcttctacaaagaaggttcttgcaaagactggtcttacaattgatgatttcgatcttatcgaggcaaacgaggcatttgctgcacagtcaatcgctgtagcaagagatcttggtttcgatatgagcaaggtaaatgtaaacggtggtgctatcgcactcggacatcctgtaggagcttcaggctgtcgtatccttgttacattattacatgagatgcagaagagaggatctaacagaggtcttgcaacactttgtatcggtggtggaatgggatgttctactatcgttgagaagtactaattttctttgccaatagatatatgaggggatgcaggtgcatccccttgtagtgtgaattagtttattcacatcagtttatatatatatgattaagttatgctgcagaggcttagcacttaaagcttttgcgtcataatatattttaggaggaattaaaatgaaggttggaattatcggtgctggtacaatgggccagggaatcgcaaaagcattcgcacaggtagatggatacgaggtagcactctgcgatattaagcaggagtgggctgaaggcggaaaagacaagattgcaaaaggatatgcaagacttgtagcaaaagagaaaatgacacaggagaaggttgacggcattcttgcaagcatcactcctggtttaaaagaagatctctgcaaggattgtgacctcatcgttgaggctgctttcgaggatatgcaggttaagaaaactacattcgctgagttagacaagattgctaagccagagtgtattttcgcttcaaatacatcatcactttcaatcacagagattggaaacggacttacacgtccattaatcggtatgcacttcttcaaccctgctgaccgtatgaagttagtagaggttatcgcaggtgttaacacacctgttgagacagttgatgcaatcaagaagattgcagaggagatcggcaagacacctgtacaggttaacgaggctgccggtttcgtagtaaaccgtatccttatcccaatgatcaacgaggctgctttcatcaagatggagggcgtttcagatatcgccggaatcgatgcagctatgaagcttggtgctaaccatccaatgggaccattagagcttggagatttcatcggacttgatatctgccttgcaatcatggacgttctttacaatgagacaggtgacagcaagtatcgtgcatgcccactccttcgcaagatggtaagaggcggaaaccttggatgcaagagcggcaagggattctacgtttacaacgcagaccgcacaaagacacctgtagacgcaatgtaaaagagattaaaacaaaatataaatttcaaggagaataaatcatggatttcactttagatcagaaacatgagatggctcgcgaccttttcaaacagttcgcagagacagaagttaaacctcttgcacaggagactgacgagacagaggtattcccagcagagacagttgctaagatgggaaaatatggattcatgggcattcctgtaccaaaggagtacggcggacagggctgtgatccacttacatacgttatgtgtgtagaagaattatcaaaggtttgtggtacaacaggcgttattgtatctgctcatacatcactttgtatcgatcctattatgacattcggtacagaggagcagaagaaaaaatatgttcctgaccttgcttcaggcaagaagatcggtgctttcggtcttactgagccgggcgctggtacagatgcacagggatgtcagacaaaggccgttttagacggagacgagtgggttcttaacggatctaagtgcttcatcacaaacggtaaggttgctgatgtttacatcatcatcgctattacaagcatcacagaggacaagcgtggacgcaagaagaagaacttctctgcattcatcgtagacaagggaacacctggattctcattcggaacaaaagagaagaagatgggtatccgcggatcatctacatacgagcttatcttcgaggatgcacgtattccaaaggatgcattacttggaaaagagggaagaggtttcccaatcgctatgcatacacttgatggtggacgtatcggaatcgctgctcaggcacttggtattgcagagggcgcattagagagaactatcgagtacacaaaggaaagaaagcagttcggccgttcaatcgcacagcagcagaatacacagttcaagcttgcagatatggctacacgtatcgatgcagctaagtatcttgtatacgcagcagctatgaagaaggcagagtttgctaagaaccctaaggtttcttactcagtagatgcagcaaaggctaaattattcgcagcagagacagctatggctgttacaacagagtgcgttcagttattcggtggatacggatatatccgtgagtacgatgtagagcgtatgatgcgtgatgctaagattacagagatctacgagggaacttcagaggttcagcgtatggttatttcaggctcattactcagatagttaagagagctatcataactgtagagctacttagaataaataaaggagaacaaatacatgaatatcgtagtatgtattaaacaggttcctgatacaaagggtggagtaaaattcaatcctgacggaacacttgatagagcttcaatgcttgcaatcatgaatccagatgacaaggctggtcttgaggcagcacttagaatcaaagacgagacaggcgcaaaggttacagttcttacaatgggacttccaaaggctgatgcaatccttcgtgaggcaatggctatgggcgctgatgatgcagttttagtaacagacagagtacttggtggagctgatacatgggctacatctactacaattgcaggtgcattaagaaatctcgattatgatttaatcatcacaggccgtcaggctatcgatggagatacagcacaggttggaccacagatcgcagttcatcttggacttcctgtaatctcatacgcagaggatatcaaggttgagggagattctgtagtcgttaagcgtcagtacgaggacagatatcacgtagttaaggctaagatgccttgtcttatcacagctctttcagagttaaacgagcctagatatatgacaccgggcggaatcttcgatgcatttgacaaagaggtaactgtctggggcagagctgaccttaaggatgttgacgattcagatcttggacttaagggatcacctacaaagattgctaaggcatctgacaaggtacctaagggagctggagaaaaggttaaccttgatccaacagagtcagtaaactatctcatggagaaattcaaagagaaacatatcatctagtatggaggaaccaaaaatgggtttagaagaatataagggcgtatatatctacgcacagcaggtagacaataagcttagcgacatcgcctttgagttagtcggtaaagctaaagagttagcagcagatttaaatacagaggttactgcagtacttcttggatctaacgtaaaggctcttgcaacagagctcggtgagtacggcgcagacaaggtaatcgttgtagacaatcctgcacttgagacatacagaacagagccatacgcacaggctcttgtatcagtaatcaatgagtacaagccggagatcatgttagttggtgcaacagctatcggacgtgacctcggaccaacagtttcagcaagagttaagacaggtcttacagctgactgtacaaagcttgagattggtgatttcccaatcaacgctatgcctggacaggagcagaagcacaaccagcttctcatgacacgtcctgcattcggtggaaacacaatcgcaacaatcgcttgtcctgacaaccgtccacagatggcaacagttcgtcctggtgttatgcagaagcttcctaaagaggctggcagagcagcagaggttatcgagttcaatcctgcactcgaggagaacaaccgttatgttgagatcatggatatcgttaaggcagttggcaacgtagagaacatcatggacgctaaggtacttgtatcaggcggacgtggagttggaagcgctgagaacttcgagatgcttcgtgaccttgcttcatgcttcaagggtggtatggtatcatgctctcgtgcagcagtagagaacggctggttagcacaggattatcaggtaggacagacaggaaagactgtacgtccacagatttactttgcaatcggtatctcaggagccatccagcacgtagcaggtatggaggagtctgatctcatcatcgccatcaacaaggacgaggatgctccaatcttcgacgtagctgattacggcttagtaggagatttaaagaagatcgttcctcagcttacagcagctcttaaagaggcaaatgctgacgcataatcgcataataatgcaataaaattacattactaatacatttaagcacagtactgtttatcgcagtgctgtgtttttttgaccataaatatagcgtaatctttgttatactacgacatctagtcgcatattataaatttgcccccacatttatgaaaaattcggctaattttacaattgaggcatttatcccaatgtgataaaataacaacgttcaatcaaatgtggaggaattggatttcgaaaagttaaaaactttagcgccatgcaccggcaggaacgagaaattatgtcggttaacgaggtttcaggttatcgaaaattcggcggatgcctggacgcatatatggatgcgtatctcgagccaaatatgatggagacatcaaaacaaagcgagagaaccatataaatcaagtagctgttcagtgcagaacagttacaatttgtacatttaaaattatatatcgaaaaggagatctaacactatgtgtggaattataggatttacaggccgtttagaggcacagaagattttgacggaaggactcgcagcgttagagtatcgtggatacgacagtgcaggtatcgcttatttcaaggatacaggcaagatttctatccgcaaaaccgtcggaaaggttaaggatcttctcgctatctgcgatgatgagaacaattcaacctgtggaatcggacatacaagatgggcaacacacggtggagttaccaatgccaatgctcatcctcacaaggttggaaatgtcgcactcatccacaatggtatcattgagaactaccacgagatcgtaaacaagtttgatcttgcagattctcttatatcagagacagatacagaggtagcagcagctcttataaacaagctctatgacggagatccaaaggctactattaagaaggctgtagcagagcttcagggttcatttgcgttctgtatcatgttcaaggatcagccgggaaagatttttgctgtcagaaatgtaagcccgatggttgcaacatattgcgatgacggagcatttatcgcatctgacctcacagcatttatcaaatactctaagcgttattttatacttccggagtacactatcatgacaatgactgctgatggaatcgaaatggaggatttagagggtaagaaagttgagccggattatcttgaggtaaactgggatgtaacggcagctcagaaggatggatatccgcatttcatgatcaaggaaattcatgagcagccgacagctatcacaaggactatcactccaagaatcaaggattcacttccttgctttgaggatgataatattcctgattcgttcttcgaggatataagcgacataacagttgtagcctgtggtacagctatgtatgcaggaatggtcggaaaagctcttttaaagaacaagtttggtattcctgtttctgttgagattgcatcagagttcagatatgagcagcctgttctcacagacaggtcaatggttatttttgtgtcacagtcaggtgagacaatcgataccttagaggcacttcgtctggctaataaatatactaaaaagacgctttctatcgtaaatgtaaagggttcaacaatagctcgtgagagtaactatgtactttatacacacgcaggtcctgagattgccgtggcaagtaccaaggcatacacagttcaggtggcaagcttttacctgattggatgcaagcttggtcttgtatccggccgtatgaccaaggaagaggcaaagacatttattgagaatctgcaggaggttccaaatctcattgagtcagttatcacacaggcacctgagattgaacagcttacgaagagaatgacaaatgctgcaaatgcgttttacataggacgaggacttgattatgcattaagcatggagggcgcactcaagctcaaagagatttcatatattcatgctgaggcttatgcagcaggagagttaaagcacggtacaatcgcgctcatcagcgagggtgttccggttatcgcagttgctacacagagccatgtatacagcaaggtcatctcaaatattcgcgaggtaaaggcgagaggcgcatacgttatccttcttagcaaggataaggatattacagataagtcaatctgtgatgtgcatatctcacttccacaggcaccggatgagtttgcgattttcgagtcagttataatctgtcagcttatcgcttactacacatcaacaggaaagggcttaaaccctgaccagccacgtaaccttgcaaaatcagttacagtagaataaataatttccccggacatttatacgatgtccggggattttttttacgcttgtgcgatacaatgcagcatatgtaagatatcgatgtatatgtcagtgatttgcacggcaccaacacattttgttaaaaaattgttaaaaaaataacaaaaactgctttacacacttcttgcacggtggtatgatacataaatgcgggttactcatacgagaatccagcagccatacaattttcatatgcgctcttatgccgtgtgacagaagcacagcataacagaattaggacgagacccatatgggcttttaccaaaaggaggaaaaacaatgcgcaattcaaaaacaaacgaacttgtactgacaggtttattcacagccattatcattatcatggcattcacaccactcggatatattccgctcgtagttatcaacgctacgattattcacattccggtaatcctcggttcacttttctgcggacctaaaaagggagcattccttggatttgtattcggatttaccagttgtctaaaggcaactatagttggaggaactctttcatcctttgtattttcgccggtgcttgccgcatccctggtcggaacctcaggtatatttaagagcttattcatagcatttgttccaagaattttagtaggtgttataccttattttgtatatataggcatcaaaaaggtgcttgcgtcagagaagaaaaatctctggggcacagttttaaatgtgctcatgtcagtattccttgcattcggagtatatgcattcctcggcaagatgtcagagtcactttcacaggcagccgctttaggaatcggcatagcagtcggagctgtagtatttatagtagttgaggctgtatttatcagaaagagcacacaggttattccgtttgtatatgcaggtgtagccggtgccatgaccaatacactgcttgtaatgggctcaatcttcgtgctttacaaggatgcttatgcagatgcaatcggtgtggcaggaaacgctgtgctgggcgttatcaccggagtcatcagctttaacggagtcattgaggcaatagttgcagcaatcatcgtataccttgttggattggttttaaatactatcaaaccaattgcagcaaaataaattcagatagatttaaaataaatgtgaaattgtatgtacggcggactgataaggtccgcctgttttataagcagttggactaggaatggtaaaaaagcatttgagttaaaagaaaggcatgatataaggtgaaacatatgcatgaaatagacataatggatatcggcggcttcaaaataggccaagccgaggacactaagggcttgaccggctgtacggtatttctttttgataaacagtcaccggcgggagttgacataaggggaggcggaccggcttcgcgggagacaccacttttaaatcctgtggcagacgcaaagggtatccatgctcttgtactgtcaggcggctctgcctttggtctggatgcagcgggaggcgtgatgaagtatctcgaggagcgcgatataggctttgatgtgggagtcacaaaggtgcctcttgtggtgcagtcgtgtatttttgacctggtaataggtgataaaaatgcaaggccagatggcaaaatggcatacaaggcttgtgagaacgcttcttatgatacctttttacagggaaattatggagccggaatgggcgcaacagttggcaaatatatggggcgtgagcgcagcatgaagagcggaataggagcctatgcagtacagcttggagaactaaaggttggagcagtggtgacactgaacgcacttggtgacatatatgatatagatacagataagaaaattgccggagcactggatgaaaatgggctgctttttgatgacgagacagcgtattttgaggcagcggcgaagattcagaatatgtttacaggaaacaccacaattggtacaataataacaaatgcaaagcttgacaagaccgcactcaacaaggtggcatccatggctcacaatggctatggcagagcaatcagacccgtgcacacgatggcagacggagattcaatctatgctgtatcagtgggcagtgtgcctgccgatatcaatctggtggggccaatgagtgcctatgtcatggcaaaggccattgccaatgcagctagaagtgcaaagtctgtggatggctacaaagcattttgcgatgtaaacaaaaaatgactgcagaataataatagttttatacagaggtgaaaatcatgttaaaaggaaaaacagtagttttgggagtgacaggaagcatagcggcatacaagatagcaaaccttgcgagtatgcttgtaaaacagcacgccgatgtcaacgtcataatgacacacaatgcaacaaattttataaatccaatcacatttgaaactctcacaggcaacaagtgcctcgtggacacatttgacagaaactttgaattcaatgtagagcatgtggcgctcgcaaagagagcagacatttttatggtggcacctgcatcagccaatgtgataggcaagatggcaaacggaatcgcagacgatatgcttaccaccacaatacttgcagccaaatgtcctaagcttgtttctcctgccatgaacaccaatatgtacgagaacaggattgtgcaggacaatatcaaaaagctcgaacactacggctttgagatgataaagccggctgaaggatatcttgcatgcggagacaccggtgcaggaaaaatgccggagccacagacacttttcaactacataatgaggacaatagcctgtgaaaaggacctggcgggcaaaaacgtactcatcacagccggagcgacgcaggaaaaaatagacccggtacgttttatcaccaatcactcaacaggcaagatggggcgtgccatagcagaaaactgtatgctccgcggtgcgcatgttacactggtcaacgcttcagtatcggttgagccacctatgtttgtagatgtggtaaatgtgacatcggccgcagacatggcagacgtggtgaaatcaaaggctgctgaacaggatattatcatcatgaccgcagcagtagcggatttttgtccatcacatccggctgatgagaaaataaagaaaaatgacagctcatatgagtctgtaattgagcttgagcgcacagaggacatcctttcatacctcggagcacacaaggctaagggacagcttatatgcggtttttctatggaaacccagaatatgcttgaaaactcgaaagcaaagcttgcaaagaaaaatgcagatatgatagtggcaaacaacctcaaggtagcaggcgcaggctttggaacagataccaatgtggtcacactcatcacggctgacgactgcacagagcttgaaatcatggacaagagctgcgttgcagcaaggattatggaccgactgctacagatgtagagcttcgattttaggtttagagtgggtgcgtggagcgggtgggatgcggattatatatcccacatgttcggaaatttcgataaaagttgagtaagtgcatggagcagtaagataaatagaagaagtatattagtgcatggaatgctcggtgcacagattgtatgtcgctacgttcgatttacgacgtgtcgtgtgggagttatatgccgtcatcagcaaaagcggcgcggaaaatactcgttcaagcagcatagcctgaatttagatattgaggtaaaatgcgcgtttgattttccgcgtctgataagctctgcggatgacggcatttactcccactagactaaggagttatgagagcggagtgatatataatctgtgcaccgggcgcttcatgcacttacagaacctgaattcgaagcgctccatgcacaagcgattacataagccgttacaccgtgcagtccacagtcggcagctctcctgtcacatcgaggaagagatttgcaaaggtctgctcgtagtaaggctccacccagagcaggccgatgccgagcgacagcgcgcaaagtacaagcataccgatgaagcttacgttaatgtaaatgactctgagtatgttgccacgaatcagctttatggcatgagccagacatgcaaacaccgataaatcttcgcgcgagagtaccagatacaggtaaaacggaaacagaattagtacgataaagctaagcacagcacttgcagcatataaagcgatggcaattcccatagtgtcgccgcttagcttgaaaaagtttttggctacaaggaaaggcgcctttgcaatcatagagatggcataatatatgatgtatgctccaaaatatctgttggagtgattcataaagcagtagaatacatcgctgatacggcactctttctttctggccatattgaggtggaaacgtatgagtcccatctgcagcacgccgaccacgatagataaaagcacctcggcaatgtagtagatgacggtctgaacctttgtcgcatatacatttccgagcaggtaggtgaaaggcaggtcactgaacagattgatgagtgtgacagtgaggaaaacgctcatgctaagtctgtatcttccgcttaggttctctcttgatattctttttaattctttggatttcttttttgggttcattatatttctcctgaaataatagttttgaattaatgcttaagttaatgtttaaattaatgctttgacaattgtcagatatatagcatatacttgtattcatatggttacacaaaatcacaggaaggaccacacatatcatgcagacagatgaaacaatcgacaggtatttctatataacgggctggatatgcatagctgtatttgcggctcttacggcagtgattggagtatgcggtacgcagatactcacaaaggtgcctccatgtccgctgcacgcatatacaggctactattgtccggggtgcggtggcacgagagccacatttgcgttgctgcacggacatctgataaggtcgtttgtactccatccgtttgtgccgtatacagccgtttttggaggctggtttatgctgtcacagacactgcagcggataagccgcggcaggctgcacatcggaatgcacttcaggccattatatatgtggcttgcacttgccattattgtggtaaactgcatagtcaaaaatatgcttatattattttgcggtattcatctgctgaagtagctcattgtagtcgataccggtcaggttctggtattcctttaatataccctctatgcttccgtattcgtgaagcatggcggcaaacgaaccgatatagataataagagtgataacaacagcggcaaacgcaatccagaatgaggtcatagccatgctgctcattgaggtggcaccgccttttgacagtaaagcaaaaatcatggcaagcgagccacatatgatagacacataaatacagctgcacgacgcgatggcaattattgaaagcacaagtgctgcaacctccatattgcgtgagcgtttattgtagaaattgttgttgggattaaagcccggcccataattactgccgaaattatagttataatcctgattataatcaaatttttgtggatccataataaaattcctttctataaagttgattttattgtatcacttcatttataatacgaaaagaataagttttttaaagaggtaaaaaaatggatattattgctgcaattgcagaagaactgcagattaaaaaaggacaggccgaggccgctgtcaagctgatagatgagggaaacaccattccttttatcgccagataccgaaaggaggcaaccggctcattaaatgatgaggtgctcagaaatctcttcgacagactgacatatctacgtaatcttgaggacaagaagcagacagtgcttgcaagcattgaggagcagggcaagcttacggatgagcttaagaaggcaatccttgaggcacagacacaggtggcggttgacgatttgtacagaccttaccgtccgaagagaagaacccgtgccataatcgcaaaggaaaagggcttagagccactggcacagaccattttagcgcaggaatcgactgttgatatcatgtcagaagcagctaaatatgtggatgcagaaaaagacgtggcagatgaagcggctgcacttgccggagcaaaggatatcattgcagagaacgtatccgacaatgccggttacagaacaaaaatcagagagcttaccatgcaaaaggggcgtcttatatcgacagccaaggatccaaaggcagagtctgtctatgagatgtactatgaatttgatgaggatctttccaaggtggcaggtcacagaacactcgcaattaatcgtggtgagaaggaaaaaatcctcacagtaaagatagaggcaccgacagaggatatcataaaatatcttaaaaagcaggttatcacaaatgatggagcgcctacagcaaccgtactcacagaggtagtggaggatgcgtacgacaggcttattgcacctgccatagagcgtgaaatcagaaataatctgacagaggaagcagaggatggtgccataaaggtattcggaaagaacttggagcagcttctcatgcagcctccaattgcaggacaggttgtgcttggatgggatccggcattccgtacaggctgcaagatttctgtcgtagaccctacaggaaaggtactcgataccacagtaatctacccgacagcaccacagaacaaggtcgaggaggcaaaggccgtaatcaaaaagctcatagacaagcatcatgtcacacttatctcacttggaaacggaacagcatcgcgtgagtcagagcaggtgattgtagagctgttaaaggaaattccggtaaaggtgcagtacatcatagtaaatgaagcaggtgcgtcagtatattcagccagcaagcttgccacggaggagtttccgaattttgatgtgggacaaagaagtgccacatccatggcgcgtagacttcaggatccgctcgctgagcttgtaaagattgatccaaagtcaatcggtgtcggacagtatcagcacgatatgaaccagaaaaagctctcagaggcactcggaggagttgtagaggactgcgtaaataaggttggtgtagatttaaatacagcatcagtttcactgcttgagtacatatcaggcatctcaaagaccattgccaaaaacatcgtggactacagagaggaaaacggtaaattcacatcacgttcacagcttcttaaggtagcaaagcttggaccgaaggcatttgaacagtgtgcaggcttcatgcgtatctcagacggaaagaacccgcttgatgccacaggcgtgcatcctgagtcatatgatgccacaaaggcagtgcttgaaaagctcggctacacaatggaggatgtaaagaacagaaatgtagttggaatctcaaagaaggtatctgattacaaggagctcgcagacgaggcaggagttggtgaaatcacactgcgtgacatcgttaaagagcttgaaaagccggcaagagacccgcgtgaggatatgccaaagccaattctaagaagcgatgttcttgagatgaaggacctcacaccgggtatggtattaaagggaacagtcagaaacgtaatagatttcggatgcttcgtggatataggagtacatcaggacggacttgtgcatatctcagagatatgtgaccgctatatcaagcacccgcttgaggctgtcagtgtaggagacatagtagatgtgcaggttatgagcgttgacctcaaaaagcagcgcatccagcttaccatgaaaatcggacagggcacagacaaggccggtaagtcagaacacagcggcaaagacagtgttgccaacaaggctgacagaagtaatagaaataacggcggcaggaatagcagaaacgatagaaatagtacaggcagcaagaataataacaacagaaacaaaaagccacactacataaagggcaagaaaaataatttctttgacaatattattcttgataattaaaaacaccttgacaaaacaccacaaagtgcatatcataaatttgtaaaaaaataggaattcttcagggcagggtgcgattccctaccggtggtacagcccacgagccgcaaggcatgattcggtgtgattccgaagccgacagtatagtctggatgagagaagattattaggtgtcattacactgtgatattaagtcccggaagattttcttccgggattttttaaagccgctattcagatttcagatagctgcactcacaatatcctcaggattccttaagcatcaaaggagtgtaaaatggacgtaacaacaaacaacacaaaatcaaaagtaaacatcagacttttagtcggcacaggaatgttaagcggacttgcatttgtacttcagtacctcgagtttccaattccaatcatgccgttttttattaggtttgatttttcagacctgcctgcacttatcggagcatttgcatacggaccgttagcaggagtgattgtagagtttatcaagaacctgcttcactgtacagtaacacagagctttacggtaggagagctttcaaactttattctcggagcagtatttacaggaacggcagggcttatatacaagaagaacaagactaaaaagggtgccatcattggtgcgatagtcggctcggttataatgggaatcatcagcttcccgtcaaacctgtttattgtatatccagcatatgagaagtttacaccaataaatgaaatcatggatgcatacagcaaacttctcccatcagtaggcaagctgtggcaggcacttttaatattcaatgttccgtttaccatcgtaaagggacttatatcaacacttatcacagtgcttatatacaagagactgtcaccggttttaaagggcagaggatagagaaaatacctgacacaatatatattagttataaatataaagagcgcagtcaattgcgctcttttctttttttaaaaggaatgttataataaatccaaatatttagttgggagcaggacatgaagcttgaatttgatgtaaaagttacagaaaaagatttatattcatttaatatagagcaggcgtacaagggcagtcagggtgtcatatcattgctgtttgctgtgctcttggctgcggcagcagtgttaagcgcacaaaaaggcaatacggagtatgtggtgctttatattatagttggtattctggtgctgctatatgtgccgttttcactcaagggcagggtaaagatgattatgaagacaaatgaagttttctcaaagccactgcattttgagatagatgaaaagaacataaaagtaagccagggagatgagatggcgcagcttccgtgggagcaggtgtacagattcgtggcaaatgataagaggatacttatattcagcaacaggaagaatgcatacattctctcaaaggagcagctgggcgacagctatgagccgttaaaggagctggcaggtagtacactggagaaatacagactgaaaatcaaataaacaaaaacagatataagataaaagatatagataagggtataagctggtaatatgagtagtgaaggaaatataacagtaatagaaagcttttcggcagatgatacgcatgcacttggggttacgcttggacagcaggcaaagcccggggatgtgtgtacacttgtaggtgatttaggagtgggtaaaacagtgctcacgcagggcatagcagaggggcttggcatcacagagccgataaacagccctacatttaccatagtgcaggtgtacgaggaggggaggcttccgttttatcatttcgatgtatacaggattggtgacattgaggagatggatgaaataggctatgaggattatttctacggagatgggcttacgatgatagagtgggcaaatctcattgaggagatactcccaaagaagagaaaagagattactattgaaaaagacctggaaaaaggctttgactatagaaaaataacaataaaagaggttttataatgaagatacttgcgcttgacagctcagggcttgtggccagtgtggctgtcgtatcggacgataatctgataggagaatacacgataaattataaaaagacacattcgcagacacttcttccgatgcttgatgaggtggctaagatgacagagcttgaccttaagacaatagattttattgcggtctcagcaggaccgggatcgttcacagggcttcgcataggctctgcgacggcgaaagggcttgcactggcactggataagcagatagtttctgtgcctactgtagatgcgcttgcatacaatctgtggggcagtgcagatgttgtgtgtccgcttatggatgcaagaagacagcagacctatacagggctgtatgattttaccgatggcaggatgaataccattttgccgcagtgcgtagtgatgatagaagagatagttgaccaaatcaatgagctcggtcgcagggtgattttccttggagacggagtggatgtgttcagggattatatcaatgagcacgtaaaggtggactatgactttgcgcctgccatgtgcaataagcaaagagcatcggctgtagcatgtcttggacaggtgctctatgagcagggcagggcagaaaatgcagcagaccataagcctgagtatctcagattatcacaggcggagagagagagacaggaaaaggagagagattttagaatatgataataagacccatggagccggaggatgcagactcggtggcgcagatagaaaaagacagcttcacacagccctggagcagacagggatttttggatgccatgaggcttccggagaatatcatgcttgtggcacaggaggatggcgagatactggggtatcagtgcacgtatgtgtcatttgatgagggagagctgaccaatatagcagtcaaaaaatcagcacgaggaaaaggtgtgggtgcacatcttatcagatgcttgcaggaaaaggcaaaagagtcaggtgttgagcgcattgtgctcgaagccagggtgactaatgaggctgcgatatcactgtatcagaagatggggtttgtaaaccttggaatcagaaaaaatctatatgagcatccggtagaggacggtgtcatcatgtcctatactgcggaggaaaatttatgttagacgtgtgtttacttggaacagcaggcatgatgcctttgccaaacagatggcttacggcactttcgctaaaatataacggcagcaatatacttattgactgcggtgagggaacgcagattgcgatgaaggaggccggaatcaatttcaagccgatagatattttatgcatcacccactttcatgcagaccatatcagcggattgccggggcttcttcttacaatgggaaatgccgagcgcaccgagccgcttaccattattggacctaaggggcttacaagggttgtcactgcacttcggacgattgcgccggagctgccttttgagataaaatgcatagagctcaatgagcaggatgaatattttgagatgaacggatatcatatccatgcattccgcgtaaagcatgcggtgctgtgctatggctattcggttgagataaagcgtagtggcagattttccgtggaaagagcaaaggaaaaagaaattccgatgagactgtggaatcctcttcagaaaggcaataccgttgaatttgagggcagagtgtatactccggatatggtgcttggaccggcaagaaagggcataaaggtcacatattgtacggactcaaggccacttgagcacatagtggaggcagcagagggatcagacctttttatctgcgagggcatgtatgctgaaaaggaaaagatagtaaaagcaaagcagtataagcatatgaccttttacgaggcagcagacatggcaaagagagccggcgtgaaggagctgtggcttacacatttttcgccgtcacttgtcagggcagatgactatatgccacaggtgagggatatttttgcaaacgcatatcttggaaaagacgcaaagagtgtggagcttatgtttgacgaggactaaggaggggcgatatgaagaaaacaggtatagttattttaacaatagcgctgattgccgcgatatgtggttcgttttatgtcgtaaacgacaagtctaaaagggctaatcaaaaggaaaaggtactgaccgaggtacaaagaataacaactaaggatctcgacaagaactatccgcagacaccccgtgaggtggtgaagctttataacaggattgtgaagtgctactatggtatgcagtatagcgatgaagagcttgatgcactcaccgaccaggcgcttaagctttttgatgacgagcttgcagcaaacaatccaaaggatacatacaaacagtctgtcacggcagatgcgcaaagctacaaggaacagggcattacacttgctcagaccggagtgtgtgacagcaatgatgtgaaatatgtcaccgataagggtagtaaaattgcatatgtaaaggcatcttacttcatgaaggagggcagctcgtattctaaaacatatcaggaatatgtactcaggcaggataaggaaggctgttggaggattcttacattttataagattgcggcagattctgatacggaaacagaatagagtaatataattaagagtggtgtaataaaatgacagaaaatacagaaacaaaaaaagaaattaaaatacttgcaatcgaaagctcatgcgacgagactgcggcagcagtcgtagtaaatggacgggatctgcgaagtaatgtgatttcatcgcagatagctcttcatactttatatggaggggtagtaccggagatagcttccagaaagcatattgagaaaattaatcaggttatagagcaggcactttcagatgcacatatgacactcgatgatatagacgcaataggcgtaacatatggtccggggctcgtaggagcactgcttgtaggcgtggcagaagcaaaggctatagcatacgcaagaaacattcctcttgtcggagtgcaccatatagagggacatatcagcgcaaattatatagaaaataaagacttagagccgccatttctggcactcgtcgtatcaggaggacacacgcatctggtgagagtggtagattacggtaaatatgagatcctcggacgcacgagggatgatgcggcaggagaggcatttgacaaggtagcgagagcaataggacttggctatccgggcggtcctaagatagaaaaggtttcacatgagggtgacccgcacagcatagagttcccgagagcaaagattgtgggcggagtttatgatttcagctttagcgggcttaaatcagcagtactcaattatttaaacggctgcaggatgaagggactggaaataaaccaggcagacgtggcagcatcgttccaacaggcggttacagatgtgcttgtcggacacgctgagaatgccatagatgagtttaaaatggacaaatttgccattgcgggaggcgttgcttctaatggtattatccgtcatgcgatggaggaaatgtgcgcgcgcaagggtgttaaattctatcgtccgtcaccgatactgtgtacagacaatgctgctatgataggtgcggcagcatactatgattttatagcaggtaagaggtctggacttgatctgaatgcggttccgaatttaaaacttggtgaatgattctgtaattgcttccggttacaccggtgtgcaaacataatgtgcagatttatcatggataggaaaataaaggaatatggataagaagaaatacacagcaatcatactgtcagccggtacaggaagccggatgaaaagtaatatgccaaagcagtatatggagcttttggggcagcctgtgatttattatagtataaaagcatttgaggatagtccggtggatgaaatagttatagtctgcagtgcggattatattgagtatttcagacattcgataattgaaaaatatggctttaagaaggtgaaagcaatagtgcaggggggcaaagaacgctacaactctgtatatgaggggcttaaagcagcaaacggcacggactatgtgctgatccatgacggcgcacgtcctctggtggataatgaaataatagtccgttctatgcatacggttgaaaaagaaaaagcatgcgtagcaggaatgcctgtaaaggacacaataaaggtgtcagatgaattgggatattcagcaaatactcctgacaggaaaagcctgtggcagattcagacaccgcaatgctttgaatatgatttgctggctcagtcctatgataagctgtttagtgacatgtcatgtgggaaaagtgtgccggcaattacggatgatgcaatgatagtagagtatgggagtgacacaaaagtaaggctcatagagggctcgtatgaaaatataaaggtcacaactcctgaagatatggggattgcagaactttttttaaagaaacgcagaaaaatgtaaaaaaattagaaattagtgttgacatattgtaacattgatgataatataaatcctgcgctgaacaagtgcagacaactaaacaattaagtattaattgtgacacgcaggggtatcgaagtggtcataacgaggcggtcttgaaaaccgtttgtccgcaagggcgcgtgggttcgaatcccaccccctgcgctttcttttgccttaaaacagatatgcaaaagaaaataaaaaagttcttgacaaatgaaaaacattttgatagaataagcaagctgtcgcaagacagagaacttaaaacagagttcaaaaaataaaaaagtgcttgacaaacgaacagcgatttgataaaataatcaagctgtcgcaagagagcaaaacaaagaacattgataactgaaca

SEQ ID NO: 1436 - DNA, 43260 bp, Unknown
  gut microbiota DNA sequence
aatgatttgaataataaatgtattctaaactgtacctaatatgttttctgccacaaaaggtgcaaaatggggtaggaaacgaagcgatggggtagaatatgtaattgacatagcggtctgaatggcatattattcatacaaaggtctccattcaccttatggttttgaactatagaagagatgaacattaaagaaattattatgttatagtttggactggtcgaaagacctgataaactcaggaggaacacaatggttaaacacattattttatggacacttaaggatgagtacacagaggcacagaagaaagaaatacgtgccggcataaaggaaggcttagagggacttaaggggcagattccgggaatgatcgacatttcagttcgcacagattatctccctacatctaccgtagatgtgatgcttgatactacatttgaagatgctgatgcacttgcagcatacgcaaagaatcctaagcatgttgcagtggcggataccagggtgagaccgtttactgcaaatagggcatgtatggatttcgaggtgtaatagcgggaattagtgtatttgactataaatcgtttctaaaattaggcgatatgtcaaaaatgacgaatattgtcaaattatcattgaaatagtactatggtaatgatataataatcttactgtatagaacgaaacctaaatgagaaagggagaattacatatgggtgaggaagctaaaagcaaaataatggaaatgccacttcagcagagattgaaatatggctataagaaagtgttggatatgctgcttgtatcgggaggcatatcaattgttgcaattttattggtttattttggtgcaaaggctaatatctttggcgctgagtcaggaacagttgctacatttttcctggttataggactggccaatgtaataatagttggaattgtagctacaatgattgcgaaaaaaatcagtgatcaggttattgattctgtgcttgagccattacagcagattgaggtagtggcaggagagcttgttaatggaaatcttcacagcaatctggagtatcattcagatgatgaggttggcaaacttgcacatgaccttagaaagtctatcaggacacttggcacatatattgatgatatcgaccagactatgagacagtttgcagatggcaatttcaactttaaaccacaggtggagtggaaaggcgattttgtaggaattaaagaatcaattgttgcttttgaggagagcatgtcagatacagtaagtggtatccagagagcagcaaatgaggtttcaaatggtgctgagcaggtagctgccagctcaagtgatctggcgcagggcgcaacagaccaggccgccgttgtagaggagcttacagccacacttgcttctgtagcggatcaggtagctgagaatgccgagcatgcaaaggaaataagccagaaggttgacggactcggaactgagattatggatagcaacggacagatgcatgagatggttacatccatgaatgaaatcaatgaggcatctcaggagattggtaaaatcatcgcaacaatcaatgagattgcatcacagacaaaccttcttgcactcaatgcttctatcgaggcagccagagcaggagaggcaggaaaaggctttgcagttgttgcagatcaggttactgtacttgctgagcagagtgcaaatgctgctaaggagtcagcagctcttattgagtcttcagtcaaggctgttgaaaaaggaatggttattgcaggaaagacagcatcgcagcttgaggaggttgcaggcaattccaagactatcacagatgaggttaatggaatcgcagagacacttgagacacagacagatgctatcaagcagattaataatggtgtagagcagattaacgatgtagttcagactaactcagcttcttcacaggagtgcgcagctgcaagtcaggagatgagcagtgaggcagagagcttaaatgagcttatccgtcatctgagagttgctgagcagtaagcatattatattgaatagaattattgatggtcacgatcaggagtgatttgacggtaaccggatgttactgttaagactgaggtgtgaagcagcaatattatatccccacgtttatttccatgtatatggcgaaaaacgtggggatatgttattatatgaatatgacattgaaagatagaataccaaaagaattttatagcttattccgcacgaaaaatatggatgcatatatgcagatagttgttgcgttatatgaggagaataacgaggtctatgcatcactgggcctgacacgtgaggagtgtcagataatcatagcggataccatatcaaaaacaggcattgtatggcagactgattataatgaagatgagagtaataaagatagtggcagcatggataatcatgatgattataatcctgattccgaaattgatgttatatatgaccaggccagtttcgcatacaccctgacaccatcagctatattgggcaggcttataaactggggctggatcaggagtgattttgatgaaaagctcaacacatatgtgattgcatttcctcagttcagccagatgtatgctgagctatttaaaaagctgcttgtggatgatgacagcagggagcgtgagagcattttggctgtttacagtgcgctttttacatacttttcagatccggaaaaaaataatgatattctgaaaaatgcgttgtatacgtcaaaaaatcttggtcagcttttatcaaatatgcaggatggtatgagggcatattttgatgagctgtcacgtatgaaagattttataggtatacagaaggtgctgattaaggaaattaataacagtgatagcagacgttatgccatccttacaaccacggatagcttttatcgttacaaggaggctgtaaaggagcttataagtaaaatccttaatcagaacgatgacagaagggctgagcttgagggaattctttcgcagactacacccggtacgtttgagagaaaacgctatgagtacagcgtggagtactgtgataaggcaagtgagcttgtttataaggtggagcatgagtttgacctgattgagagaaagtacaacaagcttattgagcagaagacgatttttgcaaagagggcgcttgcaaggatacactatatcctgcaggaaggcgcagatgacgaggataatatagtaaagctcattaacctgatagataagagtgataaaacagatgagatacttggggctcttcgaaacagaatgaagttcaccagacagttttacaatgtaacggacgacagttttccgggaagaagagagagaggaagaagtgagtttgttccgtttgttattgacgatgcttcggcaggcgaagatgatatggcagattttgtgccaaagccattgtataccaaaaaggagcttcaaagcttcagagataaaaatatgcgtgatggcatgtttgtgacagatgaacaaactgtagaatccatggaggatctggaaaagcttctgtttttatggcaggaggagaccaatgagcgcatgggtgaggatacggtgagtctggatggagagataacaaagaatgatggtgtaagctactcaaggcttgtaatatcaaaatcggactctaaacgagaggtatagaaaagagagcaatgtatgtttgaatatatggagaatgtttcgccaaatgaggcagaaaatattagaaaaactattcaggatctgttgaggcagacctgtattttgcaaatgaagtgtgaccccgttacattgattcaaagagataatccaaggtatcaggtgtgtcttagaaacagagagtttatctctgattatctggctgtacttgactgtgagctggttcatgaccagcaggagcatcttttcagaataacgggtgatggtgtcatgctcgagaagatgactcttcttactgcaaggattgtcattataatgaagatgatatacagggataaaatcatgggcgaggggcttaatgcgacaacaacgaatctggcggagattcgtgagtatggcagaaataccaatttgattaccagaaagctcactaatcaggaatggtcagacgctcttttgcttatgaaaacacatcagatgattgaactgccgggggctattgcaaacctggaggacaacacaccaatctatatttatggcacagtaaatatattctgctcagccatggatataaatgagcttgtgcgcatgtacagtgatgaggtggagctgattaagtatgataacgagtcggctgcaacacttgaagctgccggattgaatacagaaggcagttctgtaaaccatacccatgaatttgccaagaacagtgaaatggaggagttaccaattgagtcagtctaagaagatttttaccagaatgtgtctaaacaactggggcggaataaatcacaaggttttgcaatttaatgagtatgtcaatttgttcagtggtaagagtggctcgggaaaatcaaccgtcatggatgcgattcaggtaatcctctacggcagcttcagccccacattcttgaacaaggctgcagatgatgcaaaaaacaggagaagtgttctgagctatttgaggggtgagcagaaggatggctccgcaaatcgtggcgactgtgatttttgttcggtcatagcgcttgagatagaggatacaggcagtcatacatttacatgtataggaatagcatttgaggtacgaaaaaacgattctgagattaagagatttgtgtacttcagtcattcgggcaggatgccggagccttcatatgtgacagcggacggcttttgctattcaaataatgatattaaaaagcttgtaaatactcgctcacagtcagctgacagacgcgccagaggggatgtaaaccgtatttatgcatcaaaggaggcatatcttggcacattatatgatgttattttaggatatattgacccgaatcgttttatcacaatggaaaaaagtgctattgcactcaggatgacaaatggaacaggccagtttatacgtgattatatgtttccaaagagtgactcgggcacgatagagactatcagtgagcagcttgatgcatacagacaaatcagggaaaaaatagaggatatgcgcaagcgtattgagcttctcaaggaaataaaggagtcagggcaggaactgctaaatatccaaagcgatattgtcatggcagagacaatgatcaggtgcatagatatcgaggatatgcgtgcaaagattcaggcagctgaggatgataaaaagcgtatcgaagaagaacaggacaggctttcagaaaaggcagaggatatagccgggcagcaggcagatgtgcagcaggagtatatccaggtatgtgcggatttgaaatcgagcgacttaggaagcaaaaaggatcagcttagggagcttgagaagagaagtctcatgcttaccgacaacagccgtcagtggattaaaatcacaaacggactaaaggcctgggatgaggatgaggtcatcacagattatgtgagcaatgcagttttaaacctcattgaagagattgtggatggcgatgtcacagaggcaaaatgtcaggagcttcatctaaagcttgagtctataaagaaggatatcgaggatgagctcgaggacaatacttcgcagaaaaatgagataacaaaagagcttaaagagaaaaaacgtctggtcgatgatatgaagaacaaccgcaagtcgtacagtgagagcctgcgttcggcaagagctgcgctgcagagagacttaagtgatagatttggcgagcctgtgaaggtacaggtatttgcggatatgtttgacgtaaaggacgaggaatggaagaatgccatagaaggacgtatgggcaggctcaagttctcacttatcacagagccgcgttatgcgcatactgctgctgttattttcagggacatgaagcagtttgaggatgtcgacctcatcaattccaaggctatcatggacagtgaaccaaaggccatggatggttcgctttatgaggcagtggatacaaaggaaaagtatgtagatgtctgcctgaaaagatatctgggacatattataaagtgccggagtgttgacgagcttgagcaggtacgagatggagttacaccggactgctactcatacagcaactttattttcagacatctgaagaagcgcgattatactacaaatgcctgcatcggaggcagggtatccaaggcaagacttgccgagtatgaggcagatgtggagaggcttgagaaggaccagatacagcttatgggtattatttcaagtctcaaggcacagagggattttgagtgcttaaagggggagccggagtattttgtgggcctttctgaggcgtcagatgagcttaaagcagttaattcgcagaaaaatgagctcgaagagattattaggacgatggagaatgggcagtacaaggagctaaaggagaaaaagaggcttcttgagaaaaacatcgatgcacttaagagtgctttttcactgaatcagcagcagataaatgaaaagataagccagcatgagaaaattataggtgcaaacgaacagcgaagagcacagctggaagatatgttacatggctatgttgccggagaggagcttgagaagcaggtgcaggatatgctgcagcatagctcaggagcatcggtcaagagcaaacagcgtgagaagcttattgagctgcaaggcgcagacggaaatggtggcaggcagcagtcgtgtgtggagacgttgcagactgcccgctacaggtatataaaggagtttccgtcaggtcagttcagcggagccgagaagtcaaataaggcatatgaggagctgctggagaagtacgagaaggattatgagccggaatatgagagtgagtttgaggaacagtgcaaggtgatctataaaagtctcagagagaatgtcatcggtacaattcacggtgatatcaaggctgcaaagcgccatgcctacgagataaacagacttctcagggagactaatttctcagacagcacctatcagattaagatagagccggcaaagaatgaaaacggtcagttctatgatatgcttatggcacaggagctggacagcaaaaatctggataatggcggaatagacggacagataagctttggtgaggatgatttttataagaaatatgagcagaaaattaaacttttgacagacaagtttatgccgccaaaggatgaggatgagcatctgcgcatgcagaagcgtaaggaaatggagcagtatgcggattaccgcaattatctgtcattcagcatgtatgagcaggttacggacgaaaacggccgtgtcatcagggaaaactttgtagatgacatggcaggacgtgattcgggcggcgagggacagaaccctaagtatgttgcgcttcttgcgggctttgcgatgctgtatatgcagcagagcaatcgtgattcaaagattaagctggtgcttttggatgaggcattttccaagatggatcaggagcgaagtgcagtgtgtctcaagtatgcaagaaagatggatttgcagctgattgtctgtgtaccggatgaacgtctgcagtcgcttatccgaaatgtggactgtgtctatggcttcaggcggcataataatcagatttctatgatgcatatagacaagggtgattatctgaaattgatggagggatagatatggcatattatatagcggaaggtgccgttgttaaggggcaggtgacaatggctgacggagcaagcgtatggtataatgcaactgtaagaggtgattcagaaccgatagaaataggcagaaattcgaatatacaggacaatgcggtggtacatgtggacttaagccacagtgtcagaatcggtaacaatgtgacaataggacacagcgcaattgttcatgggtgtactataggtgataatacactcatcggcatgggtgccatcgtgttaaatggagcaaggattggtaaaaactgcataataggtgctggcgcccttgtcacccagggcaccgatattcctgacggaagcctcgcatttggttctccggcaaaggtggtcagggcactgaccgcagaggagatagaggagaatcatcgcaatgccatacattatgtggagattgcgagggagtcgctgatttaatattgggcggattatttacataaactttgcaaatgggtggtagcggattttacataaaaaaataaaatcgtaatctgggacatacaaaacagggaaggtataatttatgaaatcaaaagaagacaatacacaaaagaaaaccaaaaaactctcatcaaaggagctctcatgggtattatatgatgtgggaaattccgcatacacactgcttgcgtgtgcgctcataccgatatggtacaaaagccttgccgttggagatggtgcagggcagatttcatctgacagggcaaccgcgtattatgcggtggcaatagctgtgatgacagttgtatcagcacttatcgggcctgtctgtggtgcgatagcagaccatatgcgcattaaaaaggctattttttcaacgaccgtagttgttggagtgtcggcatgcatacttaacggttttacacctacatgggtgctgtttcttgtgatttatgtgcttacaaagatattttacaatgcatcgctggtgttttatgactcgatgcttgtcgatgtgacgacaaaggatagaatggacgaggtgtcttcctacggctatgcctggggatatctgggctcgtgtgtgccgtttctcgtttcacttgcagcgtacatctgtggaccggatatgcttggatacatatcaaaccgcctgtcgatgataataggctttgcagttaccggaatctggtggtttgttgttacaattccattgtttaagagctataaacaggtgaattatgtatcggatgcagcagacaaagatattcataagaattttgaaaatgatgtatttataagagacaatatcaaggagaaaaacaaaacaaacaaaaatccgggagtactaagacttatagctgacgcatttgcacagatttttggaacaatcaaaaaaatagctacaaaagataaaaaagtaggactgtttttggttgcttttttcctttacatagatggtgtaggtactataatagataattgtataaacataggaactgatttaaagcttgattcagtgggacaggtagtgtttttactttttacacagatagtggcgtgcatcggttcacttgtttttggaagactgtcacagacatacaaaactacaacgcttttgtatgtatgcattgcgggatattttgcagtttgtctatatgcacttacactgcatgatctgattggctttggaatcatggcatttggtgtgggatgcttccagggctcattgcaggcgctgtcacgctcatatttttcaaagattattcctcctgagaactcgggagagtacttcggaatctatgatatttttgcaaagggagcttcatttttaggctcgcttgtcatcgcgtcagtaaagcttgcaggcggcacgataaatgtggcggttgcaactatggcaatattctttgcagtgggatttgtatttttaaggcttgcagacagatatgatgcaccgaggcatgaaaataactaaaataaaaagtaacgaaagaaggcttaaagcatgataaacacagagggaacaaaggtctgggcacacagaggagcatccggatatgcaccggagaacacacttgaggcattcaagaaggcagaaaagatgaaggctgacggcgtggagcttgatgtgcagctcacaaaggatggagagcttgtggtcatacacgatgagaccgtggacagagtgagtggagagaagggctttgtaaaggactatacactaaaggagctaaagcggctcaatgtgtcaaagcacatgccgtcctatgacaagaagactcgtattccaacactcgatgaggtgtttgacctgctcaaaaacacagagatgaccataaatatcgagctcaaaaacggtatcgtacagtacaaaaatctggagaaaaaggtactggcgctcgtggaagagtatgatatgcttgacagaatctggtgctcatcgttcaatcatgagtcgattgtgcgcatgaaaaagctttgccctgatatgaggtgcggtctgcttttttctgacattatagtaaatccggcagagtatgcaagcgagcttcatgtggatgcgcttcatccggcaacctaccatatgcaggatgaaaactacattgacaaggcgcacggaagaggacttagagctcatgtatggactgtaaacgaaaagcatgagatgaaagcacttgtcaaggcagaagcagatgcaattatcacaaattatccggatattgctgttgaaatagttaaaaatgcctaaaagatatataaaatgcacacaaaattaatttatgtaaagtttttaccatgattttacataactgtgttttggaattactaaagaaaacggttgtcataggtatgatggcaacgatgataacaggctgttcacaagaggtacaaactaccaatgtggacggccttaattcatataaaaatgcgtcaaagaggtggtaatgcagcttgctgcaaaggaaacactcagatgtactgatattgttgaagaaatgtttgtaaatttgcatgaatgtattgacaaaaaaggcaaaaatatcgaaaatgaacttaagagtgcacggacattgcagaagcattatgtgctgtgcggtatagcgagaattggaatattatcagatgatatcaacggagaggtaaatattgcatagggaaagagttttgaaggcacttgcacagctgcttgtcggggtggaaaataagcttcatctggcagacagaaggaggcgccgggaggacaagctgatagagcgggcagggctgcttgaaatgcagcgggcacaaaataaaacgaacttaaaagacgcagacgcgaatggaaaaatatcatatagaataggagcatatatgcagatgaaaaaactggaagaagtttacacaaacagggagctgtcatggttacagttcaatgagcgagtattaaatgaggcgggcaatccaagagtaccgcttgcagagagactgacatttgcatcaatataccagacaaatctggatgagtttttcatggtaagagtaggatcactcatgatgcagatgaattcaaaggaaaagatttttgagaacaagacaaagatgtcgagtgaggagcaggtatcggcaatccttgacagagtatgcgagcttgagaagaaaaaagcaaggatttatgagcagcttatgggcgagcttgagccaaagggcgtgcgcataatcaatttcaacaagctgtcaaaggatgagggtgatttactggaggcatattttgatgcacacattgcacctttcctctcaccaatgattataggaaagcagcagccgttcccattccttgccaataagcagctctatgcggtagtgcttttaaccacgcagaagggaaagaaaaagacaggcatcgtgccatgctcaaacagcgtattcaagcgtctgattgagatacctacaagaccgggcacatttatgctgtcagaggaacttattttacactttgtatcaaagctctatccaaagtatgtaatccgtgagaaatcaatcatgcgtgtgacacgtaatgcggatatcgatgcgcagagcatgtatgatgaggatatggattaccgtaacatgatggaggagctcatcaagaggagagtgcgtcttgatcctgtaagagttgagctttcgagaaaaatcaaccgcaaggcgattgacgaactctcgagcttccttgagattggcaaaaagcattttatcagtgtaaaaacaccgcttgatatgtcatttgtattccagcttcagcactatctgcgagacaagcaggagcttttctttgagaagcgtacaccgcgtgacacacctgagctttcgcttaaggagagtatactcggtcaggttgagaaaaaggatgtgcttctttcatatccgtttgagagcatgaagccgtttatcaagatgcttaacgatgcagcagaggatcctgatgtggtttctatcaagatgacactttacagagtggcagacaagagccagattatcgatgcacttatagaggcagcagaaaacggcaaggaggttatagtgcttgtcgagctgcgtgcgaggtttgatgaggctaacaacatagagatgtcacaccgccttgaggacgcaggctgtcagatactttacggactcggtgattacaaggttcactcaaagctctgtctcatcacaaagaaaaagggcgatggctttgagtatatcactcagattggtacaggaaactacaacgagaagacctcacgtctttatacagatttgtcactaatcactgcaaatcaggagattggagcggatgcatcaagggtatttatggcacttcagagaggcgagactgtttcagacggcgatgtaaagcatctgcttgttgcaccaaaatgtttacagaacaggattgctgacatgattgatgagcagattgccaacaagaatgcaggaaaaccggcatatatcggagtaaagattaattcactcactgacaaggtgcttatagacaagcttatcgatgcatcaaaggcaggtgtgaaggtggagcttattgtcagaggaatctgctgcgtgaagccacaggttgagggcatcacagaaaacattactgtaataagtgttgtaggaagatatcttgagcactcacgaatatacagatttggtgtgggtgatgatgagaagatttatattgcatcagcagattttatgaccagaaatacagtaaaacgtgtggaggttgcgacacctgtatacgatgcacatgcgaaggacaaaatccgccatatcttcgaaacaatcatgacagatgacgagaagggcaaggagcttcgtgctgatggtgagtatgtggacagaaagataaacactacaccgatagattcgcaggagcagttctttgaggaagcatacaaaaatgccgataagagtgcggacaatcaataacaataatgattaaggactgataataatgggtaaaaaagaagcaaagacaaacgcaataagaatactggaaacaatgaagattccatatgaggcacgcacatacgagtgcgatgactttgtggatgcagctcagatagcggacaagctggggcttgaccatgccggcatgtacaagactatcacgacagtcggcaaaagcggtggatactatgtgtttgtagtaccgatagatgacgaaattgatttcaaaaaagccgcaaaggcagcaggtgagaagtccatagagatgctgcatctcaaggatttgacaaaggttacaggctatataaggggcggctgtacatcaatcggcatgaaaaagcagtatcctacatttatccatgaggcagctaaggaacaggataaaatcacggtcagcggaggtaggcttgggcttcagattacgctgtcaccggatgatttgtgcagggcggcaaaggcagagtatgcagatattataaaataattaaaatgagagttctttttcctaggcttttacacgtcagtgtgttataataaagaaagctggcgattgctaagacagacggtttggcgaataaacctacattgcaatcgtaataatagaactaaagcagaggaataatagagatggaaaaaattattttaacaggagacagaccaacaggcaggctccatataggccattacgtgggctcacttcgcagaagagttgagcttcagaattcaggagagtatgacaaaatatttatcatgattgccgatgcacaggcactcacagacaattttgacaaccctgagaaaatcagacagaatatcatagaggtagcacttgattacctctcagcaggactcgacccggccaagtctacactgtttgtgcagtcacagataccggagcttacagagcttacatttttctactcaaatctcgttacagtatcgagacttcagagaaaccctacagtaaagaatgagattaagctcagaaatttcgaggcaagcataccggttggctttttcaattatccaatcagccaggcagcagatatcactgctttcaaggctacaactgttccggtaggagaggaccagctcccaatgatagagcagaccagggagattgtcagaaagtttaattctatctatgatgaggtgctcgttgagccggatgtgcttttacctgagaatgaggcatgctgcagacttccgggtacagacggtggacagaagatgagcaaatcattgggcaactgtatctatctggcagatacagaggcagatgtaaagaagaaaatcatgagcatgtatacagatccgacacatatccagatttcagatccgggacatgtggagggcaatacagtattcacatatcttgatgctttctctaagccgggacattttgaggagtatctgtcggagtatgctaaccttcaggagcttaaggatcactatacaagaggcggtcttggtgatgtgaagcttaagaaattcctcaacaacatcatgcaggaggagctttcacctatccgcgcaagaagagcagagtatgagaaggatattccggctgtatatgagatactcaaaaagggcagcgagacagcaagagaggctgcagcgcagaccatggcagaggttaagcgtgccatgaggataaattactttgaggatgcagaacttattaagagccagagtcagaaatattctgagaaatagtgtattttatttcaaaggcaatgcgttagtgatgttaaaatattttgtggcattatgtatgtcataaaagccgcagggaggcaccatggtcaagttttacaggacagatgataagttaatacatgagctggatacactgcaggggggaacctggatacagatggtcaacccttctgttgcagagggacagatggtggcggatgagctgaatgtcgatattgaggacgtgcttgctgcactcgatgaggaggagagctcccgtatagagctgcaggacggatatacactgattcttgtggatataccttcgatagagactaggcatgacaaggagtcatataccacaatcccgcttggcatcatacttacagatgatgagatagtcacagtctgtacagaggatacaccggtgcttcaggtatttttaaataaccgtgtaaaggaattttccaccaagaaaaagatgcgctttgtataccagatactttacaggatatccgtgctgtatcagaatgatctgcgcatcatcgacaagatgcgtacagagatagaggagagagtcggagaggatacagaagaggacgatttgattgcacttcatgagctggaatccacgctcgtatactttgccacatcgcttcgtgccaatggagttgtgttggagagactgaccagatacaagcgtcttgagcagtacccggaggacaaggagcttctcggagatgtaattgtcgaaaataagcaggctattgagatgacgggaatttacagggacatcataaatggtaccagagagcttatgagcacggtcattgacaacagacttaacaatgtcatgaagatgctcacaatcatcacacttatcatggctatcccgacggttatctcaggaatctatggcatgaatgtcagctcaaagtgggtgccgctagcaacgacagcacatggatttatgataatctgtggcgtaatggtcataatctgtgtacttatactgattttattgaagaaaaagagaatattatgatattcatcgcattcgcaaaaagccgcaggatttcattgagtttcatgaaatcctgcggcttattttattttagaattaattagcagcaccctcaaagcgtccgcttgcgccacaaggcagcacgagtccgtttgaagaaaccggaagaccgatttcgcttgcggttaccttgccgtcatattttttaagagcagtgcttatcatataggtgagcactgcaggctgcaggcctgtcgtatatgaattaataaggaagaaaagaggcttgtcggtaaggagctttgcacaaagctgcacaagcggatatacgctttcctcaattttccagatttcacccttaggacctctgccatatgacggaggatccattatgatggcatcgtaatgattgccacggcggatttcacgctcgacaaacttcacgcagtcatccacaagccatctgataggcgcatcaccaagaccgctgctaacagcgttttccttagcccatgtgaccatgccctttgaagcatccacatgtgtgacagcagcaccggcagcagctgcagcgagagtggcacctccggtgtatgcaaatagatttaacacctttacatcacgaccgcttttttttgcatcgtaaatcttctttgaaaaccagtcccagttggcagcctgctcaggaaacagaccggtgtgcttgaagctgaatggttttaagtgaaatgtgagctctttattaataggaagagagtagtttatggtccactcctgcggcagatcaaaaaactcccattcaccgccacccttcttgcttctgtgatagtgaccattcagttttttccagttcttattagtttttggagtgtcccatattacctgaggatcgggacgcagcaaaatatatttagaccaacgctcaagcttttctccgcatgagcagtcaattacctcgtaatctttccatctatctgctaaccacatatgtttatattcctttcttatctgcgtgtagaaaataaactacacgttgcttgcatttaatcgagtttcttctataataatataagtgcaaaagtataatttttcaatgaaatattatccgaaataaaaaaataaattttttttgaaaaaagtattgcaattattgggaacgtcatgtataatatcacttgctgtggcatgatagctatgaagtttgaagttactgtccatgagacagagaattcggcggagcgaatgtcaagttaggaaactgacggcaagtcactgtacagaacagatatggtctacaatatgtagaaacaacgtgtgaaagtccacaggacacacacggagatgtgtacagtcaccgcttgtcgtactgaagttaaaagtgcgaaaaggaggcgactttttttatggcaagtcaagtaatgagaattactctcaaggcgtatgatcacgagttagtagattcaagcgcaaagaaaatcatcgagactgtaaagaagaatggatcacaggtgagcggaccggtacctcttccaacaaagaaggaagtagttacaattcttagagctactcacaagtacaaggattctcgtgaacagttcgagcagagaactcataagagacttatcgatatcatcaatccaacacagaagacaacagagtctttatcaaggattgaaatgccagctggtgtttacattgatatcaaaatgaagcagaaataagcttcaacaattaattagtatatccccgaatggtttatatagaagatacagtgcgaaagcataacgatctaataggctgctctaggatgaacggttccgctacttgttccggctaattcttcgcgggctgggttgacaggcaagaggcgttccgctgtagaaaacaggaggtaaagaaatgaagaaagcgattttagcaacaaaaatcggtatgacacagatcttcaatgcagatggtgtattagtacctgtaactgtattagaggctggtccatgtgttgtaacacagatcaaaactgttgagaatgacggttacagcgcagttcaggttggtttcggcgacaagaaagagaaagtcgttgagaaggatgccaacggtaaaaagagcatagcacacagacatggtgttaacaaggctcagatgggacacttcaaaaaagcaggtgtttcaggaaagagattcgttcgcgagttcaaattcgaaaacgcagatgagtacaatttagcagatgagatcaaggctgacatcttcgcagagggtgacaaggttgatgtaactgctatttcaaaaggtaaaggtttccagggtgctatcaagagattaggtcagcacagaggaccaatggctcatggttctaaattccatcgtcatcagggttctaacggtgcttgttcttcaccaagtaaggtattcaagggaaaaggaatgcctggacacatgggtagcgtaaaggttacaactcagaatcttgaggttgtaagagttgacgcagacaagaacttactgttaatcaagggcgcagttccaggagctaagaaagctctcattacagtaaaagagactacaaaatctggtaaatagtgcaaagtaagaaaggaggaactttacgatggctaacgtagctgtatataacatggaaggcaaagaagtcgacaagatcgagttaaatgattccattttcggcgtagaaattaatgagcatttagttcatatggctgttcttcagcagcttgcaaataaacgtcagggaactcagaaagctaagacacgttctgaagttcgtggtggcggaagaaaaccatggagacagaagggaacaggacatgcacgtcagggttctacaagatctccacagtggacaggcggtggagttgtattcgctcctactcctagagattactcattcaagctcaacaagaaagagaagagagcagctcttaagtctgcacttacatcaagagttgttgagaacaagtttgttgtagtagatgagcttaagcttgatgagattaagacaaagaaattcgtagaagtattaaagaacctcaatgttgagaaggcactcgttatattaaacgatatggacgagaaggttatcgcttctgcagcaaacatccctacagttaagacaactcagacaaatgagcttaacgtattcgatgtattaaaatatgacacagtagtagttacaaaggctgctgtagcaacaatcgaggaggtatatgcataatggcaaacgtacagtactatgatgtaatcctcaaaccagtagtaactgagaagagtatgaatgcaatggctgagaagaaatacacattccttgttcacccggatgcaaacaagactatgatcaaagaagcagtagagagaatgttcgaaggaacaaaggttgccaaagttaacacaatgaactgcgaaggcaagaacaagcgtcgtggaatggtaacaggaaagactgctaagacaaagaaggctatcgtacagcttacagcagacagcaaagatatcgagatcttcgcaggactgtagaccgaaagcaacttcaaaatgatatgcgtcagaaaagacgcgataatgaaaacatatcgaaaggagaaacaaaatgggaattaagacatataacccatatacaccttccagaagaaatatgactggttcagatttctcagagattacaaagacaactcctgagaagtcacttgttacttctttaaagaagaacgctggtcgtaacaatcagggtaaaatcacagttagacaccagggtggtggaaatagaagaaaatacagacttatcgatttcaagagaaataagaaagacggtattccagcaactgtaattggtatcgagtacgatccaaacagaacagcaaacatcgcacttatctgctatgcagatggtgagaaatcatatattcttgctccagcaggacttacagacggaatgaaggttatgagcggtgctcaggctgaggtcagagttggaaactgcttaccacttgagaatatcccagttggtacacagattcacaacatcgagcttcttcctggaaagggcggacagcttgttcgttcagcaggacttagcgcacagcttatggctaaagaaggcaaatatgcaacacttcgtcttccttcaggagagatgagaatggttccaattcagtgccgtgctacaatcggtgtaattggaaacggagatcacaacctcgtaaatattggtaaagccggacgtaagcgtcacatgggtgttcgtccaacagttcgtggatctgttatgaaccctaacgaccatccacacggtggtggagaaggtaaggcacctgtaggacgtccaggaccatgtactccatggggcaaacctgcacttggcttaaagaccagaaagaagaacaaacagtctaacaagatgatcgttcgtagaagagacggtcgtgcaatcaaataattaggaggttgaataaatggcacgttcattaaaaaaaggaccatttgctgatgaaagcttacttaaaaaagtagatgctatgaacgcttctggtgacaagtctgtaatcaagacatggtcacgtcgttcaacaatcttcccttcattcgttggacacacaatcgctgttcatgatggaagaaagcatgttcctgtatatgttacagaggatatggttggacataaacttggtgagttcgttgcaacaagaacttacagaggacatggaaaagacgagaagaaatcaggcgtaagataagatttattgaaaggaggtttcatccatggcaaagggacatagatccaaaatcaagagagagagaaatgaagttagagatacaagaccttcagcaaagttatcttatgctagagtgtctgtacagaaagcttgtttcgttttagatgctattcgtggaaagagtgttaacgaagcacttgcaatcgtaacatacaatcctagatatgcttcaagcttagtaaagaaattattagagtcagcaatcgctaacgcagaaaataattatccggaaaagaactataaggcagagaacctttacgttgcagagtgttttgcaaataaaggaccaacaatgaagagaattcatcctagagcacagggtagagcttacagaatcgagaagagaatgagccacattacaatcgtgcttgatgaaagataggaggcaatcatgggacagaaggttaatcctcatggcttaagagttggcgttatcaaggactgggattccaaatggtatgcagagggtgatttcgctgattacttagtagaagattataatatcagaacatttttaaagaaaaaattatacgcagctggtgtttcaaagattgagatcgagagagcttcagatcgcgttaaggttatcatttatacagctaagccgggtgttgtaatcggtaagggcggagctgagatcgagaagatcaaggctgaggttcagaagcttacagacaagaaattagttgttgatatcaaagaagtaaagagaccggacaaggatgcacagcttgttgctgagaacatcgctttacagcttgagaaccgtgtttcattccgtagagcaatgaagtcttgcatgggaagagctatgaaggccggcgttaaaggaattaagacaacatgttcaggtcgtcttggcggagcagatatggctcgtacagagacatacaatgatggaactactccactccagacaatcagagcagatatcgattatggattcgctgaggcagatacaacttacggcaaggttggcgttaaggtttggatctacaaaggcgaggtacttcctacaaaagcaaacaaggaaggaggagctaagtaattatgttaatgcctaagagagtaaaacatcgtaaacagttccgtggttccatggcaggaaaagctacaagaggaaacaagatcacaaatggtgagtacggtattgtagcacttgagccatgctggatcaaagcaaatcagattgaggctgcccgtgtagctatgactcgttacatcaagcgtggtggtaaagtttggataaagattttcccagagaaacctgtaacacataagcctatgggtgttcgaatgggtaaaggaaagggtgcccttgagtattgggtagctgtagtaaaaccaggtagagtattatttgaaatctccggagtaccggaagacgtagctaaagaagctttacgtcttgctacacacaaattaccttgcaagtgtaaagtagtttctcgtgcagatttagaaggcggtgagtcaaatgaaaactagtgcatacgttaaagagttacaggcacagagcgtagagcagttacaggcacagctcgttgatgctaaaaaagaacttttcaatttaagattccagaatgcaactaaccagttagataacacagcaagaatcaaagaggttcgtaagaacatcgctagaattcagactgttatcactgcaaaggctgcagaatagtttatcctatcagaaaggagattttagaccgtggaagaaagaaatcttagaaaaacacgtgttggtgttgttgtaagcgataagatggataagacaatcgttgtagctgtaagagataacgtaagacatcctctttacaacaagatcgttaagaagacttataaattaaaagctcatgacgagaaaaacgatgcaaagatcggtgatacagtcagagttatggaaacaagacctttatctaaagataagagatggagacttgtagaaatcatggaaagagcaaaataataaaaggaggctacaagcatggtacagcaggaaagcagactcaaggttgctgataacactggcgctaaagagttacttgttatccgcgttatgggtggatctaccagaagatatgcgaacatcggtgatgtaatcgttgctactgttaaagatgcaacaccaggcggtgttgttaaaaaaggcgatgtagttaaagccgtagtagttcgttcagtaaaaggtgctcgtcgtaaagacggatcttatataaagtttgatgagaacgcagcagtaatcatcaaagatgacaaaactccaaaaggaacacgtatatttggaccagtagctcgtgagcttcgtgagaaacagttcatgaagattgtttctctggctccggaagtattataggaggaacgtcaatggcaactatgaaaatcaaaaaaggcgaccttgttaaggttatcgctggaaaagatatcaacaatgagggcaaggtaattgccgtaaacgcaaagaacaatacacttcttgttgagggaatcaacatggttactaagcatacaaaaccaagtatgtcaaatcagcagggcggtatcgttcatcaggaggctccaattgatgcttccaacgtaatgctcatccatgacggaaagcctactcgtgtaggattcaagatggatggagacaagaaagttcgctttgctaaatcaacaggcaaggttatcgactaattggagagaggaggattaagacattgagtagacttagagaacagtacgaaaatgagatcaaggacgcaatgatcaaaaagttcggatacaaaaacgcaatggaaattccaaagcttgacaagatcgtagttaacatgggtgttggtgaagctaaggaaaacgctaaggttcttgaggcagccgttaaggatatggaagccatcacaggacagaaagcagttacaactaaagcaaagaatgctatagctaactttaaaatcagagaaggaatgccaatcggatgtaaggttacattacgtggtgagaagatgtacgagtttgcagatcgtctcatcaacttagcattacctcgtgtacgtgacttcagaggtgttaaccctaacgcatttgatggccgtggaaactatgcccttggaattaaagagcagatcatcttccctgagatcgagtatgataaggtagataaggttcgtggtatggacattatcttcgttactactgctaagacagacgaagaggcacgtgagttactggcacagttcaatatgccattcgctaaataatcggaggaattctaatggctaagacaagtatgaaaatcaaacagcagcgtgcaccaaagttctctacaagagcttatacacgttgtagaatttgtggacgtccacattcagttttaaagaaatacggaatctgcagagtatgcttccgtgagttagcatacaagggacagatcccaggcgttaaaaaagctagctggtaagcctgaaagcaacttagtgaacacaagcgcatatgcgctgtgtgagcttagtgcgaagagaacttcctttcagcaacagctgtttttataaataactatattaacaaacatatttaaggaggatatcgttcattatgatgatgacaagtgatccaatcgcagatatgcttacaagaattcgtaacgcaaatactgcaaaacatgatacagtagacatcccagcttctaagattaaagtagcaatcgctggaatccttgtagatgagggattcatcgagaaatacgacatcgttgaggatggaaaaatcaagacaatccatgttacattaaaatatggtgctgataagaacgagaaggttattacaggcatcaagagaatttctaagccaggtcttcgtgtatacgcaggcaaggatgagattccttcagtacttggtggacttggaatcgctattctttcaactaaccagggtatcgtaactgataaagaggctagaaagcttcaggttggtggcgaagttttagcattcgtttggtaaacattgaacacttaatgaatgcaagcgtaagcgtagcatgaatttagtgtgaaagttgttctttgagtgaagcgaaaagaactaccttatgacatgatattgtaggtagcttgaacttagcgaagagaacatacccctaaagatcttaatttatattaagtataatttattaagtatccatattcgatgcatccatgatgtatagtagggatacagcaagtaacatcttaaagtataacctgaccacaaggtcagaaatactaaataactattaacctaatatcaaaatataggaggtacgggcatgtcacgtataggaagaatgccaatcgcagttcctgctggagtaacagttgaaattgcagaaaataatcatgtgactgtaaaaggtccaaagggtactcttgagagaactcttccatcagagatggatatcaaattagagggtgaagaagtagtagttacaagacctaatgatttgaagaaaatgaaatccttacatggattaacaagaacacttatccacaacatggttgttggtgtaactgagggttatacaaagactcttgaggttaacggtgttggttacagagcttctaaggctggaaagaaacttactcttaacttaggatattctcatccggttgagatggaggatccggaaggacttgagtcagaggttcaggataacaagatcatcattaagggtatcgataaagaaaaagttggccagtacgcagctgagatcagagataagagaagacctgagccatataagggcaagggaatcaaatatgctgatgaggttattagacgtaaagttggtaagactggtaaaaaataattaaaggagtggacaagtaatggttagtaagaaatcaagaacagaagttcgtgtaaagaaacataacagaatgcgtaatcatcttgctggtacagcacagcgtcctcgtttagctgtattcagaagtaataaccatatgtatgctcagattattgatgatacagttggaaatacactcgtttctgcatcaacacttgacaaggatatcaaggcagagctcgagaagactaataacgtagatgcagcagcaaagcttggtactgtaatcgcaaagaaagcattagataaaggtatttcaactgttgtcttcgatagaggcggttttatttacgcaggaaaagttaaagcattagctgaagcagcaagagaagctggcttagatttttaggaggagacaaacatgaaacgtgaaatcattgacgctagtcaattagaattagttgaccaggtagttgacatcaagcgtgtaacaaaggttgttaagggtggacgtaacatgcgattcacagctctcgttgttgttggtgacaagaacggccatgtaggtgcaggtcttggaaaagcagcagaaattcctgaagctatccgtaagggtaaagaggacgccatcaagagcatggtaaatgttaagttagacgagaacaactctattacacatgatgtaacaggaaaatatacaggtgcttccgtattattaaagaagtctcctgaaggtactggtatcatcgctggtggtcctgcacgttcagtatgcgagatcgctggtatccagaatatccgtacaaagtctttaggatcaaacaacaagcagaacgtagtacttgctactatcgaggctcttaagcagttaagaagccctgaggatgttgcaaagcttcgtggtaaatctgtagaagaaatcttaggttaggaggaacgctaaaatggcagatagagttaaagttacattaatcaaatctacaatcggtgctgttcctaagaacaagaagactattgaggctcttggtcttactaagttaggcaaaactgtagagttaccaaacaatgcagctacacagggagctgttcgcaaagtagcaccatacgtaaaagtagaagaagtttaagaataaaataaggaggtaccgtgatggatttatctaatttaaaagcggctgagggttcagttcatagtgataatttcagaagaggtcgtggacacggctcaggaaacggtaagactgctggtaagggacacaagggacagaaggctcgttcaggagctccaagacctggtttcgaaggtggacagatgccattatatagaagattgcctaagagaggtttcaagaatagaaacactcttacaatcgtacctataaatctttcagctcttgagagattcgataacgatgcagtagtttcagttgagacattaatcgaggctggaatcgttaagaatcctagagatggcgtaaagattcttggaaatggagaacttactaagaagcttacagttcaggctaacgctttcagtgctagtgcaaaagagaaaatcgaagctcttggtggaaaagcagaggtgatctaatgcttaaaacactccgtaatgcgtttaaaataaaggatgtccgtaatagaatcctttttacattcatgatgcttattgtcatcagaatcggaagcgagcttccgattcctggtgtcaagggctccgtatttcagagttggttaaacagtaaatcagcagatggtttaggctttgttgatgctataacaggtggatcattctcacagatgtcagtatttgcgctgaatattacaccatacattacatcttcaatcattatgcagttgcttacaattgctatacctaagcttgaagagatgcaacgcgatggcgaggatggcagaaagaaaattgttgagataacacgttatcttacaatagcattaggccttcttgagtcagtcatgatggtaattggtttttacagacaaaattaccttacagaaaagacaccattgactgttattatggtcgttacttcacttacagcaggttctgctgtacttatgtggattggagagcgtattacagaaaagggtgttggaaacggaatatcaatagtattgacaatcaatattatttcacgtattccagaggatttaagtacactttggtcacagttcattgcttcagcagcgaacattccaaaggcgattgttgcaggtcttatcatagtagcaataattgctgcaatggtagtatttgtagtattgcttcaggatgcacagcgtaagattcctgtacagtactctagtaaaataagaggcaacaagcagatgggcggtcagcagacatgtattccactaaaggtaaataccagtggagttatcccggtaatctttgcacagtctcttatgcagacccctgttatcattgccagcttccttggaaaaggcaatggaaatggaataggctctaagatattaaaaggattatcacagtctaactggtgtgatccaaaggagccggtatattcaatcggacttattgtttacattgtgttgattatagcatttgcttatttctacacaaacattacattcaatccgcttgagattgcaaacaatatgaagcgttcaggtggctttatacccggtatcagacctggaaagccaaccagcgattacttaaatcagatattaaactacattgtatttattggagctattggacttgcgtttatcgcatttgttccgatattcttcaatggagtattcaacgcagatgtatcctttggtggaacttcaatcatcatcattgtcggagttgttattgagacattgaagcaaattgaatcacagatgagagttcgatactataaaggatttttagatgattaattgtacattggagatactgaattcagtatctccattcgtgctatcaacaagttttgtatagaaggagaaaatttttatgaagatcatcatgttaggggcacctggtgccggtaaaggtacacaggcaaaacagatagctgcaaaatattctataccacatatctctacaggagatatattccgtgcaaacatcaagaacggaacagagcttggtaagaaggcaaagacttatatggatcagggagcacttgttccggatgagcttacctgtgaccttgttatggatagaatacagcaggatgattgcaaaaacggatttgtattagacggtttcccaagaacaattccacaggcaaaggcgcttgatgatgctctcacaaagattggggagaagatggattatgccatcgatgtagatgttcctgatgagaacattgttaaccgtatgggtggaagaagagcctgcctcaattgcggtgcaacatatcatatcgttttcaatccaacaaaggttgagggcaaatgtgatgcatgtggcgctgatacagtactcagagatgacgataagcctgagacagttcagaagcgcttagctgtatatcatgagcagacacagccgcttatcgagtattatgacaagcagggcattttaaagtctgtagacggaacaaagcctatggatgaagttttttcagccattgtaggtattttaggtgaataataatgtctgtaactataaaatcagagcatgagatagagctgatgagggaggccggcaggattctggcggccgttcatcagcagctcggtaaagaaatcaaaccgggaatgtccactaaggatgtggaccggctgggcgaagaaatgattcgtagttatggatgcgagccgtctttcttaggatattgcggatatccggcctccatatgtgtttcagtaaacgaggaggttgtacatggtatcccgactgatgagcgtatcttacaggagggcgatatcgttagccttgatgctggtgttatctacaaaggataccactcagacgcagccagaacagtaggcgtaggagagatttcagaggaagcaagacttcttatagaaagaacacgtctcagtttttttgcaggaataaagaatgcagttgcgggaaacagactgtatgatatttcaggagccatacagcagcttgccgagtcttttggatacggagttgtatatgaccttgttggtcatggtataggaagccatttacatgaggatcctgaggtgccgaacttcagaccacagggctttagaaaagggcttagacttaagccgggcatgacactggcggttgagccaatgattaatgcaggttcaccgcatgtggtgtggatggatgacgaatggacagtggttactgaggatttatcgttgtcggcacactatgaaaataccatacttattacaaaaggaaagccggagatactttctctgacagaggatgaaaaagcagccggatttctggagctaatctaataataatcataacgaaacccaaggatttatttacaggaggaatcaaaatgtcaaaagcagacgttatcgaagttgaaggtgttgtagttgagaagttaccaaatgcgttttttaaggtagagcttgagaacggacaccagattttagctacaatcagtggaaagcttcgtatgaatttcatcagaattttaccgggagataaggtaacaattgagatgtcaccatacgatttgacaaagggcagaattatctggagagataagtaatttttacagatgattttttaaaaaaatatattgacttcccttaagtgtccgtgtataatgctatctggacacttttggaaaagtacctgaaaaggacttttatagagaaaggaggatttgctgtgaaggtaagatcatcagttaaacctatttgcgaaaagtgcaaagttatcaagagaaaaggaagcatcagaattatctgtgagaatccaaagcataagcagagacagggttaattagtacaaatatttgaccctgttatttgtgcgtttggtttattaaaccttttttcacatcattatgtgcggctgcagcgagatatttatcatcgctgttcataataaacagaggcattctggtttcatattataataccgagtgatatggaacaaaatgcaaatatgggagcgcatatggctacacacatttcaggacgtgcaaccgtagctgtagatacatatgtgtttcggagagtatacgtcaagttgcagatgtatcgttactatagtaaataactaaaaattatggaggtgtaaacacacatggctcgtattgcaggtgtagatttaccaagagaaaaacgtgtagaaatcggcttaacttacatctacggaatcggaagagtaagtgcagaccgtatccttgaagcagctaatgttgatccaagcactcgtgttagagatcttacagatgacgaggttaagagaatcagcgctgttatcgacgagacaatgacagttgaaggtgatttaagaagagaaatcgctttaaatatcaagagacttcaggaaattggatgctatcgtggtatccgtcatagaaagggacttccggttcgtggtcagaagacaaagactaatgcaagaactcgcaagggtcctaagagaacagtagcaaacaagaagaaataatcacttggaaaataagtgaaaacgccacttgaacgtagtgcgcgtttagttctgcggacgaagaagcagagcttcattataacttaaataaagtttagaaagtagaaagtaggttagtttaaatatggctaagaatgttgcaaagaaaacaactaaaaagcgtgtaaagaaaaacgttgaacgcggacaggcacatattcaggcatctttcaataacacaatcgttactttaacagatgctgaaggaaatgctttatcatgggcaagtgccggtggtcttggatttagaggttcaaagaaatctactccatatgctgcacagatggcagcagaaacagctacaaaggcagctttaatccatggattaaagacagttgacgtattcgttaagggaccaggttcaggaagagaggcagctattcgtgccctttcagcatgtggtcttgaggttacatcaatcagagacgttactccggtacctcacaatggatgtcgtccaccaaaacgtagaagagtctaatcaggaggtatagattaaaatggcagttaataaagtacctgtacttaagagatgcagatcacttggtttagagccaagttatttaggatatgataagaagtctagaagaaaccttacaagagcaaacagaaaggtgtctgagtatggacttcagttaagagaaaagcagaaagctaaattcatctatggtgttttagagaagcctttccgtaactactacaagaaagcagatcagatgaaaggattaacaggtcttaaccttatgacaatccttgagtcaagaattgacaacgtaattttccgtcttggtttcgcaagaacaagaaaagaagctagacagatcgttgatcacaagttcgttacagtaaacggaaaagttgttaacatcccttcataccttgtaaaggctggcgatgttatcgaaattaaagagagcaaaaagaatactcagagaatgaaagatatcgtcgaggtagctggcggaagaatcgttccggagtggttagacgtagatgctgagaaattacagggaactgtaaaagacttacctacacgtgagcagattgatgttcctgtagatgagatgctcatcgtcgagttatattctaagtaaaattaggttgatttgccggggatttatttcccggcttatccactctttgataacatataacaacgatacccgagaaggagggaatttgaagtgttcgattttgaaaaaccaaaaattgaaatcgcagaaatttcagaagacaagacatatggcagatttgttgtagagccattagagagaggttacggtacaacacttggaaactctttaagacgtatcatgctttcttctttaccgggcgctgcagtaagccaggtcaagattgatggtgttttacatgaattcagctctattcctggtgttaaggaagatgttacagaaatcatcatgaatatcaagaaccttgcaattcgcaataatagttctacaaatgaaccaaaggttgcatatatcgaattcgaaggtgaaggcgttgttacagcagccgatattcaggttgattcagatatcgagattttgaatcctgagttagagattgcacacttgaatggtggagcagattctaagctttacatggagcttacaatcactaacggcagaggttatgtcggagcagagaagaacaagaacgaggatacaccaatcggagttcttgctgtagattcaatctacactcctgttgagcgtgttaatcttactgtagagaatacccgtgtaggtcaggttacagattacgataagcttacattagatgtatttacaaatggtacattggagccggacgaggcagtcagccttgcagctaaggtgttaagtgagcacttaaatctgttcatcgatctttcagaggcagcacagcaggttgacgttatggtcgagaaggaaaacgatgctcaggagaaggttcttgagatgaacatcgatgagcttgagctttcagttcgttcatacaactgcttaaagcgtgcaggaatcaacactgttgcagagcttatcaatagaacacctgaggacatgatgaaggttcgtaaccttggtcgcaagtctttagaggaagttttagcaaaattaaaagaattaggtttagagttaaatcagactgaggaataattcattcgaataatccttgcactgattcttctaaataaattggtcatatataaattttaaatatcatatttatgtttatgtgtgacaaaactcatagcggcagggccagtaagaccaaagagcgtgaccgtgtctgatacatgagtggcaactgatttgagcatttgctttttgaaataaggcaaagctttatcacaacaagatacgatgtctggcagtaagaccgaagagcgtgaccggatgtcccacaaatggaggaaattaaaatggcaaaatatcgtaagttaagcagaacatcaagccagagaaaggctttactcagaggtcaggttacacagcttcttgttaacggaaagatcgttactacagaggctaaggctaaagaagttcgtaagatcgctgagggtcttatcgcattagcagtaaaagagaaagacaacttcgaagaggttactgtaacagctaaggttgcccgcaaggacaaagatggcaagagagtaaaagaggttgtagacggaaagaaagttactgtttatgacgaagtagagaagaagatcaagaaggattctgcttcacgtcttcatgccagaagacagatgctcaaggttctttacacagctaaagagtctgacggcacaaagaagggaacaaagactatcgatgtaacaaacaagttattcgatgagattgctcctaagtatgctgatcgtaacggtggttacacaagaatcgttaagattggacagcgtaaaggtgacggagctttagaggttctccttgagttagtttaatatttaatcggtataaatcttagactaaattaaaccagagatttgagtggatgacactcacttctctggttttttatattactaagataattattctaaactttgagaaaaactgatgcgtcttacttgcatgtatagttcgacagcctttcgtttgaattcgtaactgtaacgcataaaaatacccctttcactggatgtccagtaaaaggggtacatatcatttcacacggctttttataaatgcgcttaattatttattttttgctgcagcctgctcgtcattgtacttctgaacacacttcttgattctgtcatatggtgagagaagatcactgatagaacagtcgtggtttaatgtatcaatgaggtatgcgatgtatttgctcatgtcacagctgatatagtactccttagagagaagctcaggtgactggtagataaggtttgttgtaactactctgtagatgagaccctcctcgtaagccttgtcaaatgaagcaaagccgtttgtgaaaagaccgaatgtagaaacaacaaagattctgttagctttacgcttcttgagctctcttgctgtatctatcatactctcaccggaagaaatcatatcatcgatgataagaacatccttaccctccacatttgttccgaggaactcatgagctacgatagggttacgtccgtcaacgatacggctgtaatcacgacgtttgtagaacatacccatgtctactccgagtacgtttgcaaggtagatagcacggtttgtagcgccctcatcaggagagataatcataagatggtcagcatcaatagtgatatcctttacgttctttaagatacccttgatgaactggtaagaaggcattacattctcaaagccgttcagaggaatagcatttaccacacgagggtcatgagcatcgaaggtgatgatattgtctacacccatgttgataagctcctgaagagctaatggacagtcaagagactcacggcctgtacgtctgtgctgacggctctcataaaggaaaggcatgataactgtgattcttcttgcttttccgccggctgcagcgataacacgctttaagtctgcgtagtggtcatcaggtgacatgtggtttgtctgaccgcatactgtgtaggtaagactgtagtttgttacatctaccatgatgtacagatcataaccacgaactgactggttgataacacatttagcctcgccggaaccgaatctaggtgtagaaggcttgataatgtaactgtttttgtagtagtccttgaaagcactctcgttagcatgctggtgctctctgtgctctctccagccctgtaagtatgcatctaccttctgggcaagacctatacaactgtcggttgcaacaagtccaagtgtaccggttggcatagtctccaaaattctctcatcgtttggcattgttattcctccatataaccatataataaataaactaaatatatataaaaagcgctatttggaaagacgctttttaattcgtatgtcatctccgaagagcttgataaaactataattgcttgaaattcttgaaagtgttctctcggagtaaatctctgctatctgctccaaattcagattagtggaaataatagtagatttctgtcgcagtatgcgctcatttacacaaaggaaaagctgtgatgtggtaaatgagttggaaagctcggttccgagatcgtctatgataagtaaatcacagtcgaatatattctggtgcgctgcgatggcatctgcatccttttcaaacacacctttgcttaatatatcaaataattggaatgctgtaaagtaaattacggagtaacctgcatctaaaagctcttttgcaatgcaattagataaaaaagtctttccgacaccggtattaccgtagaaaaatatgtttttaggtttgttttcaaaattgtctataaattcatgacagttcgtcactgcaagctttgctgtggcaagagcagacagccctgtcgcaggatttttctgctcatctgagtaataatcgaatgagagcgtggaaaaattctctcttgataaaatctccctgatattggactgcgaataaacggtattgataatagcctgtttgaaacaatgacatttctgaccgtctatgtatcctgtatcatggcaatctggacaggtgtaaataggctcaaaataatcaagcggatatccgagtgtggatagaagagcagcacgctcctccttatagtcctcgattgcaaggcgtaaagcggcgagagcattctcatcaccatccataagcctgtacgcctgcctgacagaggctgatgcaatctcagagtcaatctccctgaggcggggcgccttgcgataggcttcctcaatacgcttgtcatgtatgtatttgttctgaagctggcgtttgtcgtagcctcgcattatctcatcatattgagcattggtaagtgccatatatcctccttgggatgtgtaaatctaacttgaaaaatcataccgtagaattcagaaacagcttctccagcttgtcgtaatcattgtttcgctgattgaagttgttaaatttattcttggaacttgaattattgcttttgggttttgaggaaccgtttgcagcatttgtactctgtgatgagccggtagcagaggctttattggccttggcaaagttggcatcaagcacttcaacatcctttaatgtatgtacatcctttttcctccagttcgcgagtatcgagtctgtgtactcgaagcttggcttctggatagctgaaatggttttactgcaggcggcctttacaagctctatatcgaaaccatattcgccgacccatttgtttattagtgacacctcagagtcaaccagattgcggcctgtgatgcctagagccttcattactgaatagtaaatctgtgagtgagcggctgcatcgtcctttgcctggtctacggtctttatgccggcatcggcccagccgagagcgaccttgttcatgtaacgaaggcttgaatgccccttggtaatgcagtactctacgagatattctaccaggtcggtagaaaaatgaagctcgtccagccagtagagtaccatattggtgtctgtggatgaaagcgtatgcttcagatatgtctctataataaagaaaagctctgaaatgtcaggattctttctaaactccttaatctcatcaagtgtgtattccttctgtgaagaagcaggcttgtcaggagtctggctcttaagcttttccacaacagaatcctgcatccgaatatctgcggtagaaatattttgcgcaacgttattaacaacaccgttttgcaaactattctgtgcaacattattaacaacaccgttttgcaaattattctgcgcggcattatcagccacagcgctttgtatattactctgagcagcctgcataccggatacagaaagactgcagaggttgattcccataatctggccatcagcgccggtttgcacctgcaaaatgccctcagaggcccagtaattgagggcacgtatgatgtcggcttcagtattgctgaaatgatcggcaatctctgaaatagttgctatgcctgccccggagcctgtcgcacggagcagataaaggtataccttgacaaactcaccgtttgcctttggcatgtattgatctataaaaatatctgacacagtagtgaatgatgttgctatgtcactgctaatgtttatcgctgtcatataaaaaactctctttcgcttaacctgtgagcaattatagcacaatattttaaccgtgtgaagatggtaaaagtgctacaagccttgtaaactcgggctttccgagtccacaaaaaaatgtggataacgtggataactgtgtaaaataattgaaaaatcaatgtatcacagggtatataagctgttgaaaattatttaaaaaatccacacacaaaatgaaagttgttaacattttgtatgtggataacgtggataacttatttcttaagcaggtcttcgccgatttctactacatttccggcacccattgttatcaacaggtcaccgtttacacaattttctgataaaaatttctcgatttcctcaaatgatgggaaatagtgcgcattcacacctttttcgagcaataaatccaggatatccttagatgagataccatatgtgttctgctcacgcgcagcatagatatcagcaagcaccacaacatctgccattgaaagaacatcggcaaaatcatttaagaatgccttggttctggaataggtgtgtggctggaagcaaaggacaagcctgtcatgtggatatttttgtgcagctgtcagtgttgcgcggatctcggttggatggtgagcgtagtcatcaatgattgtgacgccgtttaccttgcccttgtactggaaacgtctgtcagcaccgccaaatttgtcaaggccggtgaggatagactccgtatcgagaccgagtgtggtggataaagctatggctgcgagcgcattgcttacattgtgagcgcccggaacagagagttttacgtcgaaaagtggactaccctgtctcatagctgtaaaagatgcacaagctttatcgtcataggttatattttccggatagaaatcatattttgaatcaaagccataggtgataatcttctgaggaagccctgcgacaatctcctcatagcggtcaatctcaccgttgatgatggtagcaccgcctgcgagagtgtttgatgcatactcgcggaaggaatgcctgatgtcgttgatatccttgaagaaatccagatgctcagcctcaatatttaaaataatactgtagcgtggtctgaaattcaaaaagctgtttgtgtactcacacgcctcagagatgaagtactctgaatcgcccacacgcagattgccgtggatagatgacaaaataccacctacggaaatggtaggatctgtctgggcggcgagaagaatctcgctgatcatggatgtggtggtagtcttgccgtgtgtgccggctacagcgatagaataatcgtaattgtccataatctgtccgagaagctcggctctggtaagcattggaataccggctgcctttgctgcggcaaactcaggattgctttcgtggatagcggcagtgtaaactaccaggtcgataccggatgtgatattgtctgcgctctggccatatatgacttttatgcccttggccgcaagagtctttgtgaggtctgattcctttgaatcggagccggaaattgtaaagccctcctcatgcagaatctctgcgagaccgctcatgctgataccgccgatgcctatgaaatggatgtgtattggtttgctgaaatctattttatacattaattttacctgcctgatttattataatttatactgtaactattaagaaacacggagaacaaaaagccgatgcgtcatattgcatgtaagcgacagattttcttgttctgaatagttactttatattaattatacaactaaatatagtatttgcaaaggaaaaataaggtgaaagcaggcatgactttcaaatgataagaaccatagcaggttaaacagatatacgataaatgacacttgtgcaaaatgtcgaaaaaaaagaaaaatattatttgattttgtgaaaaatgttgaagtggtaatgcggctgtggtataattttttttataaaaataattcatccggaccatatgaattttatgggtttaaagtatatagcagtaactgcaatttatgcagcagcaactataatttatatggaaacaattgtgatttattatggaagcattacagatacggttattacagaaacaagtggtggggaccggatgggcacaacaaaaattaggacagacgaggagtgataacgtgattaagaaagaaatgatagccatgcttttagcaggaggtcaaggcagcagacttggtgttctgacagcgaacgtagcaaaaccggcagtttcgtttggtggaaaatacagaatcatagattttccgcttagcaactgcatcaattcaggcattgatacagtgggtgtacttacacagtatcagccactcagacttaaccgccacatcggaataggtattccgtgggacctcgacaggaataatggaggagtggcaatactgccgccttatgagaagagcggcaacagcgagtggtacacaggtacagccaatgcaatctaccagaatatgaggtatatagacagttacaacccggactatgtgttgatactgtcaggagaccatatatacaagatggactatgaggtgatgcttgatttccacaaggaaaacaatgccgatgtgaccatagcaaccatgccggtgcctatcgaggaggccagccgatttggtatcgtcatagccgatgatgataagcgcatcaatgcatttgaggaaaagccggttcatccgcgcagcaatctcgcatcaatgggcatttatatattctcatggccggtgctaaaggaagcattacttgcactaaaggatcaggaaaactgtgattttggcaagcatgtcataccatactgctttgaaaacgacagacgtatgtttgcatacgagttcaacggatactggaaggacgtaggtacactgggctcatactgggaggccaatatggagcttgtggacctcattccggagttcaatctgtacgaggagtattggaagatttacacaaagaatgatgcaatcgagccactttatatagccaaaggaggtcatgtggagcgaagcatcatgggtgagggctgtgaatgctatggtcatgtggagcattctgttataggtgccaacgtcaagattggaagaggcgcagtaatacgtgattccatcatcatgtgtgacacggagataggctccaatgtcacgatagacaagtccatcattgccgaaaattgcaaggtgggcgacaatgtgacacttggcttcggacaggagaagccgaatgtattaaatgagagcatatactcatttgggcttgtcactataggagaagattctgtgataccggacggggtaaagataggcaaaaatacagcaatctccggtgttacatacgaagaggattacaaagacggtgtgcttgagggcggagaagttattatcaaggcaggtgacggaaaatgaaggcaataggaataattttggccggcggcaacaataataggatgaaggaactgacagcaaaacgagcagtaccggccctgccggtagcaggcagcttcagaagcatagattttgcgctcagcagcatgtcaaactcgcatatacagactgtcgcagtactgacccagtacaatgcacgctcactgaatgagcatttaagctcagcaaaatggtggaattttggcagaaagcagggaggcttattcctctttacacctacagtcacagcggacaacagtgactggtacaggggcacggcagatgcgatgtatcagaacattgattttctcaagagacgccatgagccatatgtcatcatcagtagcggtgactgtgtatacaagctggatttcaacagagtgcttgattttcatatcgagaaaaaatcagacattacagtggtatgcaaggacatgatgtacaacgacgatgtcagccgttttggtgtggtacgcatggatgatgagtcaagaatcacagagtttgatgaaaagccaatcgaggcctcatccaacactatttccacaggtatctatgttatcaggagacgacagctcatagagcttttggaggcagcagccgaggaaaacagatttgatttcgtaaatgatatcctcgtgcgctacaaaaatgtaaagaaaatatatggctacaagataaattcatactggaacaatatcgccgatattgatgcatacttcaagaccaatatggatttcttaagacctgacgtcagaagctatttcttcagggaggagccgaccatctgttcaaaggtggacgacctgccaccggccaagtttaatccgggctcagacatttcaaacagcctcgtatcaagtggctgtatcataaacggcagcgtggaggattcggtgcttttcaagcaggtatttgtgggcaaaaacactaccgtgaagaactgcgtgctgctcaatgacgtctacataggcgacaatgtgcacctcgaaaattgcatcgtagagagtcgtggaaccatcaatccaaacacctgttattgtggtgaggatggagtcatgatagtaaaagaaaaaaatgtaagatatgtaatttaaaaacagaccagggggacaaaaatatgcagattacagacatcagaattcgtaaggtagaaaaagagggcaagatgaaggcggttgtgtcaatcacaatcgatgatgaattcgtggtacatgacatcaaggtaatcgaaggagaaaagggacttttcatcgccatgccaagccgtaaggcaaacgatggcgagtacagggatatagcccatccgattaactctgcaacacgcgagaatatccagaatatgattcttgaaaagtataagacagagattgagaatgtataaaacagtcaaatgctgtagcaaatgtaaataataattttggtatgtgtatatcagacgaaatcgcgcaagtgcatcggaggagattggcttgcgcggtttttgtgtaataagggtttgattagagaataaaaagtaagcatatattcattttagaccctcgtcttttagagagaaatttgatgacaaactgtcctctctgtgctacaatcaactcaaagcattatatttctgtaaatacgacaccacagcatattttatcggtgcgtatcactttgaagagggcagaccacttcgcatttttcgacaaagacatggaaattttcaatgctttatgttaccagttaatagcaggaaaattgaaatgtcagatgtgaaaacattgcgagaaaagcgggggtggggattttgccggcttttatataagtgattattgtacacatcatatacgtggaaagcataagtatacagtatttttattcgacttcagattttcctgctcacacaagaagaggaggttaatttgggtaca

SEQ ID NO: 1437 - DNA, 29437 bp, Unknown
  gut microbiota DNA sequence
aacaaaaatagaggaatggtaaaatgaaggttgtagtagcaattgattcattcaaaggaagcatgacaagcatgcaggcagggatggcatgcaaagaaggcatattggcggcaataccgaaagcggacgtggtggtcagaccgcttgcagatggcggcgagggaactgtaaccgctttggtagagggcatgaatggcacatatgaacatgttgatgtaacaggaccgatgggacaaaaggtgcacgcaacatatggagtacttgaggatgatacggctgttatggaaatggcagaagcatcaggaatcacacttgttgaaggtaaacctgatccatggaaagcgacctcattgggtgtgggggagatgatactggatgccgtgcacaagggctgtcggaatttcataatcggaataggcggaagcgcaaccactgagggcggcataggaatgctgtcggcgctcggctatgagttttatgatgaggatgacaatattcttccaccggtatttggctcgcttgcaagggtaaaaaagatcaaggctgataaggttccttcggaattgaagcagtgtcatttcaaaatagcatgtgatgttactaatccactgtgcacagagcagggctgcgtatacatttttggaaagcaaaagggcgtacaggagcatgaaaaggcacagatggataaaatgatgagacagtatgcagactgtgttgaggagtatgcgggaaaaagattcagcgagacaccgggagcaggcgctgcgggaggtcttggctttgcgtttctttttggacttgagaacgtggagcttaaatccggcatagatatagtgctaaacgcaatacagcttgacaaggaactgaaaaatgccgatatcgtagtgaccggagagggcaggcttgatggacagagcgccatgggaaaggtgcctgtcggagtggcaaaagcaggcagaaaaaacggctgtaaagtaatcgcacttgcagggagtgtcactgacgatgcagtggcatgtaataaagaaggcatagatgcgtttttccctattataagaggggcaacaacgcttaatgaggctatggatatcaaaaatgctcaaaaaaatatgaaaaacactgcagaacaggttttcaggcttattgacatcagctcgcttatggaataatatatgttagtaaaattatgcgtggtgcaggggccggatgagatataaaagccccgtatatcatagaatatttaaataaaaaaggagaaaagcaatggctaaggagaaaaaattagtagaggccatcacttccatggaggaagatttcacacaatggtatacagacgttgtgaagaaagcagagttgatggattattcatctgtaaagggatgcatgatctttaaacccaatggttatgccatctgggagaatatacagaagaatctcgatgcaatgttcaaagagacaggtgtagagaatgtatacatgccaatgttcattccggagagcctgctccagaaggaaaaggatcacgtagagggctttgcaccggaggtcgcatgggtcacacagggcggacttgagacacttcaggagagacttgcagtaagacctacatcagagacacttttctgcgagcttttcagcaaaacagtacagtcacacagagaccttccaaaggtgtataaccagtggtgctcagtagtgcgctgggagaagacaacacgtccattcctccgttcatcagagttcttatggcaggagggacatactgttcatgcaacagccgaggaggcagaggcacgtacagtacagatgttaaacatctatgcggatttctgtgagaaataccttgcaatccctatggtaaagggaagaaagacagacaaggagaagttcgccggagcagaggctacatacactatagaggcactcatgcatgacggaaaagcactccagtcaggaacatcacacaactttggtgacggcttccctaaggctttcggcatccagtacacagacaaggacaataaattacagtactgtcatgagacatcatggggagtttcaacacgtcttatcggagctatcatcatggttcacggagatgactcaggactcgtgcttccaccaaagattgcaccaacacaggttatggtcattccaatccagcagcagaaggacggcgtccttgacaaggcatacgacctcaaggacaggctctcaaaagatttccgcgtgaaaattgatgcaaccgacaagacacctggctggaagttcgcagcacaggaggttcagggaatctcaacacgtatcgagattggaccaaaggatatcgagaaaaaccagtgcgttatcgtccgccgagacacaagagagaaaatcgttgtctcactcgatgaggtaaatgagaagctcgcagaggtacttgagacaatgcagaatgacatgctcgagaaggcaaaggcattccttgcaagccatataaacgatgcacacgactacaatgagttcaaggcaatcgcagagacaaagcctggctttatccgtgcaatgtggtgtggagacgaggcttgcgagaacaaaatcaaagaggatacaacagttacaagccgttgtatgccgtttggtgatcaggagcagatttccgacgtatgcgtatgctgtggaaagccggcgcacaaacttgtatactggggcaaggcatattaaaaggagaactaaacgatgcgcatagatttaccgcagaatgtcaacttcataatagacaggctctacgagcatggctttgaggcatatgcggtaggtggatgcgtgcgtgacagtctccttggcaggacaccgcaggactgggatatcaccacatctgcaaagcctgcgcaggtcaaagcgatatttgaccatacgatagacacaggcatcaagcatggcacagtcacggtcatgctggagcatgtgggctatgaggtcaccacctacaggatagacggagagtacgaggatgcacgccatccaaaggaggtcacctttacctccaatctgaagctagacttagagaggcgcgacttcacaatcaatgccatggcatataatcacagggcagggcttgtcgatgaatttgacggcataggagatttaaaagcacatgtgatcagatgtgtgggctgtgcgcacgacaggttcagtgaggatgcactcaggatgtttcgtgcggtgcgatttgcagcccagcttggctttgatatagaggcacagactaaagcagccataaaagagcttgcccctgccttgtcaaaggtcagcgcagagcgaatccaggtggagcttgtgaagcttctgacatcagatcatccgcagatgatgagagatctgtatgagcttggactcacagcggtattcatgccggagtttgatgtgatgatgcagacacctcagcacaataagcaccatatgtacagtgtcggcgagcatacacttcataccttggagcatgtgcgagcggacaaaatcctaaggcttaccatgctgcttcatgatgtggcaaagccggtgtgcattacgacagacgaggaaggccagaatcatttcaagaagcatccggttgtgggagctgatatgacaagaaagatactcaggcgccttaagtttgataacaggactacagactgctgctgtaagctggtaaaagagcatgatgaccgtccggccatcacggagcgcaatgtaaggcgtgccatgagccgcataggaacagagctttttccgctgttgtttgaggtgaaaagagccgatacactcggacagagcatgtataagcgcgcagaaaagcttgaatacatcgcagaatatgagcgtgtatacaggaaaatcctcgcagaccaccagtgtgtatcaaaaaaggaaatgaaaataaatggcagcgacctgattaaaatgggagtagagccgggaccgaagcttggcgatatcctggacagactttatgagcaggtgcttgatgacccatcgctcaatgaagcacaaaaacttaaagagcttgcgaataaaataataacctctctcatatgattaaaaagcatctgaatagttatggtgcattaatcatatgaggggggatttttttgtataatcagccggaagtggctttggaaaaatatgagcttacagtaagcaggataataaagggcagaggagcatatatatgtgacacaggcatcgggcagaagctgctcgtgccgtacagagggcatgagcaaagggcatgcaccctgcgggatacgctggcatttatccagagaaacggtatggatgtggagcagatatcacagacaaaggagcagtgtatcatatcgcgggataactgtgaggacgcatacatattgaaggattgcagagcaggcagagagtgcagcacggacagcatagatgatatgcgtggcggcagcagggcattagcgcagctgcacaatatattggaaaagtatccgctgccttcggatatcgaggtagaaagcctgcacgaaaaagctcagcgtaaatgtgcgcagatagtaaagcttaaaaactacatactgcgtcgcagcaagacaaatgcttttgagcatctgttttatgaatgctatgagagattcttagagcaggggcagaaatcggcggaaatattgtgtgagctggaaaatagtaaaacgtcggttccgatatactgtcacggagccttcaaccagcacaatgtcgtgtatacacagtccggaagatggcttcctgtcaatttcgagaccatgcatccgggatatccggaaactgatcttgcggagtacatgcgcaagatgctcgaaaaaaatcactgggatacagcggttgcagatgcaattcttgacagctattgcagcgtaagaagtcttgatgatacatcaatgagactgcttcaagcactgcttttgtttcctgaaaaattttgtaagctctgcaatcactatagcaactcgcgcaagtcatgggtatgcgaccgtgatgtggataagcttgcacagctcatacagctaagcggtgagcgcgaggagtatctgcatgccctgcatgccatagtgtaagcagtaatgcatatatatagtgaatttaattgaaaagtacatgactatacgatatattattattgtagaaaaacgtttaaagccagctattaaaggaaatacatatgaagaaattcaaaagattattttgcatggtatgcatgcttgtgctgtcacttgcagcatgtggaaaacaggacacggatgatggtgtaaaaaaattctataacagcatgaatgatacgacggaggccgtgggagaaagcacgcagtccggtttgaaagctgctgcggaggaaaacggaaagtccgttaagaaaagttcagatattctcatagtatcggacataaacagtgccaacgagacgatcagggtatacaattactcgacaggagtgcagtatcagtattactatgggctgaccaccggctttttcgacaaatatggcaatcacatgtcagtttcagacatacatcagggtgatgtggttgacatatcaggggcggattcagacggaaaggcaaagcgtatacaaaaatccgataaggtgtggacaaacgatgcagtgactaatttttctgtggataaggataagagcgtgcttgaaatcggaaatagcagctacaggctgggtgagcgcaccatgatattttcaggctcggatgtcgtagatactgacagccttacggcgcaggataagctggctgttgtcgggattgacaaggacatagtgtcaatttctgtcacgacagggcacggcacactgcagcttagcaacacatcactgtttgagggcagctttttgcagctcggagacaggatatttgcagaaatcactaaggatatgtcgcttgatgtgccggagggcagctatacgctcgctgtggccaacaatggctggggaggcagcacggatattgagataaaaagaggagagactacaaaggtaaatttaaatgatttaaagggtgagggtcctaaaaagagcagcatccttttcgaggttgacgtgcagggggcgaaaatatatgtcgatggcagtgagatcgactatacgagcccggttgagataacatacggaaaacacacgcttaaggtaacagccgatggctatgacacctggacgaggacgctttacgtgaactcgaaggaagccaccatacagattacgataaacgacaataaggacagcttgggcagtgattcatcaggtaccaaaactaacagcaccggcagttcacaagccaccgcacagacaccttccgagacagcctcagagagggcagatgagaaggacaatcaaagtacatctcagggcagcaccaccggcagctcgcagagtacaaattcatcacggggaaccaacaataaatcctctgacagttccaaaaatagtctgacaaataaggacatatccgattatctttcaacattaacctctttattaagttcaaagtaaggttttaagaatggtaaaagtacataaaagcctaggaaatagcgcattttccttgacaaaccccataaaaacaagtatatatattcttgtaggtaatttgggaatacagctcgaattatataaattatgaaaatccagaggaggaattttatcatgaacaaagcagatttagttgcagctatggcagagaaggccggagtatcaaagaaggacgcagaggcatctttaaaggcattcacagatgttgttgcagaggagttaaagaaaggtgagaagatccagttagttggattcggtactttcgaggtatctgagagagcagcaagaacaggaagaaatccacagactggcgctgagatgacaattgcagcatctaaggctcctaagttcaaggctggaaaggctttaaaagattctcttaactaataagttagactatcacggagtagaagaatgggtgaagcctttaaggctccgcccatttttagctatatccactgaaatcagggtaatagttatgaattgatttattataggtaagacacagaggtaacaatgagattagacaaatttttgaaggtatcgcgtctgataaagagacgtacagtggcaaatgaggcatgtgacgcaggccgtgtcacagtaaacggcagaccggcaaaggcatctgtaaatgtcaaggtcggagacataatagagatagcatttggacaaaagacagtcaaggttaaggtgttaaatctccttgacacaacaaagaaggaagaagcaaaagatctttttgagtatatataggttatattttcatgaatcccggcatatatttacatatgcgattccacagatggcatgtatatgtgcggctgtctatggagcatattaaaaattatgtgagggacaggaaatggaagaaatatcaggcacaaagagtcataagcttatcttgaataatcgcagaacaggcagctttacaggcattttggatgtgctctcctttgatgtgggagagatacttttggagacggagctaggcatgcttgacctaaagggcaaggatcttcacgtaaacaggctaaaccttgagaagggagaagccgatatagaaggtgagatagacatgattacgtattcgaaggtaccggaggtgaccggaaaaaaagataaaatgtttggcaggatattcagataagcacctaaggaggaataatgagtaaacgtcgtgcaaagagaaggggcggaactttaagtgtttccatcatagttatagcatttcttgtggttatggtagtccaggttgtgcagctaaagcagaaggaatctacatataccgcacaaaaagcggagcttgaaaagcagtacactaaagaatcggagcgtgctgatgagatagaaagcatgcagcagtatatgcagagtgaccagtacatagaggatatggcaaagagcaagcttgggcttgcgtatgacaatgaaataatcttcaaggaaaaggacaaataatttttgaacagatagttgcgctttttcgtcaaaaccttcatttttgaccacatataatcgttgaaaaaagatggaggcgcaaagatgaggattgcaaatttaaaaaaagctatgtgggggtttatggcatttgcgtccacactggtgtgtgtgatggattgttatccgctgatacctgcagtgtatggagtttattgtctgagcaacgctcgtacgattattttttacataggattaattattggaatgggatactttatatcgataccatcgatatgtaagtatctctttattattgcggtgatttgctttggagtgaggcttttcgtgagaaaaagcaataaaaacggatgtctgacaacagccgttgtagcagcctgtgccacggcggtgatgaatctgacggtagcatttattggaaggcctgatacggatgagatagtgttagctgtagctgagagccttgttgtgttttcggcagcctttgcgctatgcagagcatgtgaatatttaagggcttttggacacgatgaaaatccggtcatggcaggacttttgcctgacagggaggaggcatttgccacagcagtttcaggactttcaggcattatttcgactgcaaatgtcatggctgtaaaatgtacggcagataaaatccctgatgagagtgagaaaatacagcttgaggtgacagggaggctttgcgcgtgctgtgagggctgcagtgtttgctggacaagcggggcttcgatttctgacagcataaaaatgcttgctgatgcagtgcgcaatcgtatgaaaacagaggaaattgtgcaaaacagatatgtggagggctgcccgcactacacgcgtatggtggaagccgctacagaggcatttgcccgtattgagctaaatgaagcctggtacaggcgtctcacggaaaacagacgcgtcatagccgcgcagcttgacgctatggcagagctcatggagggctggtgcagggctgaaaaatgcattgataaaaaaagaaggctgcgtctttcaagagtttatgtatatacaaaagaggcaggtatacaggttgaaaatgtccatatttatgagaatgtaaggcaacagatatgtataaaggcagatgtctgcactaaggcagatggcgggattgaaatttcaaggtatgtacagtcagtttcgcgagccatgggaatgaagctcaggcaggcgcaggggactgtttcaataatctctgatgagaggacatctattgtgctgtacgaggagaatcagttctatgcgctttccggagtggcgaccaaaaagaagacaggctctcaggcaaatggcgacagctgcagcatgcttcagctggatgatggcatgtatcatgtgtgcgtatccgatggcatgggctccggcaagcaggctcaggctgagagcacgctggttgtggatttgcttgaaaagctcttagaggccggctttagcagggaaagtgccctaaagctgatgaactctgcaatggtcatatcggcgggagaggagtcctattccacggttgattttgctacgatagacatgtacacaggtgagcttgagctggccaaaacaggcgctgcaccgtcatttatcaaatcagggaaacaagtaagtgttatagaaaatgaatcactcccggcgggggtcgatgtctggcaggagggcatacattcaaaaaatacacttcaaagtggtgattttcttgtcatggtgactgatggtgtgctagaatatctgcatgtaaaggacaggcaggggaagcttatggatatcatcgcaggcgtcaaaagtgacaatgcaggtgtgctggcacaggaaattctggacagggtgctgcttgacacaggtggatacgccatggatgatatgactgtagttgcaataggaatctgggaaaaataatgattagacggacaaaagaatatattctggaaaacaagatgataaaaaatcacagcacggtgcttgttgcgctgtcgggcggtgcggattcggtctgccttctgctggtgttaaatgagataaaaagacagtgcgcagatgagcttgattttgcgctggaggcagtacatgtggagcacggcatcagaggtgccgagagcagggaggatgcgaggtttgcgtcagatctctgcgaaaggcttaacataccgtgtcatgtgcattccgtggatgtaccgcaatatgcagcaagtcatggactcgggctggaggaggctgccaggatattgcgctatgaagcgtttgaaaaggaagtcgccactgcctatgcagcagaccaaaagcagggtaacagcaggcaggtagtcgttgcagttgcgcaccatatggaggacaacgcggagacagttctttttcagatgattcgcggaagcggagcgaagggactatccggcatgcatccggtttccgtgaagaacggtgtcatctatatcaggccgcttttattagcaacacgcgcacagatagaggaatatctaaaggaaaacggacaggcttttgtcaccgatgccacaaacacggacacagcctactccagaaataagctgcgccatgatgtgtttccactgcttttgcagattaatgacagggcgatagagcatatcaatgagagcgcaggacagcttgcgatgatgaatgatttttacgagcagcagctaaaagaggcgtgtgacagcatggtttcaaaaaaagaaggcagggtgatacttgaaatcagccgctttgagagcctgcatccggcattaaaaagcggagtagcgcgcgagtgcatacatctggcgtcagggcggctcaaggacatcacgagcacgcatatcggtgcacttgtgaagcttgcagggcagcagtcgggcagaaaaatcaatctgccgtatggcattattgcggaaaaatcatttggcgaggtgatactcttcgccggaaggtgtgacgatgaaaaagaagaaattcacattaggcaaaaagagcttgaggcactgagtgccacgggagagcaaaaaaacataaagctttcggcagatggctcgtatgtcacactttgtatacaagattttaatggtaaaatggacgaaattcccaaaaaaccatatacgaaatggtttgattatgataagatgaagaaaggctttgaaataagaacaagaaaagccggtgactatataattgtggatgacgagggccatcataagaagctgaagcaggtatttacaggtgataaaatccctgcacagcagagagcgtggctttggcttatagcccatgaatcactggtgcatgccattatcggatacagatccggctgcagcgcacttgtcacaccacagacagaaaaagtacttaagatcacattttacggaggaaaacaaaatggatttttcaaagaaatatgatatttcggtttacctgacagaggagcagctcaataagcgaattgcagagattggagcgcaaatcacagaaaaatacaagggacagtcagtatatctcatttgtatactcaagggctcaatattctttaccacagagcttgcaaagagaattgacctgcctatgactatggatttcatgtcggtatccagctatggctcaggcacagagtcatcaggcgatgtcaagattaaaaaggaccttgagcattctatcgagggagagaatgtcatcatcatagaggatatcattgattcgggaaatactcttagcaggctttcaaagctccttgccaaaagaaacccgaagagcctcacaatctgcacactcttggacaagcctgagcgccgtgtagttgatgatgtaaatgtagactacgtgggttttgtgattcctgacaagtttgtggtaggctatggccttgactatgaccagaggttcagaaatctgccttacatcggctttgtcgagggcgaaataaaataaaaaggagaagtaaattgaataaacaaaaaagcggtatgcgcggaatgggcgtatacattatcattgtatttgcagtaatctgcatctggtactggctgagcgccggcgccacatcaaactcttacacacagagtcagttcgagaaggatcttgacaagaatcaggtgaagagtgtaaaggtggtgcaaaacagggagataccgacaggaagcctggaggtaaagttcaaggatggctcatcaaaggtgctttatgtatcagatgtcaacaatatcgaaaagaccatgacaaaagcagggtacaccgactatacagttgcggatgtgccggctgagagctggattatgacactgcttccgtatcttttggtattcggagccatgttcatactctttgcagtgatgaacaacaacgcagcagcacagggcggcggtggcaagatgatgaacttcggcaagaaccgtgcgaagctcaccacacaggaggagaaccatatcaagttttccgatgtagcaggcttaaaggaggaaaaggaggagattgcagagatagttgatttccttcgtgatccgggaaaatacaccagacttggagcaagaatcccaaagggtgtccttcttgtaggacctccgggaacaggtaagactctccttgccaaggcagtagccggagaggcaggtgtaccgtttttcaccatttcaggatctgatttcgtggagatgttcgtcggagtcggagcttcacgagtgagagatttgtttgaggatgccaagaaaaatgcgccttgtatcgtatttatcgatgagattgatgcagtagccagacgacgtggcacaggaatgggcggcggacacgacgagcgtgagcagacattgaaccagatgcttgtcgagatggatggctttggtgtcaatgagggcattatcgtcatggcagccacaaaccgtgtggatatacttgaccctgctatcatgcgtccgggacgtttcgacagaaaggttgtagtaggcagaccggatgtgggcggcagagaagaaattttaggtgtccatgccaagaaaaaacctcttgcagaggatgtagacttaaagcagattgcacagactaccgcaggcttcacaggtgcagaccttgagaatctgatgaatgaggcagcaatccgtgcagcgggcgaaaacagagaatatatcacacaggatgatatcagaaaatccttcgtcaaggttggtatcggagctgagaagaagagccgtatcatctctgacaaggaaaagcgcatcacagcctaccacgaggcagggcatgcaatccttttccatctgcttccggatgtgggacctgtatacacagtttcaatcatccctacaggagcaggcgcagcaggctacaccatgcctctgcctgagaaggatgagatgttcaacacaaagggacgtatgcttcaggaaatcgtagtagacttaggcggtcgtgtcgcagaggagctcgtatttgatgatatcaccactggtgcatcacaggatatcaagcaggccacaaagcttgcgcgcgagatggttaccaaatacggtatgtcagacaatatcggccttatctgctatgccgatgatgaggaggaggtcttcatcggacgagacctcgctcacacaaagaactacagcgagggcatagcatcggcaatcgatgtcgaggtaaagcgaatcatcgacgagtcgtacgacaaggcaaagagcatgatagcagagtaccgcgatgtgcttgacagatgtgcagcacttcttcttgagaaggagaaaatcacaagagatgagtttgaagcactgtttgatgaggacagcaaaacagcagttggacataatatttaaaaaacagctatgcttttgtgcagaatcactatatgaaaaatattaaatataactaaagtactatacaaattgcataaaaacaaaccacgatttttatgcaatttgtgaacacttatcgttgcaatcatgatactataataaccgtaaaaaccccccaatacattatatagtttttgctataccccatagtaaaaataccttctcctaaaaggcagccgaacgtaggctgtcttttttaattttaaaatgtacttgcataatcacatctgttgtgataaactatgcaggtatcgtaattgaatacatgggcagattcccgagtggccaaaggggacagactgtaaatctgctgcaacttgcttcgatggttcgaatccatctctgcccattaaaaaacctcaagtcatatgacttgaggtttttgtgttgtccggctgttattgtttaatcggtctgcgttccgctggcagtaagcacagcctcccatgccatcgtatcagaccagccacttgtatcaaagccgtcgcggatacatctgctgtagtagtcgagcttgtttcgtatcggcgaatcatctgtgaatcttgcatcatcataaatgccgttaatataatcgtctatcgcggttccaaatatttcagagcgatcctctgttgcaaaggtcatgccgtaggaatcaatgaaatacccggatatgtggtttgatggatcatccggattgtagtttgagtagctgtcatcatatgagaagctgtcagggttaaagctgttccatttctcctcggaaaactcgcttttttcatcataggtgtgtatgaatgcaagcctctggtctatcagatgggaaatctcatggccgactgtgtagctgaaatcccagctgtagttgcagtttagaaccatcacattgtggttgtttattatatttacgaatccgcttggctcatttatcatatctgagtggcctgatgaaatatcaccgcacagatatattcgcatgcctcttatatcgccataacacagctgcgtgaaaaagtcatcagggaaacagccaagtatttcctcaagggcatccagagagaccgacagcttatccttgttctttaattgatggatatcgtagtaatcaatcctctttggcacctcaggcccgaaatatatggaaaagccgtatttttgttcaagggctgtgatacgtgcatttatgtcggataaatctccccagtcatatgacgtggtgtcaggtatcagagtgacctcatctccatatgtattgtagtcggaatccttcccggcctcttcctttgcctcctggttttcatgggtactgtcatcagtgtctatggcagaatatggggatacatatgagccgtcatcgcgtaaggcttgtagcagagtatcgcagtcattgtatgacgtgatttcagctttggtgtcattctttcccttgtcgagtgaccagatgagtatttccgggttgcactgcgctgtgtacaaaagcagcatcacacagtttgcatcaggcagatataccgagttggcagaaaaataggtctgggtatcggccgttgcagaatcagatgagctgccttgggctctgcctgagcctcgtgctgccggattgtatgaaaaggatgagctgacaccggtgacgggtgaatatttataataactgatgctgttgtctgaggataaatcctggcaccgtatgagcatgtcattgtcctcggccagtactacatccaccacatccggcagagaaaaaaagctgttttttccatcggatgaatgatagttccatatattgttggcagtatctgtttcaattacaaagccttttgagtcgacacatgacatggaaaagctctgcccttcgtaggttgaaagcactgtattatcgtcaagccttatatcagagattacatatttgtaggtatcgggcgtgacacctgatacgagagcatattttttgtcagcggaggtggcaatctgtgaggcatcatagtaattgccgggattcggcacttcagtattatccggatcagatgcatcgccattgccatcatagtccttgggattatatttgcaggttttaatttccttcaaatccttatcatagatggttgcttttttggcggatgaatcgaggagccacaatttatcacccttaatcagatagtcatcgcagtccgtcttgtcgtgggcaagacttgcggttatttcgttggaccagggattgtatacatcaaatgaatactgaacggattgaccatcagtctctatgatggaattattgtagctgccctgccctaccataagtatattatcgccgaattgccttatatcattgtacgggcgcccctcaaaggcgacattatgcaggatagaaagattactgcttccttcaacgcttgtggtatcatcccaaaaagcaggtgatttgtgcagaatagcctgcttttgtgcggggctcttgaataaataagagacatccgaaaaagagcaggctgtcagagaaatcgcgctgcatagcaccagcgaatatgtaattaaaatagttgcatgtttgcgtttgaacaattttgcctcctttggaaggtggtacatacactgttattcgctgacagtgtgcgcagtggaaacacgtgcggtagattctctttcaatcagtctcggacgcagctgtgtgcggctgattggaatatggtgaatgagcgaattcaatataatatatgcacagcggccaagatcattacactcctgtctgatagtggtaagaggcggggtgagggctgcagcaaatttgacatcgtcaaagccgaccacacttatatcatttggcacattgaagccgtgcagctggcattcagatataacaccctttgcgatagcatcgctgccacagaggatagcagtagcgcccgctgcaataaaattggaaacgtagtactgtgcagtctccggaatatagtagccgtgacccatgagctccgggtagatttcaagaccggcatcgcgcatagagttttcaaaagcctcctgacgctgatctgaaaccagggaaaaaagagaaccattgataaaggcaatctttttatgccccagattgtgcagatgctttatagccatgtcaatgccctcgtagctgtcggtacctacataggctacattggggttgttttctatatagttatcaaacaaaacggtaggcattgtagtgcttttgagctgctgcatccactcatcgtgcagagcgaagcctacaagaaatgcgccacaatagccgttctttaatatataagtatcatatttttcttctgcctgcagctgaggagtgacagggatgatgtccacatcccatttgtgcttgaaagcattctgcttgaaaccaagcactacatcatatccgaactcatcgatagactcgtagttcatattttcaatgaacagagccagcttgcggttttctacctttcttgagcgcttagtgctgtagcccatctcgacggcagtgtctaaaacggtctgacgaagctcctcacttatatcgctggcaccatttaatccttttgaaacagtgctgattgatacacccagccgggcggcaatatccttaatagtagccataatgttattcctttcttatgtgataatagaattatacaattactatcagaaataggcaatattttccacgataaatttttcgaaaaatatctttgaaatcgtggtaataactaccaaaaaatgagtgcaaattacgtgaaaagtggcaaaaatgggttagaagacgctaaaacaattgacaaatacgacaataggaaataaaatatactcagatacgaaaaaaatagaaaaaatttaggaaagaggaatagaaatttggaggccagagaaaatctcagaggctccggaatacttctttcgatctcgagtttgccgtcaccatatggtataggtactcttgggagagaggcatacaattttgttgatctccttggcgatttgaaacagaagtactggcaggttcttccggttggtcccaccatatttggcgatagtccatatcagccatcatcaggctgtgcgggcaatatctattttatagatttagataagctggcagatgagggattgttagagagggaagaaatcctggggtacaattggggcacagatcaatcagaaattgattatgcagcattacatcagaacagatacaagattttacaaaaagcgtttggaagatttgacacaaatgcacaagagtttcaggattttgtaaaaaaacattcggggtggcttgaacaatatgcactgtttatgacactgaaaaccgacaatttagacaaaatttggagcgaatggccaaacaagtataaaaatccgcaagcggttgcgcttgaaaagtaccaaaaaaagaattataatacaattactttttggaagttctgccaatataaattcttccaacagtgggaggatttgaaaaattatgctaactcaaaaggtatctacataataggtgatgcctcattttatgtagggtatgacagcgtagatgtatgggcagagagacaactctttatgatgagcgcaaacgatacaccggagtatgttgcagctgccgctcctgataagtattcagagaacggacaggtgtggggcaatcctatgtatgactgggatgccatgaaggaggataacttctcgtggtggagaaagcgtatgcgtgtatgcagagagctttttgatatcgtcaggattgatcattttgcaggaattgtaaaagcatatgcggtaccgtacggacaggacaagagcctatccggtaaatggttcaagggaccgggacgcaggcttgtcaatgcaatcaacgaagaacttgagggtgttaatgtagtggctgatgattatacgtcagcgagccttttgccgggagtgaaaaagctccttgcaaagtcgggctggatgggaacaaaggtcatgatgtttgcctttgacggtgatccgaccaatgaatatctgccacacaattatgctgattcacatgtagttgcatatattggcacacatgacaatgagacaatagttggttatttcagtgacaagacagattatgagcttgcttatatgtacgagtatctgaatattgaaaataaatcacaggttccaaatgctcttatcagggagctgtatcacagcaccgcagagttggcgatagtccagatgcaggatatattagagcttggaaatgaggcgaggatgaattatccttcaacagtcggacataactggagatggcgcatgacaagcaagccgcacagactggacaacgaaaaaatagcctggattagaaacattgcggtggtttaccgcagataattaatttgatataagttgcacggcaatttatatatatacttttttacattttatattcaaaaaggagaggaagatatgaagaagaaagtattagcatctttactttgcgcatctatggtagcaacaatgtttgcaggatgcggaagcagcaatggaaatggaacagagaaagccgacaagaaggacggcggtaaggagaccattacagtaatgggacctgcagaggatttagacgatgcacagggcgcttggcttaagacagagtgcgaggcattcgctaaggcaaatcctgatttcaacatcgagttcaagtatgttacatcatctgagtcagacgcaaaggatgttgttacaaaggatcctaaggcagcagctgatgtttacatgtttgcaaacgatcagcttgagccattaattaaggcagatgctattgccaagttaggtggagaggcagcagattatgttaagtcatctaactcagaggctatggctgcaacagttacatatgatggagacatctacgcagttccttatacatcaaacacatggttcatgtactatgacaagagagtcttctctgaggatgatgtaaagagccttgatacaatgcttacaaagggtaaggtttcattcccatttgataatggctggtatctcaatgcattctatgcagcaaacggatgtacaatctttggagatggaacagacaaggctgccggatatgactttggcggagataagggtacagcagttacaaactacatcgtagatttatttgcaaatccaaactttgtaatggataacaatgagggatcacttggtcttgctggacttaaagatggttctatcaatgcttacttcaatggtaactggaactatgacaaagttaaagaggcacttggtgaggagaacgttggtgttgcagctcttcctacaatcaatattggtggaaaagactgccagttaaaggcattcttaggatctaaggctatcggtgttaaccctaactgcaagaaccaggaagtagcagttaagcttgcagcattccttggcagcgaggacgcacagcttgctcacttcaagttaagagcacaggctcctgtaaacaaagatcttgcaacaaacgaggaaatcgcagctgatcctgtagcagcagctatggctaaggtttcaactgattgttcagtagcacagcctatcattgatatgtcaggttactgggatgcagctacaccattcggtgatgctttccagaacggtgcagaaggccagattacaaaggacaatgcagctcagaagacagaggacttcaatactcagcttaatgattctcttaaataattaagtagatcagaatatgattccaaggttccgggcgaccggaatcttggaataaattagtttaaaggattggcatatataatgcatgccaggaggaaaagtatgataggagcaaacaaaaagaaaaaagtttcggaatttgctactccgtatactgttggcaatgccctcacaaaaggcggagctacagttaagctatcggcactcgtaatgggtcttgccaatatggctcataagcagatcataaagggtctgatttttcttgctatagagattgcatatatagcatatatggttaacgctggtgcttattacatttccatgctgccttcacttggctggagaaagcaggaagaggtatttaatgagcagaagcagatttatgaatatgttgcgggcgaccagtcagtattattactgttatatggcgtcataacaattgccatcacagtattatttatttacatgtggtgcgagaatttaaagagcggatataaggcagaatgcctttcaaaagctggaaaagaaatcaattcttttggcaaagatgtcaaggatttatttgataaaaacctacataagacacttatgtttctcccacttatgggaatatttatttttacagttttaccattgctgttcatgattccaatggcctttacaaattattcggtaaagggtgatcatctggtattgttcgactggacaggcttcgcctcattcggacaggtgcttggacttggtggtaagcttggtaagatattctggagagtacttggatggacaatctgctgggctgtatttgcaaccttcctttgtaacttccttggactcattcttgctatcgttatcaatcgtaaagagacacattgcaaggctttttggcgtacatgctttgttatctcaattgcggtaccgcagttcgtatcactccttgtaatgagacagatgttccagccacagggtgctgttaataacctgcttttggagtggggctggatagataacccacttccattctggaccaatacgatgtgggcgagagtttctgttattctcatcaactgctgggtaggtattccgtatactatgcttcaggttacaggtgtattacagaatgtgccttcagagctttatgaggctgcaaagattgatggtgcaaacgcagcacagatcttctttaagatcacactcccatatatcatgtttatcatgggaccatatatcatcacacagtttaccggaaatatcaacaacttcaacgttatctacctgttatcagcaggaaagcctacacctgtcggagacagtgcaggaaagacggaccttctggttacgtggttgtacaagctgactattgataatcaggagtacaatatcggtgccgttatcggtatcctcacattcattgtactttctatcgtagcgcttgttacatacagaaatacaaaatcatacaaggatgaggagggattcatgtaatgagtagtgtagcaaaagcaaaaagacctatgtctgccggacgtgctaagaaagtagcaaagaattcccttgttcatatcattcttggaatacttgctgtagtatggctgttcccgattttctggattattatgacaagctttagagctgagagtggtgcttatacaaagtacttcttcccacatagccttacatttagcaactatacgagactgttcacagagactacactgttgaacttcccgagagcattttttaatacactgtttatatcagtgttctcatgcatcatttcaacagtatttgtactttctgttgcgtattgtatgtcacgactgagatttaagctgcgtaagcctttcatgaatctggctatgattcttggattgttcccggctttcatgtcaatggttgccgtatactttatcttaaaggctatcggacttacagagggtagcgtacttcgtctttcactgatcctcatatactcagcaggatcgggagtaggcttctatatcgcaaagggattctttgatactgtgcctaagtctcttacagaggctgccatccttgacggatgtacacagttccaggtattttacaaggttatcctgccactcagtaagccaatcgtagtatatacagtgcttacagcattccttgctccatggctcgatttcgtatttgtaaaggttatcgttggtccaaacgacaagtattggacagtatcgcttcttctttacaacatgcttgagaaagagtttataaacggatggttcacaagatgggctgctgctgcagttattgtatcaatacctatctcaatacttttcgtcatcatgcagagattctacgtggatggacttacaggagctgtcaaaggctaatttggttttatttaggccgctgcacttttgtgcggcggcttttggtttatattggggtgtggcaaacttagcactttcaggttgtgttctaagtttgttgctactttgtggaagatgtgagaatttagtttagaaaataagaaaaggagtgcgtatgattaataataaaataggcggccacaacatggtcggcagggctgtgaatagattggcgggcaggttgactgctgtggcattgacggcagctatggcggtgtcaatgcttgcgggatgtgctgcgggtggaaagaataccgagacggcagcaaagaaggagtacaagccttctgcgatggagcagatgaatgcgaaaaatgatcctaatgtgattcaggacaattacagaacctgttatgaggtgttcgtatatagcttttttgatagtgacggtgacggcataggggatttaaagggacttacagagaagcttgactatatcgagggacttggctgcaatgaaatctggatgatgcctattatgccttctccttcataccacaagtatgatattacggattatatgaatattgacaagcagtatggtactctggatgattttgatgcgcttattacggagtgtcacaagcgaaacataaatgtgattattgactttgtaataaatcacacatcaaacgagcatccgtggtttaaggcggctgctgattatatcaagtcgcttcctgatggggcagagccggattcttcggaatgtccttatgttgattactataattttagcaaaaccaatgccggaggctacaaccagctgccgggcacgaattggtattacgagtcacagtttgtagacagcatgcctgaccttaacctgcagagcgaagctgtaagaggggagattgacaagattacatcattctggcttgaccgtggtgtggatggcttcagactggatgccgtgctttattacaataataataaccagactgagactatagatgacctcacatggcttgtgaacaatgtgaagagcaaaaaggccgatgcttatatggttggtgagggctggactacatacagagagtatgcgaagtactataagagtggaattgacagtatgttcaactttgatttttcacagcaggatgggtatatcggaaaggtactcaatggtacagcaaatcatggtgccagcacatacggcaatgctatagttgatgtggataatgagataaagaagtatacagactcatacattgatgcaccattctatacaaatcatgatatgggacgcagtgcaggatactataacggagataatgccgaggagaaaaccaagatggcgcaggccatgaatcttcttatgccaggaaatgcttttctgtattatggagatgaaatcggtatgagaggcgcagccaatgatgagacgaagcgtcttgccatgagatggagcggggattcaaaagctgagggaatgtgtttgggacctcagaatgcagaagaaaccgagcagacatatgatacccttgataagcagatggaggatccatactctatttacaactttgtgaagcagacaatatcaataagaaatgctttcccggagattgctcgaggtacaaataccttcgaaaaggatctgtcaaatgataatgtgtgtatatttacaagagagtacaatggtgagaaagcagtgattatatttaatccatcaaaggatgaagcaagtgtggatgtgtcatcgcttggagtaaatgatgctgttgcaatgcttcagactacaaagaaagcaccatcatataaggatggaacggcaaagctgccggcatattcggtgcttgttctgaagtaaaacatatttgatgaaaataaaatttaattgtttaaatggatttggaagaagaaatataaaaaccgcccgaccgggcggttttttagctataccattttttaaactataccatttctttaagcatatctacaatcacttctctgcaatgagctccgagatgcttttgttcctctttactgagtgctgccggatcaataggagtgccatatcggataaccacatgattctttttgacccatggaaggtgatcctcgaatatttcatttgttcccatgattgccattggcactatcttgcatttgctctttgtggcaatcttgaaagtaccttctttgaaagattgtacctctgtcaggtcatctttgtttttgcagcgtgtgccctcaggaaatacacatatactgatgccggatttgacctgatctatggctgcaagcacgacctttagtccctgcttgatgtcatcgcggtccaaaaacaggcagtgcaggcgcttcatccagagacccagcaccggtatttttgtgatactctgctttgagatgtagccggtcaggcgtggacatctggagtaggtgattatgatgtcaaagaaactacggtgatttcctatatatagtacagcctcgtcctttggcacattttcctcccctataaattcaatgtctgctccgcttaggaatatgatgacacggaaagcccactgtaccaggcgaagctgtgccatatcggcccatgccggggcaaatttgtgtattatccacatggctccgagcaccggaagaccgagcagcagatagaaaaatacgaatattacgattaaaactgaacgcatatttgacctctctttttcatactctatataaattgtagttcaatatttgatattatatcatatcataagcgatatgataagaaagagaggaaaaaatgtcagaaaaattgagaaaaattctggtgatggctgcaggtgtgcttgtgatatcggcagcgacagtgatttcgggctgccgcgcaaatatttcaggcacggagagtgacaggatggttgagtacacggtaatctgcggggatgaaatcccggaggagtttaaaaagcagataaatgaaaacaaggcaaaggcgatgaagctgacgtacaaggatgatgaatatttatacatagcggaaggctttggcacaaaggagacaggtggctacagtattacggttaaccagttttatgttaaggataaggcaatgtattttgatacgcgtctgatagccccagataagggcgagaaggtcagcaatcaggcgagttatccgtatatagtaataaagacggaattgagtgaaatgcctgttgtgtttgagtgaaaatttcgtaaattgtattaaaagttgcgaaaaaaactgacaatcagtactaatgctctattgctatcactgcaatactttgctatagtaaagttactagatattgtggtgacatatttatatattcaaatatattgattgatataattgttgattaatttgacctgttttatatttatacagagattgatttcatatatatgacaccgtcgttacaatactggttaccatgaggactatagttatgtgccagtgggcatacccacaataaggaggcttaaaatggaacagacagaaattagaaaagtcagagcatcgattcaccagcagtgtggcaacagggtaaaaatccagcaggatctcggccgcaacaaggttgacatccaggagggtgttattcagcaggcatacccaagtgtgtttacggttctgatagatgatgagtttgagcagaatccgccacagctcttatctttcacctacactgatgtgattacaaaggatataaggatgcagctttgctagttttatcatgaattaaaacggctgcatctgcataaagttactccatcttgaatatgtattttatatacatatttgaagtggggtattttttatggaattaattacacaaaaaatcagacaatgcatagaaaaggtaaaggatatgtcgcaggttggcttcgacagggattatgtcataaaggacaacaagcctgatgtttccaaagtggtttgtcagaacgggcaggtaaagattgacgagataaaagcgtcaggcgagaatatctggctgagcggaagtattgaatttgaagtgctgtatacgagagatgaagtttttgaaggcgatgagccggaggaaaatatcggcggaaacagagtggagcatataaaggatgcaataccgtttcaggagaagcttgttcttcaaggagtctgcgagaaggatacggttcgtgtgtataccgggcttgatgagcttacggttggggttatcaattcgcgaaagctctcggtcagaggcattataagcgtggagctttatggagagagggaagaaaatcttgaggttgcacaaaggattgatgacaaggacgtggagcagcttatggggcagatgaaggtgcttaagcttgacagtgttgtaagggatattgtcagaattaaaaatgtcgtcaccttgccaaagaccaagccgaatatatgtaagctcatatcaagtcttgttgatatgagaaatctggagtatacatacgagcgtgaccatatcacactgacaggcgagtgtcatgcgtgtatagtgtatctgagtgaagaacaggaaatttgctgctttgaggtgcaggaggggttttcaaatgaaatacgctgtgagggtgataatgccggaaatattgcctggcttcgcacacagcctgccatgcatcaggttgaggcggaaaatgattatgatggagagctcaggcagctttcgattgaggcagcgcttgcggtggatggaaaggtctggagtgaggaaacagtagaggtgctcaatgacatgtacagcgtatcatgtccggtaaaacctgtgtttgaaaatatgaaggtatgcagccttcttatgaaaaatgacacaaaatgccgtattttggagcagttgtacagagaaaacagcaaaaagagaattttaagaatatgcggtacaaagacgcaggccgctattgcacagataaaaaatgcagacacaggaattattgtgtcaggtgtattgcaggtgaactgtgtgaatattgtggaggacgatggctgtccgatagagatgcatacagactctgtgccgtttgaacagtttgttgagatacccggcatggatgccaacacctgctgcgaggtaaatctgcaggtagaccaggtgcaggtcaatttactcgacaacagcgaatatgaaatcaagggtgttgtcagcataaacgctattgccctgcagcaggatgaagtgtcagtcataacatcggtggagcaggaaaaaatagcgtctgatattgaagaggaagcagctctggttggctatatagtgcagaaggatgataaaatgtgggacattgcaaaaagataccgcaccactgttgaaaacataatggaaataaacgctctgacctcagatagcatcaaacctgatgatagacttataatagcgcgtatgtgaatcataaattaggggcaaaataccttttgaccctcatatccttatataaaatgtggaaaattctgtaaatttacaaaaagatgtggaaaaaagattcattttgtgcgataatatatccgaatgtatattgaacgtaaattgtggaaggtaaggtcaatctgaccgtcgtattacaggaggaataaaatgaatcagaaatggacacgtgctatatgtacggtgttaacatcggcactcgtttttacaggaccggcagtagagggcactacatttagcggatacataaacagtggacttgagaaggtatatgccaagacacagaagcagaaggatgcagagaagaagaagtcacaggcagagcaggatctcaaggataagaagaatgagattaatggtctcaaggatcagcagcagactactgctgatgatataaagaataaatctgcaaagcttgatgagattcttgcagcacaaaagaagcttcaggcagatatcacaagcaaacaggcagagatagagcagaatcagaaggatcttgcagcagctcaggaaaagcagcaggagcagtatgacgccatgaagaagcgtatacagttcatgtatgaaaacagcgctgaagacaatatctggacagcaattattgagtcaaatggtatcacagatatgctcaatcgtatagagtacgtgtcagatgtatatgattcggatcgtgctcttatggattcttatcaggcagcagttgagcaggtgaaggagattggtaccaagcttgacaacgacatgaatgagctcacagccatgcaggatgactatgagaagcagcaggcagatgtcgaggcggctatagtagcccttgaaaaccagaaggagcagtatgcaagccagatagctcaggcacagcaacaggcagacaattatcagaatatcattacggcacagggcaaaatcattcaggagcaggaagcagcggccgcagctgccgcagccgccgctgctgccagagcgaacagctcatcaagctccggctcgtcaggcagttcaagctatgatggtggtggagccggcaagggcggaagcattgccagtgactatgcagcaggcggtggaaagaaccctagc

SEQ ID NO: 1438 - DNA, 103685 bp, Unknown
  gut microbiota DNA sequence
cttatctatccaaacctttgctaagccaccctcgttccaatgctcacacgcttttttatgggcttctttgtttcccactccgcttttggtctgccttttgccactggcttctctgaaccctcgcttgctcctgcacctataatcgacttaaacgccgcttcttggtcaaattttgcctttcctgccattactctctacctctcctttcaaaaattcctctataaaggctttatagtcctctgatacggtggacttctccgcatactcaaatatatctgttctgtttgcctgtgcttcctctaccgctaccgctgaccgaatataggtcttatatatcggtgcagaaatgtactcgctcaactgttccgtaagttcctttatctgcttgctgatgtttgctctcggattgaaccttgtaaacagaatacccgttatctttacattaggattgcagtaccgctgtacgctccttactgtttcgttaagctggttaattcctgttgtggcaaatatgcccgctgtggtcggtatcagaatatcacctgccaccgtaaatgcgtttacggtcaacacacccaaagagggcggcgtgtctataatgatataatcatacttttccgctacgggggcaatagcttctttcaaacggtgttcttttcccgtctgtgataactcttgctctgctcctaccagcataatgtttggtaatatatcatacccgcctttcatacaaaaatccattaaaattatagctcaaaatcattttatgtgcaatggagtttttcttaccgaaagtgagtttgaaaggcaatcaaagccttgtcatctgccacgcccacgtctacgaaccggtgtgattatctgctgttccgcttgtgcttttagctgctcctctgaagaatgatttctgttgtatttcacacgataatcatattcctcggtaaaatcatcatatacagacatcttgtaacgcatactccgcatggattcttcggtatatcccattctgtcctgatacttctttagttcttcaattcggtcatcagaaggtggcggaagaagtttagcacgtttttccagagagagcttgcggtattctgctggagatggaaacggcttattttgaaccggcaccgttgacgaattgttatcaagtaattcgtctaactcatcctcattatatggttctgcgtcggttgagttatttgttgtgccaaactcagtacttaccgagcctgcgcctgcatcaagtccctgccactctttattgaagtcatcaaatgcagcaccataaaagaaagactcgtcattctccggtatctcatgtttttcctgaaactcgtcatatgcctcatatacagaaacatccggttttctggtcggctgtgactcctgtgttggtatctgctttttagccttagaagcagactccttcacttcctcctcatcctcttcccatctgggataatccttcatggactgactggaatgctcgatgtcctgctcctgccttggataatcaaaccaatcctctttttccttctgtttcatatactccctgatgcctgcaaccgtgaatcgcttaccaagcttactgcctcgtactgcctttaccttgcctccattactgctacgatagggaagggcatagctaatggtattacctttcagccttacattcatatgataggttctttctaacatattcaccacatcatgaatgttctgcgtggtcggatcattcatggcaagtctgatatacacacgcatttcatccttgaaagaaagttttccccttttctgcatatgattttccgctaaggtgcgttcctccctggtcttatccggattgtagaagctgtcacggacagagtgtgtcaagccccggctcctgcactgttctccaaaatattccgacatttccaccagctccttcggacctctccgaaaggaagaaccatccttctgattacagttatttaccagaaaatgcacgtgaacatgctccgtatccacatgaaccgcaaacaatacctcaaatccctttttccagaagaactcacgagcaaagtcctctgccatcttgtaagcctctgcataagtcagcttatcattgtcctccggatgaaaggatattgatagcttctgtgccagaatgtcccgcgggaagaaccggctatacttcttctgatgcattttccttgtcataaggacactgtttgcaaagttatcccgattgcagccaaaagcattatataactccgactttgtcttgataacactggaacttagctgttccttcttcttccccagaatataatctgcagcactgtgaagctgtgccacagacttgcatggagcatattttacattgacatttccatatactgccatctaactcaccaccttttcatatagttttaatactgagtcttccaaccgccggaatactctctggaacggttcaaatgctgtcatggatatcaaatccggataggcattgatattccttgccagctggttgatattgactccctgctttttcagttcgtagcagacctcattcatgacctccataaactgctttaatgttgtcccgtcaatctgcctgcccttgttgccccggagcagatagtcgatgaaatcagcggaagtcttatatccgctctccttcatctgtgattcaaattcctgttttacacggtaatccacacgagaatagattacctcgtctcttgttcgtttccccatagtgtcctccttctttttatctgtaaaaaaagccacaaaactcattggttgaattggcattgctgccttttcttccaattgtttcatggcttcattttttggtattttcagttattgtgttttggctacgattgcaccggattatggctacatactaatagaaattgtggtctgcaccggtaaattgcagtgtcatgcccctgttgtggttctactgttgctctgctttgtagccatttggttgcagatgttgtctaaactgtatctgttatagctatactgtccataagaaccgctatcatctgcatccgtcttggtatttcttcgtagcctttgtgtaagcgatgcttcgtcagcagggcacatcatccccacaggtctgcctgacggaaaaaagactccgtcagacagacaaaagcagcccttcgcttaccgcttcggactgctttttttcacatctctactacttattgaaatcttctattccctttccgatgtggtggggatgatataggcaggtagtaccgctggcttgccaactcgtcaaaaataaaatcagggtcccctccggtaccctgattttatttccgcctcattgtctgcgccatcggtgctacctgctcatgggctacgcccccgagacccccagacagaaagacacaccatctacaaaggggatggtgtgtctttctgtctttactgcaattgtacccgggaatgtagccgatgtttacttggataattgaattgattatcatcggctatatccttcttgcttctaccctcattacaaaacaatagaattctttctgtaatatcagtctgttagacttggggggtgacttggggggacttgggtgttacccaccccaagtcattatccctctttatgattcgttttcttctgtttctatatccagcctctgtaaaatatcatatatcacaccagaatcgtttaataagcttatagcaaaacatttctttcctgcatcttttaatgatgcaccaatgtgatacgcttttttgtcatcaatgattaaaaacctgtcatgaaatacacctgtgtagttcacttcaagtttgggatactgttgattgaaagtttcaatatctttttctgacaatctggtttttctaactgtgtaaatcgttaccgatacattctctttcttcttggacagaatatttaaagttcccacatcgacataattatcgaccaatacaagacttttcgttgcactagctaccagatctatcagtaagctaaacgcatcatatatctgtccatcaaaaaagattttctgctgtgattcttcgtggtcagaaatatatgcaaatactttatcaaatttctcatttgtttcattttgataagttatctgtctttcttctattgcattcatgcgatcatacaaaagtgacgtgtttgccatatatttacgcatttcaacaaatgtttccattatcctgatactgacttgtattgcaatatcactcctcagcaccgcagaaagcattgcaataccttgttctgtaaaaacatatggcagatatcttcttccacctctcccttcttttgaggtcacaaattgtgacctcaaagagtcgtactcttccttttttagttgaaacctgaaattctcaggaaatctttcaatatttctttttacagcctgattaaaagtttttgtttcaacttgatacaaaattgccaagtcactatcgagcattacctgttttcctctaataacatatataagactctgaatatgactcacttccataaccctatcctttacatctgaatttacgtcaatcaattcactattatcttttgccatcgaatcctccaatccatttttgaagtcgcaaattgcgacttcaagtctacaatctgtgtactcattctgaggtcacaaactgtgacctcaaacagtatcatcgtgttccttcttgttttgcttcccaaattgctgttcatacataatctgatactttttcaaccgtggaatatactcaggaggctttcttcgacccgcttcccactcttccaccgttcgaagtggtatctgaacctttatctcacacactcattgtgtggttaattatatcatgccacttcttcttttatcaattgaaaatcaacacgaatccataatttacacaccaaacgagtaatccagaaactcattctcttctggctccgacagttcttgctttacaacttctatcggttgttcactgccctgtatcggttccgtaactagctttacccccaccgatgcctcagctcccggatttccctgctgatacggataaggcattatcccaccagcctgcagtcccgcctgaaaaaatgcctgctgttgcatctgatacatggctgcaagtgccggaagatttgaaagaagcttctgctccacagtctgcaccagtctgtctgcaaaggcatcttccttttcccgactctccagatatggatcgtttttcttggcaagatgcctttcataataatcattaatcgcagccaccacaaaagcattctgcgacttaaagtcctgttccacttcagcggaatgcaggcgttcccacgcctgcacgcctccctcatccgtcatattgaaacggatgttgtgattcctgtagtgctttgtcatattgcctcacctaccttctgcctgctctttcctgatgtcttaaaagcatatagcagtaatactcatagccctttgcattagcacggatatcattgttaaagactgtattttcaggattgtactcgccgaaattttcaaccagccttgctccgccacccatgaagtaaaccttcatcagcttctcattatattcatggtcacgaagcttctgaaaaatctcctccacatagtcacaaatagccttttccacgagtgatgcatggggatccggcagttcaatctttccgctacggagaatattatcaattacatcatccataagattgtctcccgttttgtcctgcaccatattgtgaatcttctgaaagcactggaacacaccaagcttctcggtccatgccttgctttccattggtctaccgttattcagatacatcagattcatggtaccgtttccaatatctgcaagaagcgttacacctgcaaaatccttcagattctctgtcactgccgagtaacactgcggcataaccgtacatcctgcaaactcaatacaataaagtctgtccttatagccgacctccacactgctgtttctaagcatatatctcttaaagtcctccctctgtgcctgcacccatttcagaggaagcccaactgcaagatgaatccttgccctgtttacagagtctgtcattcctcttgcttccagttcctttacaatagccgcaagtgtcagcatataattgtcgtcatcagtctgcttatctgccacaaaaccctttcttccctctccaatgacataatatccaccatcgtactcgatataatctctgcttaacacaggtgcgctgtcatactttgcaattgctgtcttaaagcatcttctggctgttttcatatttccgtagccattatccacaccgataatcagtgctccgttcatactgtattctctaatcttctctgtcatataatcctctctttctccggcatctgtgccggtaaccaaaataaaaaagtccatgcatctgtatctctacaaacacatggacgaatcaactgccactcttgatatttagcgtatccttcctacgaattactacacactttactacacacttttttcatcaaattacaccattttatgataagttacgatagtttcctctcaaattaaaaatgccctcaaagcctgtaaaatcaagcatttgagggcattcacaagggttaagataaaggagcaggtaggaaatctataaattcgctcttgtagctttccattgtatgttaatcctcctgtgtgtttttctttaaattatctttgtcaattttaccacattggggcgtgcttttcaacgtggaaattggtgggggattagatatactcacttgtgtttacgatcacgccgtcatataccgactgctttttgataaactccgcagccttgtccacatctctgccgtttttgttccattcctttgtgaactcaactttgtcggctgcaagctccttctcctgcttttggctgatgagcagaagtacgagtattccggcatggcttaggtgcttgactacatttacgaagtcctcaccctcctttggtgcgtagagataagtatggcgtccgtctatatttaaggctttctcgacatcctccacaaagccgcggtttacaccatccactccgtctacgaatacggcggtgattgccttctggcccttgattgcagctcttacgtttctgtctactctgccctcgtagagaccgctttcctctgtgtgtacctcttcaaccacaccacaggcagatgtcatatcagtcacacggtcgattaagatgaactcaccgagtgtcttgtgatttttgaacttatcgcagactatcttgtccgagaatgcaatctttacaactgctatctcgttctttttaagcttgtcggcaggcttttcctcacctgtgtttacgtcgatggtatgctctatctctgttacgatgcccggtattgactttgtaccaagcttgaagaagaaattctttcccttaaagagctcatcgtcatccatccagagtattgtagctgtgatagatgaagcaacctttgctcctgaaccgattgtgagcacgcagcctcttgatacgtccacctctctgtcgagctggattgtaaccggctggcctgtaaatgcgctatcgcttagcttatcacccacatggatgctctttacatgggccgtctcattgcttggcagtgtggtgatttcatcgcccacctttacctctccggcctctatccggccctggaatccacggaaggtatggtcaggacggcagactctctgtacaggcatgtaaaagccctcttcctcgttctcatcctttatgtcaacatcctcaaggtatgataaaagagcaggtcccttgtaccatgggatattctcagactttgttgtgacattgtcaccctctgttgcagaaacaggaatgattactacattttttagttcaagctcctttgtaagctcaataatctgctttgtgatttcatcgaaacgcttctcgtcgtagcctacaagatccatcttgtttacagcaaatacaaagtagttgattcccatgagtgcgcagattcttgcatgtcttcttgtctgaaccaatacgccctgctttgcatctattagaattaccgcaaggtctgcaaaggatgcacctacagtcatgtttcttgtgtactcctcatggcccggtgtatctgccacgataaagcttctcttatctgttgtgaagtaacgataagccacatcgattgtgattccctgctctctctctgccatcagtccgtcgaggaggagtgagtagtcgatggcgccgccacggcttccgaccttactgtcaagctccaatgccttttcctgatctgcatagagcagctttgaatcgtataatatatgtccgatcagagttgattttccgtcgtccacgcttccgcatgtaataaatttaagtaatccgctcattttagaaatatccctccctctttcttctttccatgctgcctgccgcctcgttgtctatgacacgggtggttctctctgaggaaacagcactgagtgtctcatcaataatctcatcaagtgtatccgctgtcgactccacaccccctgtcagtggatagcagccgagagttctgaaacgtacactcttcatctggattttctctcccggacgaagcttcattctgtcgtcatctaccatgatgatgttgccgtctctgtatacaacaggtctttcctttgcaaagtaaagcgaaggaatctcaatattctctctctttatatactgccagatatccttctctgtccagtttgacagtgggaaaacacgtacctcctggccctttttgattctggagttgtatagcttccacatctccgggcgctggttctttggatcccatgcgtggttttcatttctgaaggagaagattctctccttggctcttgatttctcctcgtctcttcggccgccgccaaacgctgccgtaaagccgtatttgtcgagcgcctgcttgagcgcctgtgtcttcatgatatctgtgtatgctgagccgtggtcaaatggattgatgccctgctttacgccatcctgatttatatattcaagcatctcaatgcctttttccttagcgatacgatctctgaattctatcatctcacggaatttccaggttgtatttacatgtaaaaacggaaatggcggcttctccggataaaatgccttcattgcaagatgaagcattaccgagctgtcctttccaattgagtacaacataaccggcttctcgcactctgcggctacttcacgtattatgtatattgcctctgcttcgagttcgtcaagatgtgataattcacccatgtctgttaccatccttttctttaatatttattggattccttcttgttgataagaatctcttccttgcttccgtcgcgctttttgatatcccaggtcagcgtgtccggcgtgctttttactgtcatgagacttcccatgcctcctatgtctgctccaagataaagagcaatagcgccaaaatgacattccttgatgcatgaggcacagccccaacagtccttaggatatttgataaaggcttttttctctgagtcctgatatatcaggcttccggggcatacacttgtacacatgccacagcccttacactttgctttatcaatcattatgctcataacgcgcctcccttccgacaagctctctgtaaatcatatgaagctgcccgttttcgtatctggaattgacgtatttcatccagtcatcactcttgcccggataatccagattctcggcaaagctgtgccatctggtctcctttctcgcaccaagatgtgctatgaccgaaagacataccgtaagcctctccttaagctcatatatgaacataagctcatgcatatccgatgcatataaatcaccggtcagctctatcagatgatttatcttttcctttgccagggcaagctgcttgccgttgaactgataatgtgtggaaatcccgcctgcgtagttgtccatgaccttctgcatggcttcctcgatagcctctgttgtaaacatctgaggcctttcagtgaggaaatggtcgtactcgactgcttttgcgtcaagagcctttttctcatcaaatgccgatgtgtcaaaacttccatctgaggtatctgcatcaagctttgaaaccatatctatcgcagcgatttcaccctctaccatggctcctgtaacgtatttctgtggacatcctcctgccacatctcctgcggcatagagtccgtggattatggtttcacgctcggtatttacccagtagccgctcgctgtgtgcccacctacgatatacggctcggtgccctctatctccacattctgctcacttggattcttacctgcctccacccacttgagtgtctggcttggtgccatgttgagatatgcctttcttaatgactcatcctgctgtggagagatgccttctgtccttaagtagcaagggcctcttccctcgagattttccatgaccgttccgtatacacgctctgatgtggtgaggccgtattttgtctcgtaaacctctccaagagaattgacctgctttgccccgactccctgtgcaattgttcctgtcggtgcgattgtgtccttgcatctgagtgcgataaatctcatctcaaaggtggtcatctctgctccgcttcttatacccatcgcatatccggcgcctgtattaaacggtggataccacatcttgtgccttgaaaagcccggattgtttggtctgtataaaccggccgctccgcctgtggcacagagcacctttttagccctgatttcataggctgtagcattctcgattgaaaatccgtatgccccctctatggtgttgttctcaactatatagtccgtgatattgattctgtttatcactgtacagtccgtaagctttgatacagcttctgccaaaagcggcttcatgttctcgccgtttatcttgatatttcggtttcctcttgctacatactcaccgttttcatcctttaatatgacaagtccaagcttttccatcttgtccgtcacacggtttaagccctctgacatagtcatgagtaagtcttcccttactatgccgtcagcatccttttttgcgtagtctacatagtcctcaggctttctgccctttactatgtatgcatttatcgcattgacacctgctgccaggcatccgcttcgctttatgttcgctttctctgcaattataatcgaataatccgatttctcacggatagtgagcgctgcataacagcccgccgtgccacctcctattatgaggatgtccgtgtgtaggatttttttgttttctatcttcatttatctccctctgcttcctctttcaatcacaagctttagactattcctatatctaaatgtagaatacatcctgctcctgcatctcgctgttttccatcaggtatgttttctcttcatcaaatatatacagcctgtaaatcagcacatgtactttctcgccgactgctatcaggtccttttcaagtgaacgctcgccgaccacctcgatgccgtttatgctgactgtaatatccatcctgtttcctctgaataccacatctgtaacgatgccctcctctgccgctgactgatagcggtctaagtttccactctttgatatcttgataaactcaggtctgattaccgccttgtcggcattttctatcctgtcaaagccctttagcctgtcatagttttcaacgactgtggtgtgtcctataaactgcgccacaaaaggtgtatcaggcgacttgtaaatctcaagaggtgtacccatctgctctatcgtgccgtgatttgtgataatgatttcatctgccacctcaacagcctcatcctggtcatgtgtgacgaaaatacttgtgattccaagcttttcgaccagctccttaagccatgtacgaagctcacctcgcacctttgcatctatcgcggcaaatggctcatccagtaagagcacctgtggattcggcgccagcgcccttgcaaatgccactctctgacgctgtcctccggaaagctgattcggatatctcttttcaagccccgataaacctgtcatctcaagaagctttgtaacacgctcctttatgagctttttcggcatcttctgaagctccagcccaaatgccacattgtcgtatattgtcatgtatcgaaacagcgcatagttctgaaacacaaagcctatgcctctcttcgaggccggaatatcattcactcgctttccatctatatatatgtcacctgaatttggcgtctcaagccctgctatcatacgaagaagtgttgtcttgccactgccggacggaccaagcagcgccacaagctttcccttttccactccaaagctcacattatcggatgccaggaagtctccgtattttttgtatatatttttcatctcaacgtacatatacgttatctccttcctgcttttcccttgcagcagattttattagtgtaaatcatattttccaagcatatctcagtgtaatttcttaaatttatgctcaactatatttcttgcaaaaagaatgattaatgcaataattaacagtatcgacgatacagcaaatgccgatgttatcgagctgtctgtgcccgacatatacaaggcatcaatctcaagcggcagtgtaaatgtctcgcctcttgtcttcgagagcgcatttaccgcaccgaactcgccgagagctctcgccgtacaaagtatgattccataaatcaggctccacttcatctgcggaagtgttattttccgaaatatcgtaaagccggatgctcccatcagcgctgcggcttcttcctcatcctttccatctgcattgagcaccggtataatttcccttgacacatacggaaacgtgacaaatatcgtggcaagcacaactcccggtattgcaaaggtaattctcacattcgtgccgaatatctcattgaaccatctgataaccggataaaaccacccaagccgtccgaaggtcataagatacgcaagtcctacgatgaccggagaaatagaaaacggtatatcaataagtgtagcaagcacctgttttcctttaaacgaaaacctggtcaacagccacgctgtccatattccaaagaatgtgttgataactaccgcaaaaactgttgctatcaaagtcaccctaagtgctgacagcacgtagcttgtggagatagctttcatataaaatccaagcccctcctttaaggcacttgccatcacagaaaaaagcggaactacaagcatgacaaatatgaagagcaccgtgacggtgacgagtattatctttgtgatcttttttcttctttcaagctttacctgttcggtcatcgcattgtgctcctttcctgtttgtatgcatcgcatttgatttatatgcagccttctacaacaaattagtgcgctgtgactgtttaacctgcactatgtttacaaatagcagcagtaaaaatgatatgacaagcatcacgagtgctatggcagttgcgctagcataatctatatagctaagcttctgcatgatgacgtaggataccacctgcgtcctgtgccttgcactgttgcctgatatgtagatgacgcttccgtactctcctattcctctggcaaaggcaagaccaaagcctgttaagagtgccgggcgaagctccggaagtattaccttaaaaaatgtcttagagggtgtggcgccaagcatataagcggcctcctcatatgtattatccatcttttcaagcaccggctgtacagctcttattacgaagggaatgcctacaaaaacaagtgccacaactattcctgcctgtgtgtaagctacatctattccaagcttgccaaggcccttaccaaaaaagcctgtgcctgagtacagctttgagagcgtgatgcccgcaaccgctgtcggcagtgcaaacggaagctctataagtccgtcaagcagccatttcccgggaaaatcgtacttcacaagcgtccatgccacgatgagtccaaataccacatttacgattgctgcgataaatgatgaggtgatgcttgtgataaaggcattcctcacattctccttcatgataagtgccacgaaatcgcccggcgatatctttagcgaatacacaagcactgatgctaacggaatgagaacgatgactgaaagcatcgtgaccactattccaagcgaaagatggtagcccggtatgactctggtctttatgttctttgatttagttttctcttttgctgttttatcagttgccgtatatttcatcgaacattgctccatcatcgaaatatgtcttgtaggcttcattccatccgccgtaatcctctatgctccaaagcctgatatttaaatcaaacttgtcggaaaaccggtttaatatatcctgattggctggtctgtagccgttttcgccaatcagctgctgtgcctcatcactatagagatactgtagatattctttacttacctcttgtgttccgttgctctttgcattgtcatccacaatagcaacagagggctgtgctaatatgctgacggacggattcactatctcatacttgcccggatatgaatccatggtcgtaagtgcctcgttttcccacgctatgagcacatctccctgaccgttttccacaaatgtggttgttgagcctctcgcacccgaatccataattgtgacattttcatacagcttcttcataaacgatttctgttccttcagactgtcataatttgtcttcgcataacttagcgctgcaagaaaattccagcaggctccgccactactctttggatcaggcgtaatcacatccacattctttttcaccaggtcatcccagtcacttatatgctttggattgccctttcttacaagtaaaacgattgttgatgtgtatggtgccgagctgtcagaaaactcatcaatccagcccttatcaattaagccggtattttgtatcaggtctatgtcatgctcaagtgccagtgtgacaacatctgcattacagccctccacaaccgagcgcgcctgtgctcccgagccgccatgtgactgaatcacatttatctttttgccatgctcgttctcatagtaagactcgaatattttgttgtatttctcgtaaaactctcgtgtcggatcatacgacacattggttatggtgactgtgccgtcatccttcctgcctgagcagcctgtcagaagaagtgacagaatcatcactgcaggcagcagggctgccgtataaatatgtatgtttctcatgtatgtttctcatttttcatgttacagtttccggcaaagcaagcttatgccgtcagtttatatgccattaatttactgtaaaaagcggtgtggacaggtatctttctcctgtatccggaagcagcaccacgatattctttcccttgttttcaggtcttttcgcaagctctgttgccgcatatattgctgctcctgaggatatgccaacgagaagtccgtcgctctttgcaacctctcttgccttgtcaaaagcggcctcattctccaccggaatcacctcatccactatatccatgcgcatgacctttggaataaagcctgcaccgattccctgtatcttgtgtggccccggtcttccgcctgagagtaccggtgagctctttggttcaacagctactatccttacatcaggattatggtctcttaatccaagcccggtgcctgtacaggtgccgcctgttccgacagatgatacaaagatatctacctttccatctgtatcctcccagatttcctgggcggttgtagctctgtgtatatcaggattagcctgattctcaaactgctgtggaataaaggcattgccataatgctctttaagtctctgcgcctcatcgattgcacccttcatgccctcacgccccggtgtgagctttatctctgcgccaagcgctgtgacgatttttcttctctcaacactcatggtatcaggcatgataagtatcaggtgtagtccctttgaggctgccacaaatgcaagtccgattccggtattgccacttgtcggctctatgattattgtgtcctgatttatctttccatcctttatgccctgttctatcatagctgccgccaccctgtcctttacacttccgagtggattgaaatactctaactttgctatgatttttgcttcaagcccaagggctttttcataattggtcagctccagaagcggagtgtgacctatcagctcggtgagctgctttgcaatttttgccattgatattacctcttttttgttaatgtttgttttgagtttgttatgagttagtgtttagtttgttggccgggatttcctaccattcaaatatgatttctaagttattgatatgttaccactaattgatatttttgtaaatgtaattagggttattaatatttgttagcgggctataaattttattgatagcagatagacgactgcgcagcatgggaagacacgccgatggtgcacagtctcatgtttcctcgcctagtatgagtaaatactgccacagacagagtttataaggcacggaaaatcaaacgcgctttttacctttatagcattctctatgctgtgttgcttgaacgagtattttccgtgccaccttttgtctgtggcgcatataactcatacacggctcgtcaaaaatcgaccgtgcaccatcggcgtgtcttcccattctgcgcagtcgtccgtctggtatcgaacttaccataaaaaaagagttctatcattcgcagacacaaagtctgtgaaaaatagaactctttttgatcttcctttagctacttacgcttgttcatttgctttatcggttctcgtgatatacttgattccaacaaaggttccaatcaggataagcgctcctatgataaaaggtactacaggatttctgacaaagcctgctatgatgtaggtcagacatgatatggcagccacaagcacaacgtacggaagctgtgtggacacatggttcatatggttgcactgggctccggcagatgccatgatggtggtatcggatatcggtgagcagtggtctccgcatactgcacctgccatgcacgctgagattgagatgatcatcatcgtatggtttgtgcctgagaagatgtttactactatcggtatgagtataccgaaggtgccccatgaggttcctgttgcaaaagcaaggaaggctcccaccaggaatatgattgccgggaacagtccaaggagcggtcacgatacacctcccaccaagcctgcgacgaatttattggcaccaaggctttctgtcatgatctttagtgtccatgcaaaggtcagtataagtattgcaggtaccatcgccttaaagccctcagggattgaattacaacaatccgtaaagcttagcacccttctgattgagtaaaagcatatggtgattatcagtgcaaagaagcttccaagcatgagaccggttgacgcattgctgcctgcaaacgcatcgacaaagcctgttccgtcaaaaaagcctcctgtgtatatcattcctatgatgcagcttattatgagcacaagaataggaaatacaaggtctataaccttccccttgccctttataacatcctgctttgcctccgcatacggcctgtctcctgtggtaaacaaatcaccctttttggcattggcttcatgctttgccatcggaccgaaatctacctgtaaaacaacaagtgtcaccatagcgataatagtaaagagtgcataataattgtatggaatggcctttatgaaaatagaaaaaccatcctctccctttacaaagccggtaaccgcggctgcccacgatgatataggtgcaatgatgcatacaggcgctgctgtggcatctatcagatatgcaagctttgctcttgaaacctgatgcttgtcggtgacagggcgcatcacacttcctactgtcagacagttgaagtaatcatctataaatatgagtactccaagtattatagctgaaagctgggcaccaatccttgtctttatgtgctcactcgcccactctccaaaggccgccgagccgcctgccttgttcatcatgctcaccataacaccgagcacgactaagaatatcagtattcccacattgtccgaatccgatagcactccaacaagtccgtcctcgaatatgtgaagcactgatctctcagccgaaaaacccggctgaaatgcatttccataaaacagtccgccaatcactattccaacgaataatgagctgtagacctcttttgtgataagtgccagaactatagccacaacaggtggaacaagtgcccagactgtggcatacatagaaggcacgtattctgctgccagaatcattattttatcctccgtctatcctttatgctctatctgtcaaccgcgccgacaagctctgaaatatcctttactccatacctgtccatatactctgcgatgccatccactatctgctctgtggtctttggatttacaaagtttgctgtgccgactgaaacagccgtagctccggcaagtatcatctctatagcatcggcagcatttgtgataccgcccattccgataatcggaatattgactgcatgtgctgtctcgtaaaccatgcgcactgcaaccggatgaaccgccggaccgctcatgccgcctgtcttgtttgctaacacaaagcttcttctgtttatatcaatcttcatgcctgtaattgtattgatgagcgaaaccgcatcagctccaccggcctctgccgcccttgctatatctgcaatacttgtgacatttggagaaagcttcatgataacaggctgctttgcatatttttttatctcgcttgtgattgtctcaacaccctttggatctgttccgaaggcaattccgccctccttaacattagggcatgagatatttatttccatcatatcaataggctcatccgcaagacgctttaccacatcaagatactcgtcaagcgaatgaccgcatacatttaccacaatccttgtatcaaactgctttaaaaaaggaatatccctcttgcagaaaagctcgatgccgggattttgaagtccgactgcattgagcatgccgccgtacacctctgctactctaggtgtaggattaccctcccacggcttattcgcaacaccctttgtagtgactgcaccaagtctgtttaaatcaacaaactcgctgtactctgcaccggagccgaatgtgccggatgcaactgtaacaggatttttccactcaacaccggccacatttactgacatattactcattacagctccacctccttcgcgtcaaaaacaggtccctctttgcatatacgcttgttttttacattgctgtgagcatccttgtcctttgtcttgcatacgcaggcaagacatgcaccgattccacatgccatgcgctcctccattgatacaaagcagtccatatcatgctctgcagcgtaagctttaagtgcgcgcagcataggcataggtccacatgcataaatcacgtctgcctcaagagcattctcctttatcgcatcgatgacattgccctttgtgccgacactgccgtcctctgtggcaacaaaggaagctgcctgctccttaaactcatcaagcaggaaggtattctcatcgcggtagcccatgacgatgttcatatcgcatactgctgttttactttctgcaccttccattgctgtctgtccctgattgctttcttcacccgatgtctgcacaatgcctgtatttatatccttggcaagctgcagcataggcggcactccgattcctccgccgataagaaatgccttctttcccggctgtactgtaaagccgtttccaagaggtcctaaaatccttaccttatcgcccctgacaagctttgaaaactcctctgttccagtgccttcacctgtcacacggtacacgaggcggatggtgtcatcatctctgtttatgccgcaaaggcttatcggacgtggaagcagcttactcttatcgtttgagtaaaccgatacaaactgtcctgcccttgccgcctttgcaattttgtctgtcttaagtgtgaggtcatagatgccattgccgagtgagctctggtcaactacaactgcaatctcctcaaatttctctgccattttatctccctggtttcgtttgttaatatatttaagctttctgaataacttattaacgatttgcaagtgctcctgagatatcctcaatcatatcctcaactgccttgcgtgatgcatctgcaaaattctctgctgtgatgcccatatccttgtacttatcctgcttgtatgcgcagatgattccacgtgatgaattgacgattgcgccaagtccgtcctcattgaagaaatgaacaaggtctgcacccttgccaccctgtgcaccgtagcccggtacgaggatgaagctctttggcattaccttacgaagaatcttaccctgctcagggtatgtggcgccgacaaccgcacctacatagctgtatgaatcacccatgcagtcagctccccactctgcaaccttctcgcctacccactcatataatgggcgaccgtcaatcatacggtcctggaactcgccgcttgatggattagatgtcttaacaagaatgaagatacccttcttctcctccttgcatacatctacgaatggcttgatgccgtctgttccaaggtatggattgacagtggcaaaatcctcatcaaaggtagaatagctcttgctgccgatctgtacccttccgagatgtcctgtagcgtatgccgccgacgttgagccgatatctccacgctttacatctccgataaccacgagatccttctcatgacagtaatccactgtcttctggaatgccttaaggccatccactccaaactgctcatacatggcaatctgtggctttacagccggaatcaggtcatatgtggcatccacaatagccttgttgtactgccagatagcctccgctgcaccggccggtgtctctccaagctcatcaaatgccttctttgtgatgtgctcaggcacatatgaaagcatcgggtcgagacctactacgataggtgcgtttgttttcttgattttgtctactaatttgttgatcattctttcgtcctctttatgcgtattttattatacagacagatattgtgattattaaatatctgcatacagttataaatattttatagcataaactaaattcttgcaaccaaaaatataatagcagggagtatagcattaattactgctatactccctgctgatttcatctttacactcccacaacctcatcaatcatcctaagctcttcctcagagaagccagtgccctccataacctttaagttttcaagaatctgctgtggctttgaggcgccgacaagcacacttgtcacgtcatcatcctttaccacccacttgagtgccatctgtgcaagtgtctcaccacgttttgtggctatatcgtttagcttcttaatctgctcgatgtgtggagtgagcttttcctgatttaaaaagcggccgtctgtctttatacggctatcctccggaataccgtttatgtaacggtctgtgagcatgccctgtgcgagcgggctgaaggagatgatgcccttttgacactctcttgctgcctgcttcaagccgttttgctctattgtacggttgaagatattgtatgaattctggttgatgataaacggacatttcaaatcagtaagaatctcgcaggctctcttcatggtctcgccgtcataatttgacagtccgacatagagtgcttttccgcttcttactatctggtcgagtgctcccattgtctcctcaagcggtgtctttgggtccattctgtgatgatagaagatatccacatagtcgagtcccattctcttaaggctctgatcaaggcttgcaatcagatacttgcggctgccccagttgccgtatggtcccttccacatatcatagcctgccttcgagctgatgatgagctcatcgcggtatgctgacagatgttccttcaggataagtccgaagtgcttctctgcgctgccgtattcagggccatagttgtttgccaggtcaaagtgggtgatgccgtggtcaaaggctgtgaagcacatctgcttcatgttatcatacgatgaaaaatcaccgaaattgtgccataagccaagtgatacaacaggaagcttcagtccgctcctgccgcatctgttatatttcattgtgtcatatctcttttcgtctgctgtatacatatttacctcccacataaatacatgatatgagggtcaaaaggtattttgaccctcatttatgataaataattatactacagcagacttgatttttctattgtttactaacgaaacttttctatattcctaatgctgtgtaaatgttcagaaatcaaataaaatcctccgtcagctttccgtgcttctcataatttgtcacacgcgctatcttgttttcatcatccacaaacactaccttcggatgatgctcctttgcttcctcaggtgtcatctgtgcatagcacatgagtatcacatggtcaccgactgcaacctgtctggctgctgcgccgtttaagcatatcatgcctgagcccggctctcctgcgatggtgtaggtctcgaatctgtttccgttttccacatcgacaatctgaaccatctcatactctaagatgcctgctgcctcaagcagctttgtatctacagtgatgcttcccacgtagtttaagtcagcctgcttgaccactgctctgtgtattttgcctttaagcattgtataattcattttttatacctctttttcatatatcaatttactttttgactgtcatgctgaaatgattttctaaatatcacttttatccagcaacaaattattgttactattctactacgcgataaaattatcaatcagccttgtctttccgatatagacagcgatagccacgagtgttgttcccttaatctcgtcaacaggtgtgattgtgtcaaaatcgaccacatccacataatcaattttcgcaagcggctccttgtttatctctgctgtaattgcatcctttaccacttttgcgctcttctcgcctgcgtctacgagctgctttccgatttttaagcttctgctcagtacaagcgctgcctgtctttcatctgcgctcagatatgtgtttcttgagctctttgccagtccatcctcctcacggatgattgggcagccgatgatttctgtgtcaacatttaaatcctttaccatacgctttatgaccgcaagctgctgtgcatccttctgtccaaagtatgcgcggtcaggtgtcacaatgtgaaacagcttcagtacaactgtctgcacacctctgaaatgaatcggtcttgtttttccacaaagctcagttgtgagaccattcatatccacatatgagcagaagccgtctgcatacatctcctcagcctccggatggaaaataacgtcaactcccgcatcctcacaaagctttgcatctctgtttaaatcgcgtggatagctgtctaaatcctctgtaggtccaaactgcattggatttacaaaaatgctcactacaaccttgtcgttctcacgtcttgccgcatcgattaagctcttgtgtccctcgtggaggtagcccattgtaggtacgaagcctacacttttgccctccttcttccattcctttactgcttctcttacctgtttgatttgtccatatattaacattttatgtctccttattcttttattcttcgtaacaattcttcgtaactaatacagtttgtcaattattgtctcatccatcttaaaggtatgctcctcacctgggaaacttccctcctcaacagcctttttgtaggctgtgaatgcctcattcatctcttttccgacctgtgcaaactgctttacaaatttcggcttcatgtttgcatacatggcaagcatatcctgatatacgagcacctggccgtcgcagtctgctcccgctccgataccgattgtaggtatgtttatgctctctgtgatttttttggcaagtgcctttggcacgcactcgagcaccactgcaaatgctcctgcttcctcgactgcgcgtgcctcgtcaaggagcttctgtgctgcttcttcacccttgccctgcaccttaaagccgccaaatgcgtttactgactgtggtgtaagccctaaatgtgcacataccggaattgacgcatccacaatagcctttatctgtggacatacctccttgccaccctcaagcttgacagcctgcgcatgaccttccttcacgagtcgacctgcattgaccacagcatcatatactgatgtctgatatgacataaaaggcatatctgtgatgagcagtgtgtccttgattccccttgaaacagctgcactgtgatgaatcatatcctccatagtcactgaaagtgtatcctcatagccaagcaccaccatgccgagtgagtctcccactaaaatcgcattgattccggcctcatctatcagcttagcagtcgaataatcatacgctgttagcatcgtgagcttctcgcccttttcctttgcctgtttaaaagttactactgtatttttcattgtccaatccctctgtctttctgcaacaatccgttttttataaattcacggtattgtcagcctcttagcaattccatcatctgagtgtaatccttatcaggattctttttttcagcaatttttgccagttttgtaccaagcattttgtacaaactgacatcatcgctatcgtcattttgcatacatgcaatatgctttttcactgtttcaatatcgtttctctcgattggcccggtcagcgcgccgtcacagcctgcttcgagtacattttcgatattgcgcatcacaagctgacctgtggctcttaccgcctcatcccttgtaaagccacagtcctccaaaagagtgtagcccatgtcaaggacagcaatcacctgattactcagaatactcgctgctgcatggtattttgcctttttagcgccatcaatgcggcatacctcatttccaatagaactaaacagcccggatattgcttcaaccgcagcatcctgtccttccactgtgaaaaatgctttatttaattgctcatatgatgaaaatttgttactgaacggtaacattggatgaattgaacagcatgatacgctcatgctctcccttccggaaaatgaatcggatgataatgcgccactgcaatgacatataatctgattccttagagacagttcttttaattgttcccaaaccggtataataaatgaatccggtgtggtgataaatataatctgtgattgatccgccagttgctttagcgaatcaaagctctctgtccttgtaaactccgcagcctccttagctgccacagaatccacgtcataatagcctgcaagctctatgtcctttgtccttaggtatttacctatagaacagcccactctgcctgcgccgattatgcctattttcatgctaccaccttctttccaagccggtcagaccattcctatatcgcagccgatataatctccgccatgtgccgtatggctgcggtcgatttatcctgtgcgcgcctgtcactttgctgcctgcttcatattctgatacagcaatgcgctttggccttattgtgtctgccggatatgctctgtcataaggtgacaacacatcctccatgatacagtttccttcgaataccgttcgaagaaaactataccacattgactattatttaacaatccctattttattttgcctcagtcattaccaattgacctgctgttcttcactgcacagtattcgaaatgatgtgttagtctgatttgtttctgtcaaatctgagtttaatctattctgtggcaggtaagatattttaaaatcaccataatccccggcaaatttattcaatatctcatcacttgtcagccatatattttcatcatatattttattagatttaagataagcttccagataatcagcaaagcctctatagctcttcggactaatgccggtgccaaaagtggtatatgtctttggacctgtctgttctaatactttaatgtcaccatttctatcatagaattccctgcctgtaacattgccaccgctcacattctttgaacaatacttatatccgtatttgttgtaataatctactttatatactgtattattcctgtcaatccactcgactctgctgaccattcttttctctataggattcttaaaatagatgtttgcctttttggttttattatcatatatagcaccatttagcccatctgcacgaacactccaatattgagggatatctatgaatgcataatacctgtctttttccttaagcacatcgtttttttcagatatgccacaaaacaaatctatggcttctattgttttgcattctttaaatcccacattttctgccagctctattatatttttctcaaacctatctaattcatcaataataaaaatcatagggcaaacccaccctctgtataatgtaaaaacctctgtgttataaaataattctcaccattttctaatccggcatttgccagtatttccagtccattaccatcgtccgcatccgctgaaactatatagaccgtattatcatcacagataatctcattcttttttaaatgctcatgccattcacagctatcgaaatttctgtttaatagcctcattgcattccttatagagctgttctctccaccatagaatacgagtcgtacattgttttgagtagctttttttagcagcttctccagcatacctgttctatccacaattctgcccatagaattacacaataagccatcctccatctgctctccccatggggttctcagtattgtgaaatagtatgctctgtcaatttcattatttgtatgcaacatcaacagggttgcagcataatgatatatttttttctctgctttctcattattttttcttgcctcatcaataaaataattccatttttcatctatcaataaggtttctccgctgaatatggaatttaaagcatcctggtcaggaagccatgtccgtggattatcgttcagataatccataacctgttgaaacaggcttccatttttcctgatattgtcaagattcatgcaaagaacacccgcattaaaatatctgtcacgagttgtctgccctgctgctacagcgtatggagttccccaatttcttattgtcgaacaatcctgagcagccgccagacaataattatctatatttaggttccataattcttcaatatctgtatttacaaacaaatcagagtccaaatatattatttttttcaaatccggcataatatcgggcaacataattctgaacattgttccaattgtaaatctattcattgaatcagccaatgagccaaaaatgtctggattaaaatgatgaaattctatgccgtttccactattatcagcaataagactcagcttatttttattcatttcattcaatgtgtcatcatgtaatatatgaaaaactattggtgcttttgtattttcaacaatagattgcatcgttgttccagcccagacactgtaatttccatccttatcatgtataccaagacagatatgtattgcattatctaaaaagcatacattatccatttttttcgcagttgctctcagctttgacattcttttcaataccgcatcatctgaaaataacctcacatatggattattaaatatatccggttcactatttaggaactcttctttgcaaatatccaattctttttttagaaaattttctattctattgtatgactcaagatattgatgccataacaaaaatgactgtatttcacagtgacactgctcaattacatttcccagttctgcttttctgctttgaatagcccgccttatatgatccataataatcttagcatccctgatctttgcattgctaatttcagaacgtataatgccccctgtattctcaaagtaatagtataatgtcgattgcaccttacaatatttctttgcaagtaacacacaaagcatggaaaaatgcgtatgctcataatatacatcttctacgaatctgagattatgttctcttatgaatttggtcgagtatagctttgcccatgctgttacattagtaaatccggtcagacctataatgagatttttcctattatcaacattatccaaatcaagcctttgaatttcaaaatcacttgcttctaatacattcggcttagcttctttaaaacacgatacgccacactgtgccacatcataatcgtcctctgtcattctatcatgcagcaccctgagcatatccggatgcacataatcatctgcatccacaaatgcgatatatttgccggtacagatatccattcccaggttacgtgcaccgccgcactttccttttttctgtattttgagagatataactttctccgggtattgtctttgtaaggattctaatatagaccatgtattgtctgttgataaatcatctatgagtatcacttcgagattttcaaagccatatgtctggctgtaaattgaatcaaagcatctcataatatatttttgtacattgtagcatggaataattactgatatcttgtccttaccattcataacattttctccataataatatataaaataatcaaattaaatcttcctctaattatgtaacagcaccttgcagcttttccaacctatttgtactattccctttacaactcacaaactatactgttcacatgatatttctctgctgctctcggatttttctttgcgaactggcggttgattctctttttgactatctcgcagtcctcacgctttaatccgatgagcatgataagaaactgcacctttccatacgaggtatatatgtcactgtagcggattgattcaccaacgcacttcttgagctgccttgaatacttgtttatctttgtctcgctctgtacctgtctgtcttcctcgtcctcgagagtacagagcatgagatacacaggtacccttgtgcgcttcataatacggatggacgcctggtatattcccctgaataccggatagctgcagaaatatccgcctctttctgtttcctcctgctcgttcatgccctcctggatgttttccagtatctcatgtgcatgattcatctgattgctgtatttctcaagtatttccaagagttttgatgatggataaataccgcactccctgagataatagtccacgacatccgtgtatagttcttccgcctcctcatagcgcctggtctctaccatcgcctccatgatgagctcctcccactcattgaacgggtcgacctttgccgcatatactccgagcttctccagccccttgaattgttttctctttcgcagtatgtacgcagcttcatttatgattttctcaaacatagtgtgatagcgtctggcctcctgtgctatccacgtctcgcccgtatatgccgccagaaattcacccttgtacagatatagtgcttttacgtacagctcaagcagtctgtcttctatttcctttgtctgctcatcgcacactgtctctgcactctctggctcctgttgcatctgtttttccagtgcgcaggcttcgttatagagattttcaaactctgctgcatcctcttctatctctatatccggtgtccagtaatatatgcctccctccaaatatatgaggttctttcccggcagtccgagctgtgcgagcttttgctttgtcttgtatacaataactcttagcgctgtgtgaggtgcatctatatcacgctcaccgattactatttcctcgagcttatcctttgctattccgcagtcagaatagtgtatcaaagcctgcatcatgcggttgaactggctttccttatgcattttttccgccacaaatggtgctccgttatagtccattctgaaattgccaaacatctgtaccttgattttatgcgtcataggcgcctctcttcccgagttttataaacatgcttatttacggatttatatatggtatgcattgatgataccttttgacccttatttcatattatacaacaattccactcctactgataacaacgacaatttacataaacagtgtcaaaactcgtacttgacaattttcgtaatatatgctaccaatgctccctgaatataaaaaagatcctgcaagaaaatctcacaggatccggcttttcagatatattaaattagaaaatagcatttacaattgttgaaccaatggctgttgcaaggaatgccagtccacacacgagtggaagcttgttgtcatcctcttctattgcccttactccaaagaatatgcttacatatcctactactcccgcaaatgtatgcagccagctgcttacattgccaaagaactggaatgggattatgtcgatgattgctgccacaaggataatcggaaggtatactgcatcatacagacatgctgctgaaagtgtctgtgcaaatgtcacctttttatccttctgcactgcgtttaatacaaccagaatgactgctgccaggatgagtactctcaccgcctctcctacgattcctgaaaagattccctcaaagaagctcgccgggtaaaatgagaatccaaaaccgcctatgctgccaattacgcttgataacagatatactacagacagcactacctctactatggcaaataagccaataaatataaagcctgatgccatatttgcattctttacaaagtctgctgcagcctgtgccggcttcttaacaagacccttgtagaatgtgatgatagatgccacattcttgtcattctgcagctgctgtcctgctgcactcacctgctgtgtgaagttatcaaacgcctgcgactgtgcgctaccctgtgactgtccattgaactgtccctgtggctgtccgttgaactgttcctgtgcgctgccctgtggctgcccattgaactgtccctgctgtgctgcattatctgcctgtgcattgttgtcctgtgtctgatttggtgtctgtggctgtgcctgctgacgacatgtgcatacctcatcatcagctaactgcctgccacaatttgtacagtatttcataactgaaacctccttaaaataattaatacacttctgataactatattagcatttcggatatttaatagcaatatttatttgatatttattccatattatattatgattatttataatcattcacattctacagaggaataaacatgccacaaacacttaatatagctgtatgcgaggacgaagctgcagagaccgtgctgctttgtgatattctcaaccacagcgatatcaaaaattcatacactgtctttacggatgcagattcttttcttgcctcatatgagtacggaaagtatgacctgctgctcatggatatatacatgaaagattccatgaccggcatcgaggcagtctctataatccgtgagacagatgccgatatcccggttgctttcatcacaacaagcactgagcatgccttggaaagctacaggctgtctgccatcggctatatcgaaaagccgttttctgcagctgagctaagtaacattcttcaccttgccatgctgaagaaatccgatgccccatctctttatgtgaagagaaacaagagtatggagagacttgccctttctgatatcatgtacatagagcagagagccaggcagattttcatacatttaaaaggaaatgaggaaatcatctgctatgagaagctttcagagctttcagagcagctgcccgctgagctgttttttctgccgcacaaaagctacgcggtaaatctgtcgtatgtcacacgcattgatacttcactcaaatgcttcgtgatggtcgatgacacaaatatccctatcaagagagagctctccggcaaagccaaaaaggctctggagagatactactttgatcacaccagagggcttaaataaggcactttcctattgatttgatatgagctagactgtcaaaagtaatacactgcaaggagcccggattatgaaaaataaaagcactatacgaaatattccctatctgacaattatactgcttacactgatttgcatactgcttctttcctcaaaaaacatgattatgagccaggcgagctatcctgaagccactatcgtaagctctgcctatgctatggtggagggctcggattcagataaagaagaaatcacatttccacatacctttaagcacctttcgccgcgcacacatgtcaccgtcacaacacatatcaacctgaacatggatgatccaatctacataaaaactgtctattcccctgcgaaggtctatctggacgatgaactcatatatgagtttggcaggaccgaaaactatccatcctatatgaaggatcccgcaaccgaggggtacctgataggcactgacggtcattcaggtgatacagagcttcgcatagagtatctgtctccagttaccagaagctctcttacggtatattctcctatctacggagcatacaaatccttatttttcactctgttaaagctgaataaatggtcattctttatagcactgcttgagcttgccgcaggtgttttgtttatatttatctcactgatgcttttatactacgataaagaggtttgcaagatgatatttcattttggattcttctcactcatgtccggcatgtggtctatcggcgagtgcaactacacaggtgtcatagtcaaaaaccctacactgctatatctgtgtgcttttatagggcttttctcgcagatgattccgcttctgtatttctgcaggcttgcagttggttttaagaatgacaagccaattatagttatcgcgaagctcctcaccgtgcttgaccttgtcgcttgtgtcttacagcttagcggtacggtggcactatctcagagcatgtacgtgttccatgtcattctgcctctcatactttgcttcctgactgcatacatcatccttgaggctgttcgcagccaaaacagcagggcaaaacggctgatggttccggtattcatactggctcttgcttcatgtgccgagataatcaattatcatttaaaatttgtggcctcattgtcattgctgtaccagattggaactctgcttttcattataatcatgggaattgtaatggggcttaatataagcgatatgctcagtataaaacgtgagaatgaaaggctcatatttgatatgaatctccttgagcattccctattggagcagaagaaatataattcgctcatcacaacaaacgaacagctttttaagaagcagcgccacgatctgcgtcaccagctggttgcaataaaaggcctcgcaaacactgaaaataaacagctgaacgaatacctggatgccctgatccacagcataccatctgcgcctgcaagctattgtgaaaacagggtagttaattccattctgtcatactatagtgccatatgcagagatgaaaatatcgctcttgagacaaagcttattgttccggaaaccgatgatgcggccttggacaatgacctgtgcctggtatttggaaatctgatagaaaatgctatagaagcctgcagacgcatggatacttctgattctttgaacgagaaatcatcgcactttatccgactgcatgcccacgtacactataagacacttattattactatggacaacagctttgacggacatgtttccatccaaaacggaaaataccgttcttctaagagggacgactatggtataggtctgtcatccatccgctctgttgccggcaaatatgatggtgacgttgcatttgaagcagctgatggtatatttcagtcatcagtataccttcaaatatataaatgacacactaaaatcattaatttatattaatgcttcatacctaaatatcattttcagagtccaactaacttattgtatataatgcgcatatatgctataataataaaagaattttgtgcattatacacatatggagttttaaattatgatagaacacacgatatacaaggaatttattgataaaattgcagaattatcagacgggatatatcctatcatcaccgacctggataatgacttatcttacgtaccggaaaagacagcagattttttcggccttgaacccggcgagcatacctgtttatttgaacagctttgcacatgtgtcaacgacattgacctgccggaatataggcgggagatccgctatcgtctaaacggcgaaaaactggatgatatattttatgtccgcatgggaaagcacaccaaagaatatatgatgggattttattctgacatttttgccggtgatgacggacaccgctaccatgtcctcgtgctcaggaatgaaaatactcttcctgatatcgacccatatacatatctttatggtcagtcaaagttcgaaagagatatcaacggctatatcatggaaaacaggtccgtagccataattgaggtggagataggtcatatagatgagttcaatatactgtatggttccaatttcagcactgcaatccagcgtgagcttgcgctcaaattcatctacatgatggatggcagcaccgctacctactatatgaataattccaaatttgtatttgtgataaaggaagctgaccgtgcctctgctgaggcattctaccggaaaattgtagacgcaataaattccatgtatttctttaagtgctttaaatttgagtttgatatatatgctgcgtgtctgattctcaaggattatgatggtgatacctccactgtcatcagcaaggtggagtacactcttgaccgcgcgaagaaacttcacagccctgatttgttatttttcaatgatatggtcaggttcaatggcaactcgcatatagatatcatgaaaatcatacatcagtcggttatcaatagctgtgatggcttttttgtggagtttcagccgattgtaaaggcttgcaatggtgaaataatgggtgctgaggcactggtgcgctggaaaaaggagccttttggcacggtaccacccggactgtttatcgactggcttgaggataccccggctatgtatgagctcggaaattatataatgagaactgcaataagcgcagcctgtgaatttgcaaagataaaacccggcttcttcatcaatgtaaatgcatcctcagagcagcttgaaaaggaaagctttgtaaaagatactctgacaattcttaaagagtatgattttccgcctacacagctgtggatagagattacagagcgttgcagagacctgcctgtatctatgataaagaaaacagtcacagcactcagagaagccggaatccacatcacaatggatgactatggcacaggaagctcttcatctcagatgatacttgagcttcctgtagagggtattaagatagatatgtgctttgtaagtgatattttcgaagaaaagaaaaaacaggcacttgtaatcggaatggttaattttgcccatgccgcagacttaaggatatgtatcgaaggcatagaaaatagtgaccttgaaagctatctcagacagtttgatgtcaccttgtttcagggctatcactactcgaagcctatctgtcaggatgagcttatgaagcttcttataaagccatagccctggatattactcaagattttccttaaatactgtcagtgcgccatttttctttaaaatcagcatgacaattgctgccactatgcttccggccactgtagagataaggaatggcactatgtatataaacatgccttccggctgaataagcatcacgtattttgcaagaggatacgctgccagacctccgagtatgcctgtgccaagcgcctctgcaatacaggtcggtatgatttttttgctgaatctgtacatcagtccacagcacatcgcgcctaccatgcttcccgggaatgccatgaggcttccaagtcctgtcaggtttctgataatactcgcacaaaatgccacaccgacaccccatgcaggtcctaaaaatactgctgcgcatatatttaccatgtgctgtacaggtgcacatttgctgccggcaacaggaaagcttattaagcttcctgctacggcaactgccacaagcactcctgccatggcaatctttctgattgaaatagttctttttttagtgttctttttactttccattactgcccaccttatagtatatcgcaactgttttgtaccttcacagttatagtatatcaatatactctcctgcaagtgccttgttcatgcttcgcactgcacagaacttaccgcacatactgcatgcctcgctgtggtcatcctcaggcagacggtcatccctgatagccttagctgtctccggatcaagcgcacatgcaaactgtgcatcccagtcgagcacacgtctggcatctgccatcttatcatctatatctctggctcccggtattccctttgcaatatcagctgcatgagccgcaatctttgacgcaataattccctgctttgtatcctccacatttggaagagcaagatgctccgcaggtgtcacgtagcaaaggaaagctgcgccgttcattgctgccactgctccaccgattgctgctgtgatgtggtcatagcccggtgcgatatctgttacaagaggtccaagtacataaaatggtgctcccatacagattgactgctgtaccttcatgtttgctgctacctgatcaagcggcacatgtcccggtccctctaccataacctgtacgttgtgatcccatgcacgctttgtgagctctccaagtcttacaagctcctctatctggcatacatctgttgcatctgccaggcatcccggtctgcaggcatctccaagcgagattgtcacatcgtgctcctcacagatttcaagtatctcatcatagtgctcgtagaaaggattttcctctcctgtcatgcacatccatgcaaatacaaggctgcctccacggcttacgatattcatcttacgcttgtgctttttaatctggtctatcgtttttcttgtgattccacagtgaagtgtaacaaagtccactccatcctctgcatggagtctgactacatcgacaaaatcctgtgctgtaagtgttgcaagatcacgctgatagtggataacactgtcataaacaggcactgttcctatcattgcaggacattcgcttgtaagcttttgtctgaatggctgtgtgttgccatggcttgaaagatccatgatagcctctgctccaagctttacagcgctcatgaccttctgcatctccacatcatagtccttgcagtctcttgacacaccgaggtttacattgatttttgtgcgaagcatgcttccaacaccctctgcatcaagtgacttatgatgcttgttagcaggaatagctacctttccgcttgcaacaagctccatcagcttgtctacatccatcttctctttctttgctaccttttcaatttcaggtgttacgatgccctttcttgcggcatccatctgtgttgtgtaattactcattgtactctcctgttctttatttcattgtgtgattaatgctccatgattcataggtccactgccgtgtcccagatcaagcatggcttttaaacatgccgtgacatatcgcttgccgttatccacagcctgctcgagcggctgtccttttgccaggccgctggctatcgctgatgaaagcgtgcagcctgtgccgtgtgagtttggattatccactcttttggtatcaaatgtgatgatttgctttccatcccacaaatagtcacacacgcatgctgtgtctgtgaaatgacctcctttgcttaaaaccggacagccgtatttatcataaatagcctttgatgcctctatgatgtcatctgtgctttcaatctgtctgcctgatatcacctcaagctcagggatatttggcgtgatgatgtcagccagtggaaaaagcttctccatcagagtgtttgctgcattttcttcaagcagcctgcttccgcttgtagcgaccatcaccgggtccaaaactatgttttttgccttatattttacaagacctgcggcaatcgcctcaattgtatctaccgatgatgtcataccgattttcaccgcatccggaaaaatatccgtaaaaacagccttcatctgtgcctcaataaaatccgccggcacattcatcaccacatcaactcccatggtgttttgtgccgtgagtgctgtgatgacactctcgccaaacacaccgtttgcaagcatggtctttaaatcggcctgcacgcctgcgccaccgcttgaatcgcttcccgcaattgtaagtgctgtatgcatatttacgctcctttctactgaatgttgtgatttctcgtaactgttcagtatcttcaaaatattgtttaattactgtagttatagcagtatgtcatactctgattacagaattttgtcgcatatttctgcgagttccctggctgcagcctttatatctgcgcttgcaaatatcgctcctaccactgcgattcctgcaatccctgtgccctttagtgtgaccgcattatctgcatttatgcctccgattgcaacaaccggtatatcgacagccgccgtgatttcacgcagaagctcctttgtcataggctttgcattgagctttgtggtagagccaaacacggctccgcttcccagatagtcagcgccatcagcttgtgctttctttgcctgctccacggtctttgccgtgactcctattatcttgtcagctccaagaagcttccttgcctctgccggattcatgtcatcctgacccagatgtactccgtcggcatctatatcaattgcaaactgcacgttatcattgatgatgagcggcaccttgtgctcatgacagattctctttatctcaagagcctcactatactcatccttaagccctgcatcagaatccgtactcagaatatccttgtcacgtatctgaatcatagtggcaccgccctctattgcaagcttcacatgctcagaaagcctcgctccgtgcagccactgcctgtctgttatagcgtagagctttaaatcagttttgttcatatataccttttacctcttatcctgttgttttccaaatataagactcatgacctgcataccaattgtctgtcatacagcgatattcacatcagttcataatcaccatcgcatatataatatactgcatcaatcagcctgtcccggtatgcagcatttcctggcttaatgaaatgacagctgttagtctctctgccgtgctctgccatatcagaggcagcaagcccgcctgcactcttcatgcagctaagtgctgccatgactgcaccgtatttatcatcgcaatcagccgcaacaaacgcacaaatgagccctgaaagcatacatccggtgcctgtcaccctcttcatcataggatggccgcctgtgatgcttcctaccctgtaattatgcgtgtatccgtcagcatccaacgcaacagcattcactacacaattatccatcacaccggtacccgtcgcatcagtactcatcgcatcagtactcatcaaactgctttcattattgtcatagcaaccagcttcatcacataattctgccacataatcggtctcacctgtaatcacacagatgcagccatatcgcagggccgccctgcacgcaagcgcctttgcatcaggctcatctgccgtatcggtcacttccacgccgccatcgcacctgccatgctccataacagccttgacctcagacaaattgcccttaatcacatccacatgcacctcgtcaagcaggctcatcacaaaatccatcctgaagcggctcacgcccacaccaaccagatcaagcacaataggaatgttctttttcactgccatcctcgcagcaatgcgcatcgcctcaaagcgctcctcagagggagtgcctatattcaaattcagcccatcgcagatacccgtgacctcatccatctcctgcggtgccatagccataatgggcctagccccacatgccagctcaatattggccacatcattgatagtaaccatatttgtgatgttgtgaatcaaaggactgcgtgacttaagcttttctataaaattattcatcagtatctctttacagctattcataatcacccacacattcaaaaagcggatataccgccaatgagtatatccgcctaaaaatcgtgcgatattatcctacgttggcattatccaaatcaggttatgggtcaagacactaccagtctactctcagccggctaaacaccagctcccctgttgtgtttttataaataaatctaggaataatgtaactattcagaaccaaaccacgcacattcgcaaaaacgcacgatgctcgtgctttcccgctgctacgcagctaattttgctcatatgtgtgggggtggctctattcgagccccttgagaacaagaaaacctgctgcttacatgcaagcatgacgcatcagctttttttgttttcagtggttctgaatagtcattatatttaatataatacgcactccccaataaatcaagcaaaatccgcaagtgtactcatattcgtacattgagagagccacaacgtaagggcgtaagccccgggcaccggggtgcacacgcactctcccgaggcgcgaatagcgaagtggcttagatactgtagaaattatgcccatgaaacgcagaaacacccctgcatggacgcaggggtgaggagaaccgcgccacggacggcgcgtttcgacggtttcgtcaagcatagaaacccatcaagcataatttcgtacagaatcttagccacgtagcgtagcgccccgggagagtgcgtgtgcccccctgttgcccggagcttacgcccgacctatcgccacaatgaagcaattcactcaatctacttagctgcaataacatccgccatatcgtagtgacctgcaccctttcccttaaggaacttggcagcctcaacagcacccttcgcaaaaacagccttagagtaagcagtatgcttaaactcaatcacctcatcctgtccacagaaaagtacctcgtgctcaccgacgatgcttcctcctctgacagcagaaataccaatttccttaggatcacgcttctctctgcgctggctgcggtcgtaaacatagtgatactcgttatccatagcctcgttgatggaatcagcaagcgcaagcgcagtacctgaaggtgcatcaagctttaaattgtgatgcttctcaactatctccatgtcaaaacctgccggtgcgaaaacctgtgcagcctttttgagaagagccataagagtgtttatgccaagtgacatgtttgcagacttgagcactgccaccttcttgtagcactcctcaacctttgcaagctgctcatcactaagacctgttgtgcataaaacaaccggaacctgcttgtccacgcaatagtccagtactccgtcaacagccttagcattggaaaaatctatgaccacatcagcgtccacatcacatttgtcgatgctcgaaaaaacaggatagtcattgtctattccatcatataaatcaataccggctacaatctcgatatccgcatcagccttacagatttctgtgatagtctgtcccattttgccgttgcagccattcataattacctttgtcattttatcgtatcctttctcgttgtactaagcaagctttaagccataagccttcatgacctcagcaagcttccttgcattatcctcacccatctcgcacatagggcttctaagaggtccgacattcatacccatcaggttcatagccttctttacaggaattggattcacctctgagaagagtgcgtccacaagtggaagagcctctctctgaagctctaaggctgtctgtaaatcgcccttgaagaagctgtcacacatattgtgtacctttgcaggggctacattgctccatactgagattacaccgattgctccgatagacataagaggcactacgagaccatcctcgcctgagtacatatcaagctttccgtctgtcagatacattgtctttgaagcctgtgccagatttcctgtagcttccttgagtcccacgatattttcctttgtcttaaagagctctgccatagtctccggaagcacattgcagcctgtacgtcccggtacgttgtatacgataataggacactttgtgctgtctgcaatctgcgaatagtggctcacaagacctgcctgagtagccttgttgtagtatggtgtgacaacgagcagtccgtctgcgccaaactcctcagcctcctttgaaagctgcatagctgtctttgtgcagttagagcctgtgcctgctactacaggtacacgatgctttgtaaactctacggcagcctttataacctttgcatgctcctccattgacagacatgggctctcgcctgtggtgccggcaatgataatagcatctgtgccattatcaatctgcatattgataagctcctcgagcttgtcgtaattaacctcctcgttatcgtacataggtgtaacaattgctactcctgctcctttgaaaattgccatgattttatctccttcttgcttttctttattcgatatttgattctcttaacgtataagtatgccgctgtctgcctctaagcgctaaaaaaccggctccttagagccggtcccaattcttcatgaatcacgatagctccccatcaaatctgatgacagtcataaggctgttcgccatatgcccagagatatatctgcagatgataaatcccttcggcgctattcctttcatctcccatcaactgcccctgcggcatccggaaagctactcataagtcgcgcgacctctatctgttaatcaaattattcgtatacagcagatgatataactgcctcacacttgcactaataatatcaccacgcctgtgcattgtcaactcacaggacaatatttcttattatttttccgacgcgatattataaatctcatctgccatttccctgattccatcgtcaagtactctgcctgtcataatcacggtcacatcatcaggccttgaagcaagcatatccgacagctcctcctttgaaatcagatgcaaatccaaaagccccagcatctcatcaagcacaacaaccatgtcagcacctgttgatataaccttctttgcatagttgaagccattcttgatattcatgatttcttcctgcttactctcctcatcaagctgctcaaagagtattccggctcttgaaaaattaaagaatttcacctccggctcaagctttttcaaaaattccggctcctttttaccctttagaaactgaataacgacagcctgtttaccatcacaggcagcacatattgcacttcctatagcgacatttgtcttgccatgtccctcgccataataaatctgtactgcaccgttttccataataatcatgcctccatacacatagcttttctgcctgatatacaatcattacagtttacaccttatgtaaacgtcaacaattacaagcattaaccaataatatctagtaaaataccacaatctgacttttattgcaaattttcgggaaaatcacaaatccgtagttactgtccattaaaaatactatgcctcaatcttgctcacggaaacctcatacgccgtgcgctgctccacctgtgtctcactgagctttttcacatagtctctgctctggattctgccccatatctgcacatgtgtacccacctcaaaggtcgacgcaaatctggcatttcttccccaacagatacatggaatatagtctgacttgccatatgagcggttcactgccacaagcaggtctgcaatttctcgtccaagcggtgttttcctgtatatagcctccttgcagatatagccgtcaaggaaaatctgattggctgcatcctcatcataatcactgtccaatatctcaagctctcttgcaaaaacagacagcaccagcctgttcttcttctcctcatgcctgttgaatgagcggaactgaccgcctatatatacgcttttgcctatgtagtcaccctccacattgataagcctctctgacaccatcaccggaatatagtccatgcaatctgaaagccttctgaccgaaacctccatcatatagaagccctcaccatacacctcgtgactaaactgaaaatctgaaacgatttctccgattattgatacctggttgttttcaaacattttatctgccatgaatttttgtctcccttccttttgtaaaatgtttttccagctatttttaacatttccacaaagtatattttctcaaataatgtcgacaaatccaataacatttcacttaattttataaaaactttcaaggaaaacttgcacattggaaaaattatgatagaataagttagttgcaaacttagctttatttattaaagaaagaaggaaaatatgaaaacaacaagagacgatattcgtaatatagcaattattgcccacgttgatcatggtaaaacaacacttgtagatgagcttcttaagcaaagcggtgtgttccgtgacaatcaggaagttcaggatcgagtaatggattcaaacgacatcgagcgtgaaagaggtatcacaatcctctccaaaaacacagctattcagtataaggacatcaaaatcaacatcatcgacactccgggtcatgctgacttcggcggtgaggtagagcgtgttcttaagatggtaaacggagttatcctcgtggttgatgccttcgagggtgttatgccacagaccaagttcgtagttatgaaggctcttgcactcaagctgcctatcattgtctgcgtcaacaagattgaccgtccggaggcacgtcctaatgaggtcatcgatgaggtattagagctcttcatggatctcgatgcttctgaggagcagcttgactgcccattcgtttttgcatcagccagagacggctatgccatgaaggacttaaacgatgagagaaaggatatgactcctctcttcgagactatcgtaaattacatacctgctccaacaggtgatccggatgccaacacacagattctcatcagtacaatcgactacaatgagtatgtaggacgtatcggaatcggtaaagtggataacggtaaaatcaaggtcaatcaggaggctgtcgttgtaaaccaccacgaccctgacaagcttgagaaggtccgtatcagcaagctttacgagtttgacggactcaacaaggtagatgtagctgaggcaggaatcggttcgattgtagccatctcaggtatcgcagacatccacatcggagatacaatctgcgcaccggaagcaccggaagctattcctttccagaagatttcagagcctacaatctctatgaacttcatcgtaaacaacagccctcttgcaggacaggaaggtaaatttgtcacaagccgtcacatccgtgacagactccttcgcgagctcaacactgatgtttcactgcgtgtcgaggataccgactcacctgattccttcaaggtttccggacgtggagagcttcacctttcagtgcttatcgagaacatgcgccgtgagggttatgagttcgctgtaagtaaggcagaggtgctctacaagtatgacgaaaacggcaagaagcttgagccaatggagcttgcttatatcgatgtgcctgacgagtttacaggagctgtcatctcaaagcttcagcagcgcaagggcgagcttagaaatatgggctctatcgccggaggctacaccagacttgaattccatatccctgcacgtggacttatcggataccgtggtgagttcatgaccgatacaaagggtaacggaatcttaaacaccatgtttgacggctacgagccatacaagggtgagattgcataccgtgcaacaggttcactcattgcctttgagtcaggtgaggccgtaacatacggactcttctctgcacaggagagaggaacactctttatcggacctggtgccaaggtttactcaggaatggttatcggacagtgttcaaaggctgaggacatcgagctcaacgtatgtaagaagaagcatcttacaaatacacgttcttcatcagcagatgaggcactcacacttgtaccacctaaagtattaagccttgagcaggctatcgactttattgatacagatgagcttcttgaggtaacacctgagagccttcgaatcagaaagaagattcttgaccctactcttcgtaagagagccggtttcaagaaaaattaaatcatgcttttcgcataaagtttttcttgctgaaaagtatacagtaattacactttaagtaaatttcaaagaaaaaaaataccgtcagggaacatctccctgacggtatttttatttgacctgatttatttttacagtgccttgattctctcaagtgcctttactgtgttctcatagtttccgaaagcagtcagtctgaagtagccctctccgcttggtccaaagcctgagccaggtgtacctaccacgttggcattctcaagcaggtaatcgaagaactcccatgatgtcatctgatccggtgtcttgagccagatgtatggtgcgtttactccgccgtatactgtaaagcctgcctctgcaagacctgtctttattgtctttgcattgttcatgtagtatgctacctgatccttaagctgtgcttttccggcatctgagtaaactgcctcgcctgctctctgcacgatgtatggtgcaccgttgaacttggttccgtgacggcgtgcccacatagcatgaagtgatacatcaccacacttaagctccttaggtactactgtgaagccaagacgcacacctgtaaagcctgcattctttgagaagcttctaagctcgatggcacatgtctttgccccgttacactcatagattgagtgtggcacatctgcttcgctgatatatgcctcataggctgcatcaaagatgatgactgagccattcttgtttgcataatctacccatacctgtaactgttcctttgtaagagttgttcctgtcgggttatttggcagacacagataaatcatatccggtacttcctttggaagctccggaacgaagccgttatctgctgttgaaggcatatagattacattgctccaggtctctgtctgagcgtcatatgtgcctgttcttcctgccatgacattggaatcaacatatacagggtaaacaggatctgtaacagcgatacggctgtttgctgagaaaagctcctggatgttggctgaatcgctctttgctccatctgaaacaaaaatctcatcggctgagatatcgcatcctcttgccttgtagtcattgtctgaaattgcttttctgaggaactcatatccgaggtcaggtgcgtatccgtggaatgttgctgcacttcccatctcgtcaactgccttgtgcatagcatcaataatagcaggtgcaagtggctgtgttacatcgccgattccaagccttataatctctttatccggattagcctcctgataagctgcaacctttttagctattgtgctgaaaaggtagcttcccggtaatttctgaaagttatcattaatctgaaacatgtttatctctcctttgttactttacaataagtctaatttatcactttactataaaagtgtaaatatatttttttatcattattttttatagtaactgttcaagcctttacagctactatcatacactctgctgtccggcttcataaagcgcatactacacatcagtcataaggcttagtatcatctgtgctgtttccacaagaccggtaccgttatccatgcttcgcttctggatataccggtgtgcttcctcctctgagaatccatttcgctccatcagtacagtctttgcactgtttagcatctcctggtcttcctttgaacgtacctttggcctttgcctgagctttttcctgcggcgcgttatcgtgtaatccatcatctcaacagtctgcaaaagctcatgcaccttaagtggcatggataatgacatcagattatccacattcttttccatgatacccgctgccgacgctatgagaagcatctgaaactccttaggcatatactcgtatatctcactgtacatcatgtctgaaaatctgtatccgcatatgatgattcccatattcagtccattcatgctcgaaagtgccgtagctcctgtatttgcaaccgccgtgactgtataaccgctctgcgctaatatttttttgattgaattggcaacttcctttttaggaaatgctataacaatattattcacggtccgttacatcctttaaaatttgtacagatattcatctatttcccattgtgtaaccgcagctctgtaatcgttccactctgcctcttttgcctctataaacttgttgtagatatgctctccgagtatctcgcggataaaatcatctgacttaaggcactcaaccgcctcatgtaaatcagcaggaagtgattcaattccgagtctctttttatcctgttctgtgagctcaaatacattctcacgaagctctgcatccggctgtatcttattctttatgccgtcaagtcctgctgccaggcacagtgccagcaccagatacggatttgctgaaggatcagggtttctaagctccactctccttccctcacctcttgctgccgggattctgataagcggacttctgtttgtagccgaccaggtgatataaatcggtgcttcatagcccggcacaaagcgcttatatgaattgacaattggattggtgatgaccgtcatgccctttatatgcttcataataccacctatgaagtagtatgcctcctcactgagtccaagcttatcgccctcattatcaaatatattgacaccatcctttgaaagtgacatgttgatatgcattcccgagccactcacaccatgctttggctttggcatgaagctggcaaaaagcccgtgtctctttgcaattgtctttatagcaagcttgaaggtcatgatattgtcagcggtatgaagtgcctcctcatacttgaaatcaatctcatgctgtgccggggccacctcatggtgtgatgcctctatctcaaaatccatatcctcaagagttaaaaccatgtctcttctggcattttctcccaaatcatttggtcctaaatcaaagtaccctgctctctcatgcgagatggtggtaggctgtccgttctcatccatgtggaaaaggaaaaactcacactccggacctacattaaatacataacccatctgcttcgccttttctatctgcttctttaatatatagcgtggattcccctcaaacggtgtaccatccgccatatagacatcacagatgattcgtgcaaccttgccctgctgtggtctccacggaaaaatcataaaggtgtcgagatccgggtgcagatacatatctgactcctctatcctcacaaagccctctattgatgagccgtcgaacatgcacctgttgtcgagtgccttctcaagctggctggctgtaattgccacgttttttaatgttccaaagatatccgtaaactgtaaacggataaactcgatatcctcctcatccactatgcggataatatcattcttactgtattttgccattttaaatctccttattattgcaaaaagctataaccctatcgtactccatcacaccgccaaacaaatcaagagcactgcctattgtcacattcagatggttatgtccaagctgcctgatgcattttaaatcgtcaaaggatgacacacctcctgcatatgtgaccggtagctttccccagccgccaagcatggcgacaagctccttctcgatgccgttcaccctgccctcaacatccactgcatgtaccagaaactcgcagcaatatgaggatagcttatccaaaagctctgttgtcacggcctcatccgtgaagttctgccagcggtcagttactatatagtactgtccgtcctttttgcggcatgataaatcaagcaccagcctgtcactgcccacggtatctttaagcctgcttagatttgcatagtttatcctgccgtccttaaatacgtatgatgtcacaataactgctgcggcaccggcatctataaactccatcgcattgtctgcggtgataccgcctcctacctgtaagccctgcggatacgcttcaagcgccttaacagcctgttcctttgtagcctcataatactcgctgtccacagaattgagcaaaatgatatgaccgccctttatgccggatttcctatacatatctgcataaaaccggctgtcctgctctgagacaaagttctcactggcaaagtcgcccctgtcttttaatgaaccaccgacaatctgctttacttttccattgtgaatgtcgatacatggtcgaaactccatatttttctcccttgtttatattatgatatgagggtcaaaaggtatttacccctttaaccatattattgtggctaaaaaatcgtcactgtccacgtcttaatgcgacatgctaatattgccgtaaagccactttatataaaatataacataattttcactttatttgtaaaggacttacattagttttactaatatataatataataatttcatatcgggcttataactgcttgacactctctctttaatttgctatcatcatacaaattacattagtatataaagtataccagtataataacataagaaagagaggaatttaaaaatgggtactattatcggcgaaggaattacatttgatgacgttctcttagttccacaatattctgaggtaacaccaaatatgatcgagcttcagacacatcttactaagaagattgtccttaacattcctatgatgagtgctgcaatggatacagtcacagaatcaaaaatggctatcgcaatggccagacagggtggtatcggaatcatccacaaaaacatgtctattgaggcacaggcagacgaagtcgataaggtaaaacgttcagaaaacggcgttattaccgatccgttctatctttctccagaccatacattacaggatgcagacaaccttatggccaagttcaagatatcaggtgtgccaatcacaaaggacggcaagctcgtaggcatcatcacaaaccgtgatctgaagtttgagacagacttcacaaagaagatttcagagtctatgacttctgagaatctcattacagctcctgagggcatcaccctcgatgaagcaaagaagattcttgcaaaggcaagaaaggaaaagctccctatcgtagacaaggactacaacctcaagggacttatcactataaaggatatcgagaagcagattaagtatcctctttcagcaaaggatgatcagggccgtctcctctgcggtgccggagtaggtatcacaggcaacatgatggaacgtgttgatgctcttgttaagtctcatgttgatgtcatcgttgttgactcagcacacggacattcaaagaatatccttgatgctgttaagaagatcaaagctgcttatcctgaccttcagattatcgcaggaaatatcgcaacaggcgctgctgccaaggctcttatcgaggccggtgcagatgcagtaaaggtcggtatcggacctggttctatctgtacaacacgtgtcgttgccggtatcggtgtaccacagattacagctatcatggactgctacaaggtcgctaaggagtatggtgttcctgttatagctgatggtggtatcaagtactcaggtgatatgacaaaggctcttgcagccggtgccaacgtatgtatgatgggctcaatgttcgcaggctgcgacgaggctcctggaaccttcgagctttatcagggaagaaaatacaaggtataccgtggcatgggttctatcgctgccatggaaaacggaagcaaggaccgttacttccaggagggcgctaaaaagctcgttcctgaaggagttgaaggtcgtgtagcttacaagggaactcttgaggatacagtattccagcttgttggtggtatccgctcaggaatgggctactgtggctgcaagacaatcgaggatctcaaggagaatggcaagtttgtcaagattaccgctgcctctctcagggagagccacccacatgatatccatatcactaaagaggctcctaactacagcacagacgataaataaaacacacatataataacgaggtaaaatatttggacgctgacgacatatcgcagattatattcttattaatattattagcactctccgcatttttttcatcttcggagactgcccttactaccgtaaacaaaatacgcatgagaaccctggctgaggccggtaacaaaaaagccgaaaaggtgctcaaggtgactgagaactctccaaagatgctctcagccatccttatcggcaacaacatcgtaaatctttcagcatcatcgctcaccacatcgctcgccatcaagctgtttggcaatgtcggagccggtgttgcaaccggaatacttacattcctcatactgatctttggagaggtctctccgaagacacttgcgaccataaaggctgacaggatttcactctcaatcgcaggctttatatcagtgctcatggtagtgctgacacctgtaatatttatcatcaacaagctttcactcggagtcattttcctctttggaataagacagagcgatgccaagcgtgtcatgaccgaggaggagcttcgtacaatcgttgatgtaggacaggaggacggcattatcgaggatgaagagcgagatatgattcacaatgtattcgatttcggagatgccgaggccaaggaggtcatggttccacgtattgatatgacgtttgtccatgttgatgctacttatgatgagctgatttcaatattcagagaggataaattcaccagactccctgtgtacgatgaaagcactgacaacgtaatcggtatcgtaaatatgaaggatctgctgctccttaaggatgaggataaagagcatttttccatcagaaatatcatgcgtgagccttactttacatatgagcacaagaatacagcgaatctgtttctcgagatgcgcgaatcatctatatcgcttgccattgtcttagatgaatatggtgtcacagccggactcatcacactcgaggatctcttagaggagatagtcggtgagattcgtgatgaatacgactctgacgagcaggatgatatcacaagaataaatgactacgaatacatagttctcggctctgcaaatctcgaggatgtaagcgacgagcttggtctgcaccttgaatcagacgactatgacacaatcggtggctactgccttgaaaagcttgaccacctgcctgaaaaaaatgaaataatcatcactgatgacaatattcttctccgcatagaggctgttgataaaaaccgaatcgaaaaggtctatatcaaattgccaaagccttccgaagaagaaaattaaattcaggatcgtttaaccagcgggagttctccatgagacctcctgctttatttttgccgtaatacttttcgcttataaatctgatctttccaaatgctttggttctctccttgacctgagtatctgtaaatgtgatggatatagtcttttgcgtgatatttccatagctgtcctttgcctcaagttctaactctatgatatccttgtcacatgcactttttattttatgctcgtcaaattcttttactttcagataatttatcccgttatcgccatacgcaatatcaccatcctccacatccgttgcagatataaggcttcctatcagctgctctgttatactgccatttcttgcctgctttatcgaaaagaacatatcatccgcctctatagtaggctcatgctcccaaagtgcatacatatgtatgaccgccttatctgtatactctatccccagtatcctgcataaatcagctacctgtatactctctcccggtgtatattttatatcaggatacgcttctcctaaaatccagcctatacacatatgctggtttggcaatgtcaccgcgtcactatacttcacagttgcagatgcaccggtatcatattctatgatatactcgttttcctgccatactgcgtatatattcttcgatggtctgtttaactcaatccagctgtttgccacaccacacagtagcggatatccggcagtcttatcatatgaattatttccccagcctgtcatatgatatccggccatctgccatcccacagcaggaaaagcctgattaatgcctccatatatgtagctctttgtagtcttttctgaatccgacgcactcgtgttccgccaaaatgtcacatctatattcccggcctttgcatatgccgtataagtgccacccgaattcacaaaaaaaccatatgatgatgagctcatagacgaatcattgttccaattcgtgaaatcatatccggtagagctgctcgcactgattgtcacatacgtaccatagcagtatgtacctccccctgatacactgctaatgcctgtagatttcctgacatcaattgtatgaaacagtcctctcacggtcttgccataatacgaatacagtgctgtgagtgcgctgtccgtccagtttgccgctttggatatacctgcataggtagtataaacctttccccaggaaggaccattatcattcatgccacccttattcttgccatttactcgaagtaccatgcaggcatcgaggacgatagtgcatgagccggagctaagggcattgagggcctgctcgttaaatcgggttttaatattctgtaaagtaatcacataaagcatatactccttgcctgattgctttttgctgtttaagagtgtcagatattgtccgccaagctggaaataaattttctgtatctcatttccacctgtccctttaattgtcattttgtatccaattgtcctatacttggttcctgacgtagatgtatttcctgctgaacaaaaataaatattgccattcattttatttgtagccttaaaaacagcagcattaccataattagaatagtacttcacagcatcatcccattcatcagccttcactatattgcaatcgactgagaacatataggtaataataactgcagccataaacatcatgcaaacgcatttcctaaagaacacccgcttcccaataataacatttgagatatccattttcatcatattctccctttgtgtacaaaccaacaaaattataagttccgttcatatcggctaaatttaaactataatccgtaacttctgctcttgacggaaacagacatagcaaattacttgtcacgccagccgttatcatcggaagttgccactcctgtgctattttttcaataaacatatctccgattgcatcatctgacaaacctccatttgtccactgctgtatcactgaatcaacatacgccttctgctccccactcatgccatttccgaccttactgccataaaatatccatcccggtgcaacatactcatttttaggtgcttccggctgcgcgggctcactttgagccggctcaggtgcagctgtctgatttgatgcttccggttttgaatcgttaccggcaggtttttgtgtattattgctgcctgccgatgtcttattgctgtctgtcgacgtcttttgaccggctgcagctttgtcttctgatgatttatctgacgctgtatttgcattatccgaattaatattacctgctacagaattatcattggtctctgattgcgcaccgttattttgcttattatctttatcctctacatttgattccttcaaagcatcctctttcaccagctcaagcatctcactttcagctacaatatcctgctcattctcagtcacactgacagaccgggaatcctttttattccctttatttcctgattttgagcctactatcactgctatacatatgataagaattattgctattatcactgccggtataatgaataaaagtttctgttgtctttcatttttcatacgctagttatcctccattggctgatctgctacaatagtctttttgcagcttattttctttgttacacctgtaggaagcttaaactcttcctctattcctgctgaaataatgcccctttccatatcacagacataaactgtggtacttgcagtaccgcctgctgtaagcctctcatcaatgtcctctatgacagctttttccacatcatagctgctgacaggctttttatccacgatatacatatttggctcgtaatatctgttcatagcacctgagagcgctaatgacagacatttctccatctggttctccctgactgtcacattgtatacactaagcccaagcatagctgtatacactacaataagacagccaattattccaagcactacatttttcattttataaacctactacctttctattaattggaacacttatcctaacatgatcctttgtgccgtttttgcaggttatcctgacatgcatatcatacacaccataatccggaaagctaagtgacgagccatcggctgatatgctgtgagtacagtcatttctgcccgaatcatacagggcataaacttcaagcttatccagattatcctcatgcgctgtaacatcaagcaggtcatacacactgtagcttacagcattctgacgcattttctcctttagctcaatacccggaaccggtatgtttttcatgccgtcatagttgttgtttgcgctattttcactcaatatatcctgtggagcaaacgccacactcattttattcttcagagccacaaatcccgacagcagtgcaattcctacaaccaccgccactatcatggctccatatgtctgcattatctccttcatctattgtctcccggttatctaaatcgcactgttgccccatatatctatgagccgcgcaagcatgcctccctgagccagcacaatgtttcccatcaacacaagaaatgcacttgtggcggccgctgcaatcagcacgcctccatactgtctgaatacttctttcatattctcttacctttacatactttttaagtaactgttcacgttacctttttaatcaattcagttgttatcacagcagagtagacacatacacgagcacaccgattactccactgcctaaaagaagcataataacgcttcctcccaattcttctattaaaagctccatctgttttccccctcttatacagcaatatccacaagaaaagtactacaacgcatatccgctcagcacatgctcctgcttaattccgaaaaatgctaccgcgtaagtgaacttaagctccactcttgccttttctatctcatctgatgaagtgatttgtgatgcgtctgtaactgtccttatggaattgtctgtcatatacagtttaagctccagtgtatctccggcttttgatgcattttcaaagcaggtctgcgcaaccgagctgtcataatcactgtcctcaagctcattgatgacctgcgcatgtaggttctgtgcctcaactacagtcataaatcccgacagcacacctgatgatgtaaccaccataaacataatcaaaaatacccctaaaaaggtcttcattatctgactcacaacacaccccctacactaccttgtatgataaaaagcttataaggaaaatagccatatcaactatcatcttaaatgatgctgtgataacaggagccaaaaacaaaagatacatgccggcggtcttatccttaagcctcgcggtgtctgctgcatcaagcatctccagattcttcgtaatcagctcatcaatctgacttccgcaattgccactatttccaatcgaaacagcatacagcatgcccatggctgcgtttatctccggcaggttcaaacagtcaaggaatctgtgatatggattggagctctccggctccacatcgagtctctccacaagcgtatttacctcttccttaagtatcaccggtatatgctctctcgacttctgaatggctacctgcacattttcactctgaatcaatagagcgaggtccatcagccactttggaaatgcactctttacatccgctatcagatttttcttcataagcctgtgacctatacggtgctggttcagacatataagagctgctcccatagctgccacagctggccattgtctgtcagtatacagtaaaaatgcactggctaacgccggtataacagccataagaattgacgcacgaagctcctttgccggattgtatgccttgtattcctcgagctttttggcatgcttatcatcctccggcagcagatcaattccaagataatccacttcaagaaatttctgcccccagagtatgattaaatcatcaaacactataagagctgcagacagtatctgcacaatgatattgctgctgatatccatgctcaaaaccggcagataaagtatgattccactaatgataacagaggtcacaaccgacaggataatctgatgaaacatcctctgtctgtcctctatattgcgcagtatcctgcgctcccatgcactcttatccttaagcagtatcctggctgattctttaatatcaccgccatagtactcagcgtgtgccataaactcgtgtgcatttactattcggttgcacttgtactcatcttcaataatcctcatagcatccacaaacacctctgtctcatcaaacgtgagcatcatatgatcaatagctctgctcacagtctccttcatatggccatctgccagcgtgctctttacatcctcaaatgcacggattatcttctgctccttcaaaaatgaatacagcagggtgtcaatatacagcgatacatccagaaagcgctttcgcgcttcctgaaatctttggcctttgattcggtgaaaatgctgcataacaagaagaaaaacaagcaccacagctgtacacccccagtttagcttgagcagaagatgcagcacatatgtcagaaataaaatcaatatatacgtcattcctaagcctccctctcctcactcatcatggcctcattcatccgtatctcattgacaaaggactcgccaaacggctcattcacaccctctcttttaaatctgcgaagtatgacctttggtatatcgtgagtcactatctgtccgtctgatacaagcataaacacatgattggtatagttttccctgtagaaaaagcacacctggtctatgtatctgtacaccaccccatcttcatttcttctcttacggatcaaaatgcccacatcaagtgcctgatatatgtcattctccatacgctctgcatccacacggctctcgagcatattgagtattctgtccggtatattgcgcacatcatccgtgtggagtgtcgtcatgccacgcacaccggtgctccagctctgcagcagatattttacctcctttgagcgtgcctctgagagcataatccactttggattcattctaagacatgacttgatagcctcagagtagccaaacacatcctcactcaccttcatctctatacagtccttgcccggatttgtctcggcataacgtatctcaagagtatcctcaattgtaatcacgcgctcattcgccagtataaactgtgaaaaaaacttcacgcactccgtctttccgatgcccggcatcccgcaaaaggtgatattcatcttggtctttacgcagtttatcagtacagctaaaagctcctccgagcagaatttctcagcaattgcagattctgctgtcagtctgataagcggcggtgtctttcgtatgctgatgctcctgcccgacttcgcaaccgactcatgcagtatcgtcacacgaagctcgctcgtctcggcctcaagctccggatttctcttattgaactgtctgcttacgacattggcgatgcgctgtgtaaactgctccacaaaagcaggtgtcatatactgtgtgacaaactgctgattggccctgaaacgctcattgaatatatttgtaagccatatttctttgccgttataatctatatccgttatctcgttgctggctacaaaactccaaagcggtccaaaatattcttttccaagctccatgtaccacctcttacttgacactcatattggcatgatttgaaaagtttgtaatcagatcactaaatgtctttcctactatgcctgttgcatcagagcctataaccgctgttacaacgaggatgattgataaaattgctacaactgttatgagtattccgccatactcctgaaaaatttccttcataatatttaaatcctttcttcatctaagcctaaaataatagtgttaaataaaatcaaaaatcaaatatatgaaactagaaatcaagggaaaaaaaatagtggccgaaatgccacaaaaagaaacccgcataaaacatatgcaagacacaatttaaaaagatatttatatcttacacaaaaatcgggatttgtaaataccaaatcccgaaaaaatgtgcacaaatattcatttagtttttatacatatatcacatacttattttagataaatatgccaattataagtctacccgttaggacataacagagattttatgcctcgagcagcttatttacgctgacaagacgtgtgacaacaacaaacacctctgcagcctttttcagctcatcaagtgatggatatgtcggagcaattcttatcacgcagtcatccggatccttcttgtaagggaaaggagagcctgcacctgtcattgtgacaccagcttccttgcactttgcaacgatttcctttgcacagcctgaaagagcctcaaatccgaagaagtatccaccaagcggcttaacccatgttccgatgcctcttgaagcaatttcatctgtgaggatattctcaaccagctcgaatttaggtctgataagagctgcatgctttgccatatgagccttgataccatctacatccttaaagaatctcgcatgacgaagctgattaatcttgtcgtgtccgattgtctgtatagtaaggcgcttcttgatatcctcacggtttttctcagatgtgcatatacctgccacgcctgcaccagggaatgtcaccttacttgttgagcagaactcaaataccatatcagggtttccctctttctcgcagagctcaaggatatttggaatctctgcctgcttatcatcatagagatgatgaactgtgtatgcattgtcccagaagattctaaaatcatctgctgcaggcttaagctttgaaaagcgctcaactgtctcatcagagtatacaacaccctgtgggttagagtattttggaacacaccagattccctttacagaggcatcgttattgacatatttctcaaccatatccatgtcaggaccatcctcagtcatagggatgtttatcatctcaactccaaactcctctgtgattgcaaagtgcctgtcatagcccggtacaggacagaggaacttcaccttgtcaagcttgcaccatggtgtattgccgcaaagaccaaagataaatgcacgtgaaacctgatcatacatgatattgagacttgagtttccatatactatagcctgctcaggctttgctcctaccatgcctgcgataagggcctttgcctcaggaattccgtccagacatgcatagtttctcacatcaagtcctgattcacttttcatatcactgtctgatttcaagacatcgagcatagggagtgagaggtcaagctggtctgctcccggctttccacgcgacatgtccaggcttaagccaagattcttaatcttctcgtactcagcctcaagtgctgtcttttcctgcattaactcgtcctttgtcatttctgtatactttttcatttaaagatcctcctggtctgattttctaaatatttatattattatcaactatttgcaattattcaagcttcatctatgcactttcatgtatcacagtctctgtgaagctcatccatgtgtgcttttatctttgcctcatagcctatatccgtaggcttgtaaaacactctgtctgtaaggccatccggcagatactgctgcttcacatagtgatttggatagtcgtgtgcgtatttgtacccgactccgtgcccgagcttttctgccgcaccgtaatgggcatcctgcagatgtgccggaacagccggtgtcttagtctgcttcacgcagctcatcgctgccgatatcgcattatatgatgcattgctctttggcgcgcatgccatgtatgtgacagcctgtgacagaataatctgtgcctccggcattccaacgcgctcgacctctgccgccgccgatgccgctacaaccatagccatcgggtctgcattgcctatatcctccgatgcaagtatcatgattcgtcttgcgataaatttcacatcttctccggcataaagcatcctcgccagataatagaccgccgcgtccgggtctgagccgcgcatgctctttataaaagcagagatggtatcgtaatggttatcccccttcttatcataggagataactcttttttgtatacattcgctcgccacatcgatagtgatatgaatgatgccatcgtctgacctgtccgtggtcagtacaccaagctcaatcgctgtgagcgccgctctcgcatctccgtttgacacatctgcaaggaaatcaagtgcatcatcatctatctgtgcattgtatgcacccatgcccttttctgtgtcagtcagtgctctcttaagaagtacctttatatcatccgttgacagctttttaagctcaaaaatgactgagcgtgaaagcaaggctccgtttacctcaaagtaaggattctcagtggtagctcctatcagaataatggtgccatcctccacaaacggaagcagataatcctgctgccccttgttgaagcgatgtatctcgtcgataaaaagtatcgtcttcttctgatacattccctgattgttcttcgcctgctccacgacctcttccatgtccttcttgcctgcagaggttgcattaatctgcataaactcagcactggtagtgtgggctatgacctttgccaaagtagtctttccggtgcccggcggcccgtaaaagatgatggagctgagcttatcggctttaatcgcacgatacaaaagcttgtccttcccaactatgtgctgctgcccgaccacctcatcaagtgttgtcggacgcatccttgaagctaagggaccgcttgtctccttattctgttctctcatgtaatcaaataaatccatatcatccccgcctgaaatgcatatttgatatacctgttatatcattttgcaatttcttttagcaaataattcattttgcattgatataatcggcaattacgtgttttataagtgctaattatgcataaaaaagtggtgcaaaattcatttccttataataagatacatgaatttgcaccactttacaacacaaaatttaattttctacgaaatgactaatatttgccctttaatgcaggataaaactgcttaaattttgcatagcccttctcatatttttcgacaagctgtggacttggcatggttgtatccttctttctcacaatagccgctgccgcagcctccacattttcaaagcagccgtttgcaactgcggccagtattgcaccgccgtatgccggtccttcctcgacctctaccgtgtcaacctgcatattcatgacgtttgcaactatctttctccaaagcacactctttgcaccgccaccacagattgttgtgctttttggtgccacaccaaggctctttgccacctcaagtgaatctcgaagaccatatgccacaccctcaaacacagcctgcagcatgtctgctctgtcagtatccatgctcatcccgataaacgctgcccttgcagacggatcattgtgcggagagcgctctcccatcagataaggcagaaaatacacatgattctcaccaagtctgccatcctcctcaagaggcttctgctcattcacaaagtcatcggaatgaaggatatccttcatccaccagttgttgcagcttgcagccgagagcatgcagcccatcagatgatagccgccgtcagcatgatcaaacgaatgaagcgcattgtgcgaatccactctgaactcatcacttgtaatgaaaagtgtaccgcttgttccaagagagaggttgcactttccggctccgactgtacctgtgcctatagctgcagccgcattatctcctgccccggctgcaactatgcagtctttaggaaagccaagctcacatgccacatcagctttcagagtgcctgtcttttcactgctctcataaagcccaggaagccactcctctcttacatcgcatatgtcaagcatctcctttgaccaacacttatttttgacatccagaagaagcattcccgatgcatcagaataatcggtactaaatacacctgtcatgcggtatgcaatataatcctttggcagcataagcttttttattctggcaaagttttccggttcatttgcttttagccataaaatctttggcgctgtaaatccggcaaacgctatatttccggtgagctcagacagcttttcttttcctattacattatttaaatagtctgtctccttctgtgttcttccgtcattccaaagtatagcaggtcttattacattgtcgttttcatccaatacaacaagtccatgcatctgaccgccgaagctgattcccgcaacagcgctcctgtcaaaatctttagtcagctctataagcccagccacggtctgctcccaccagtcacatggattctgctctgaccagcccggctttggaaaactgattggatactcctttgagactatatttaatacctttccgctctcatccatgagcagaagctttactgcacttgtgcctaaatccacacctatatatagcatatctattctccattcacgcaatatgtttacatcagataacgtaactattcagaacccactaacagaaaggattttctgtcttgtatggcagtgatgccggctgattgtagttaatatcctcaactggcacgccaatatatttaaatacctcaaaaagggcttttccgtaatgaccgaaggctacagctccgtgatgaggataattcttctcaataagcacatgacggtagaaacgtcccatctcctttatcgcaaacactccgatactgccgaatgagcgtgttgcaacaggaagcacctcaccctgtgccacataggcacgaatcttacagtctgctgtagactggagacggtaaaatgtaatatctcccggcactatatctccctcgagagttccgtttgtcacctctataggaaggcttcttgccataatcatctgatacttcatctgtgggttgcaaaccttgcttgaacaggtgtttccacagtggaagcccataaatgtgtctgtatgcttgtagtcaaatctgccctcgattgactccttgtacatatccttcggcactgagttgttgatgtcgagaagtgttaccgcatcctcgctgacgcaggttccgatgaactcactgagcactccatagatatcgacctcgcatgaaaccgggatacctcttcctgtaagacggctgtttacatagcatggtacaaatccaaactgtgtctggaaggcaggccagcattttcctgcgattgccacatactttctgtagcccttatgctcatcaacccagtctaaaagtgtgagctcatactgtgcaagcttctcaagaatctcaggctttttgttgccctcgccaagctccttttccatgtcctttaccacatccggtattctctcatcaccggcatgcttgttaaatgcctcaaacaaatcaagctctgaattttcctcaatctcaacacccacgttgtagagctgcttgattggcgcattgcatgcaaggaaattgagtggtcttggtccgaatgaaataatcttaagattattaagtccgtatatagcccttgctattggcaggaattcatgtatcatatctgcgcagtcatctgcatcgcccacaggatactccggaatatacgctcctatatttctgagtgccagattgtagcttgcgtttaacataccacagtatgcatctccacgtccctgaattaagttctcctgtgtctcctctgctgctgcaacaaacatctttggtccgtcaaagtgctttgcaagaagagtctctgaaatctccggtccaaagtttccaaggtaaacacaaagtgcattgcagcctgctgcctttatgtcctcaagtgcctgtaccatatgtatttcgctctccacgatacatacaggacactcatatatgtctgctgcatcatattttgcagcgtatgcatcgacaagtgcttttcttctgtttactgacagactttccggaaaacagtcacggcttaccgcaactataccgattttcatttttggaatattgttcatagtgtaaatctccttctctcatatgccccatcggacagattaattgttcttatgtgctaagtatatatccggtccagcttaattgatacctataatttagtaaatttagtgtatttttcaacttaatttactaaattataatgttaatactatattgtcatgttataatgagacaaataaaacataaggagccatgccatgtctatcacagcaaaagaacttgccaaacaacttaatctttctgaagcagccatatcgatggcacttaataataagcccggtgtcagcacactcaccagaaaacgtgtgctcgaagctgcggcctctgccggatatgatttttcaagaatatcaaataccaatgaagcgccggcctccaatggcacattatattttgtaatatacagaaagaatggcgctgtagttcctaattctcctgtttacacacatacagagcacggcgttttagtacaggatgttccattcttttcacagctgtcagagggtattgatttgggctgcaggcactgccactactacctgaatatcagctacatatacgaaaatgacgatattgaagctttgctatctgagtggaaaaggcttggagcaaagggtatcctgctgcttggaactgagatggaagagcatgacataaagccctttacaaggtgcggtctgcctgttgtgctaatagacaactatttcgaagccttaaacctcgattgcgtgactataaataaccttcagggtgcctatcttgccacagactacctgatcaagcaaacacatgcacagcccggatatctgcattcctcatacattataaccggctttgaggagagagccgacggcttctataaagcaatacgcaaaaacggtatgtcaacctcgcgctcagtcgtacatcacctctccccttcagttgacggtgcttactgtgatatgaaggcagttataaaaagcggtgatgagcttgtccgatgctactttgccgacaatgacctgattgctgccggagctatgcgtgcactttcagaggcaggctaccgtattcctgaagacatatcagtaataggctttgatgatatgccaatgtgtacctacattacaccgcctctttcgactgtgcatgtgcctaagcagtacatgggtgaaattgcagtaaaaaggcttgcagagataatagattctacctctgcaagccatgtaaaaattgaaataagtacagaaattataaaaagaaagagctgttgatttctatacattcacttatgcatttttctgaactgccgatgcactaagtttgccatccttcacatctataagaatggtatctcctgctctcacaccatctgccagaatcagctttgcagcgagtgtctcgacatgcttctgcagatatctcttaagtggtcttgctccgtataccggatcgtagccattgtcggtgataaactgctttgcagtgtctgtcagctcgactgtgatttccttgtcgacaagacgcttgtttaagtctgccatgagcagagtgatgatatgaccgatgttgtcctttgtgagaggcttgaacatgatgatctcatcaagtctgtttaaaaactccggtctgaaatgccccttaagctcatccatgacgcggttctcacactctgtgctgatgctgccgtctgcctctatgccctcaagaagctcctgtgagccgaggttgcttgtcataatgatgattgtgttcttgaaatccacggtacgtccctgtgagtcagtgattcgtccatcatcaagcacctgaagcagcacattgaatacatccggatgggctttttccacctcatcaaagagtactactgagtatggcttacgccttacagcctctgtgagctgtccaccctcatcatagcctacatatccaggaggcgctccgatgagtcgtgacactgagtacttctccatgtactcactcatatcgagtctgaccatgttgttttcatcatcaaaaagacttgccgcaagtgccttcgcaagctctgtcttacctacacctgtaggtccgaggaacataaacgaacctatcggctttgtaggatccttgatgcctgcctttgaacggatgatagcctctgtcacctttgtgactccgtcatcctgtcctattaccctcttgtgcagctcctcatcgaggtgaagtgtcttattacgctcactctctgtaagctttgcaacaggtattcctgtccagcgcgagataatgagtgcaatctcctcatcgcccacgttctctcgcacaagcgataagtctctgtccttaagcagtgcctcctctgattccagctccttctgaaggtttggaagcacaccgtactgaagctctgctgccttttccaggtcatagttctgctgtgctgtcttgatttcattctttgtggactcaatcttttcacgaagcttgctgaccttgtcaacagcgcccttctcgttctgccactgagccttttttgcattaaagtcatcacgcagctctgcaagctccttttgtagtgctacgagcctgtcctgacttaagtggtctgtctctttctttagagctgtctcctctatctcaagctgcataatcttacgattctgctcatcaagctccgccggcattgaatcaagctccgtctttatcatggcgcatgcctcatccacaagatctattgccttatcaggcaaaaatctgtctgtgatgtatctgtttgaaagcactgccgctgttacaagtgccgaatctgtgattttaacgccgtggaatacctcgtatctgtccttaaggccacgaagtattgagatagtgtcctctactgtcggctcgtctaccataacaggctggaaacgtctctcaagggctgcatccttctcaatgtactcacggtactcatcaagtgtggtggcacctacgcagtgcagctcacctcttgcaagcattggcttaagaagctgtcctgcatccatggctccgtctgtctttccggctcctactattgtgtgaagctcatcgataaagagaattatctgtccgtcagaggcttttacctcctcaagcactgccttaagtctctcttcaaactcgcccctgtacttagctcctgcaatcagagagcccatatcgagtgcaaacagttttttgtcctttaagccctcaggcacatcgccttttacgatacgctgcgccagtccctcaacgactgccgttttaccaacacccggctcaccgataagtaccgggttatttttagtcttacgcgagaggatacgcactacatttcgtatctcatcatcacggccgataacaggatcaagcttctgctgtcttgcacgctccaccatgtcgtagccgtatttctcaagtgtatcataggtggcctcagggttatcggatgtgaccttctgattgccccttaccgtagaaagtgctgtgaggaatctgtctcttgtgagaccatactcctttatcagctccttcattgccttgtttggatacttcagcagacacaggaaaagatgctctaccgaaacatactcatctcccattgcctttgcctcgtcctcagcatggataagaaccttgttcagatcattgcccacatagacctgtgcactgctgccgcttacctttgtgcgcgctgccagatgacgctttgcattctctgtgaaatgctctacgtttatctccatcttgtcaatcagcttcggtatcagtccgtcctcctgtgaaagtaatgccacaagcaggtgctcctgttctatctcctgattgccataatcatatgcaagcttctcgcagtcattgactgcctctattgatttctgtgtaaatttttgaatgttcatagtctcactcccttctactatgttatccataaatataatgatatgttggtcactaaggtatgcatcgatgataccttttgcccctttaatcatataatccttatgtgtcatacaggtaatatcaaaattttatctctaaataatcctttaaataattcttcaatattccttgtgactatgttataacacgcaaattagcactcgtcaagtgagagtgctaacaatttttattaaataaatataaacttttgatttacaagcaaaaaagagtgacttacatcactctcttttactcaatcggctgcacaatccccgaaacatttgccagattctgcatcttgtcatcagcgtctgccatgatatccgcgcatttcttaagctcctgctgcatctcctccgtgaatatacggctcttcttgtagcgaagctgatgctctgtgctggcccagaaattcatggcaatggtacgaaactgtatctctatcggcaccttgtccttgtgatccgaaaaatacacatcaaccagcactatcatatgaagactcctgtagccattctccttcggtttttttatgtagtcctttattgtgacaatctcgacatccgcctgattcacaagcatattggccacctgatatacatcggatatgaatggacaaatgaccctgacgccggctatatccttaatctcacgcttcatggcgttggtggtgagcggaatgccctttcgcttcattttgtctattatgctgtcaagcgactttacacggctctttatgttctcgattggatttctttcgtgattgtttttgaattcattatttaatatctgcagctttgctactatctgctgtatacccgattcgtagtagaacatgatgtgttcatactgcgaggcaattgaactaaattcgcccagcatcggcagcatctctatttgtgtatcatccatgtttatactccttggttttaggttttcttactaattgtataccttatactgtttatacatattatgcttctgtattcgattttccctttttaactgcctttttaactatcagctttgaaacccggtatgtcacttccaccagcgcaactcctgcaactacatcatatatcacatgctgcttcgtagtcaatgtggatatgaatactgctatagcgcaaatacagaaagttgtacgtatccactgcggtacttttttattgccacgaatgccaatatagcaaagccagcttacaaggcagtgtatggacggaaaaagattgtccgccgcatccatactatatagaaagcgcatgagctgtgcccatatgtctgagcccactatttccgggcgggtgttggttgtaggatacacgacataacagataaaacagactgcctttgccagccagtctgccatgaggaaacgataacagtgccttttatccatcgctgcattgtacagatatcctataatccaaaaaatatagcagccaaaataaatgactactgtagggtacacaaccggtatcatatcatcaagcgaggtctctatattgtgatggataaaaccgcctgcaatagcacgcgcaccccagtatacactgaaattgagcactactgtaaaaagcagcggaatacgactgtattttggaagtattctgttaaaaaactgtcctgtttgcgatatgctgtccctggataacacgtacttctttgtctccttttatacactctttaatttccggaagcaggtcaatatgaccttttttaaacaaaagcactattgtggaaccaatcagctcaaagtgccccatctctgcgccctttctcatcatgacattctcgtggtcattgactatgcctcccacaagcagcgcacctatctcaatctgtgccaccttgccaaaattaactgtatccagaatagtccacatacgcctgttttgcctgtatacaggagcattttccagtgcaataggctgtacactgtgaagcagtcccttcacaaaatgattcctgccctgaaatccatcatctatatagcagtaatgatgataatcgttggcacaaagacgcagtatcacgcagtctcctccaacaaattcctttgcaatttttttgtcggtgacaaggtccgtcaccttgtaccatgagcccttgatgtgaaagctgttgttgctttttatcctgtatgcactcaggtagccgtcacacggactgataagatgctcagcctgcctgtccacctcaatatcatcacgctttctggagaaaaagtcctgaaagctgttatatttctgacccttaaaatcagacatgtctatattgttattctttatataccggctgataaacggcttagacagcggggagcgtgctactatttctccgagcttaagtgcacctgtatgcagaagcaccttaagtgtcacacgcccaggtgccgtggtgtaaagccagtctacaaacgatttttttgccattaaataagaacctccgcaatgagaatacaaaactcaactgctcctatacctacaagcagaacctctccaaaaagagatggctttttgagctttacagggagcacgtagcaaatgccaatgattaaaagggcaagtgccgcgattgtctgtgtatgtatagctgtgaactctccaatcagatataccgccggaatagcaagcgcacttgatgtgattggaagccccagataatactgtctgcgctctgctgtcgctgcctgcctgttggcctcatccacattaaagtatgccagacggataagcccgcaaagtatgaatacaaatatggcgataaatgcaactgatatctttggtgtcacacaaaatacccacactgccggaagcacaccgaagcatatgatatcacttaacgaatctatctgtatgccaaatgttcgctcgtccctggtacggtccttctttgtggatgcaatggtgccgtcaaacatatcacagacaccggctagcataaggcagattagtgaacccacatacctatcctttatggcaagcataactccaaggaagcctatccacatgcctatgtatgtaagcactaccgtgtaattataaaagcctatgagccctgtctttttctctgtgtctgtattccctatatccagagtatctgctattgcagaattaatattcatattattcatattgattcccttactttcattcttttgtttttatcagataaaacatgataagttttctcatttacccttaaccggtaatattatatgcccttacctgatatataataacatattcatgacataaactcattaattatttgtttaaacttttcttaatatctcttatttttagcaaaaaacaaggcagaacccgctttctgattctgcccacatactatagcatatcatgaattatatctttaatctcctgcttgtccttttcaagaacaaatgcaagctctgcatttaaattgtgctctgccatcttgccatagcgctcatcgacggctgtagacttcttgcctgcctgtgcacgctgctcatttctgatatgtaaacactttaagagactgatcacactatccggctcacagcttctgactgcctccttatagcgcgtttcgcgctccttctcattgtttaccgcgagcgcctctatctcaggtactctatcgagcaccgccagtgcctcatcctgtgttattaccttacgtatcctcttatcagcattgtcaacaggtatatacactctgtcattctcctcctcaacagggcggagtaaaaaatatgacttgagctgcttgtctcctgacatgtctaactccacgatttcgcttattttgcaaattccatttgtagcatttaatacgtaatcacctatttcgaacatatcacacctctttcgttatacaatattattttatcactttttcacgaattttgtaagaggattttttcaaaaatgtcaaatatataaaaaaagcgtgttttacgtcaataaaacacgctttaaaaaattactcaatcagctgcttcacgcggtcatcgagctggagcatacggatgataagctctattgagcccttaatgccgtagctggcactgttgatacagatatcatagttacttgccttgctccactttctgccggtatagaatttgtaggtcttcagatgtctcttatcctcagattctatccatttctttgcctggttcggagtcacattcttatttatctcaaggaaacgctggattcttctcttctccggtgctgtgataaaaatacttatgtgaggaatatgattgtttgtcagaattgcatctgcaaaacgtcccataacaatgaagtcctcctgctttgccttctctacaaggaacttgcttgtatcaaaaaaaagcacatcctctgatgaaagtccgtggtatttcttaaaagcttttatgcgctttttgattcccattcgctcttttttctggaaggtagctgtagcctgggctgcttcctctccatccttctgtctgaacacctcattcatgacagacacatcatagaaattcatacgaagcttgtctgcaagtgcaaatccaatctcatttccaccacatccgcaggaacgtcctatacagataatcagatgatcgcccgtcttgaaacgatccttaaggtttacggtatttaaatccgctatctttggatcgaggatatctccgtcggcaaagcctgtcgggagctccgctatctcctctactatgttgttgtatctgaccatgatatcatgccttgtatcgtgatcaggtattgttcttgccatgttgcttatcagggcaagctcgcttcggattcttgagctgttctgccttgagtgcagatcctccatgatgttacggatacatatatccttctcgccaccaaataccctgccgagggatgagcctaatttcttgtatacttcggcatcaagctcatagatttcgatggcaagagctttaattttctcgtcataaaattccataattcatccctcctataaaaagaatatgatcatatctatgatgaaaacaggtatcagataacgcaatgaccaccatatgtaaccaaagaacgatggcatgttgataccgttttcgtctgataatgacttgaccataaagttcggtgcatttccaatatatgtgttggctcccataaatacagcgccacacgaaattgccataagcatcttgaccggcaccactcccagtgtggttgcgacacctgtagtaaagtgcatggctcccgctgtagtaaggaaaaccagatatgtcggtgtattgtcgaggaagcttgaaagtgctcctgttgcccagaacatctcaaacggctttgtgattccaagacctgaacctgcactctttaataccataagagcaggctgcatggtgatgaagattccgatgaaaagcaccgcaacctcctgaattgctccccatgtgaaatggttctgcacacgaacctccttcggtgttgtcttgaaggaaagcagggctgcaagcagaataatagcaatctcaataattgcaggcacagtgagtgtaacctccctgaatatcggaataccgataacctctcctgaagcgttctggaatgcagaaagcttaggaagcacaccgcttagtataacagctatgacaatcattacaatatataaaaagttgtgggcaccctttatcctgatgaggggctcattttccttcacctcaggcataagtcccttagtgatatccttctggtaggccttcttgtccaaatgataaaatatggtaagaagcagtatcatatttaatacgagaacaggaaacagcctcatgctccagaagaacgatactcctcttgaaaatcccatgagcagcggcggatctccgataggtgtaagacatcctccgatatttgacacaagaaaaatgaaaaataccatgatgtgacgcttgttttttctccatgagttcatctgtataatcggccttacaaaaagcatactggctcctgtagttcctatacagcttgaaaaaaaagttccaacagcaagcatgataacgtttacctttgggttgccgaccagacttccctccagcttgatatttccggctacgcagaacagtccaaagagcagcacgataaaggtcagatagtcacctatcagacactccagtaccgtctctacggcttttggtgctccatagaacagcgcgaacggaatggcaaaaagcagtgaccataagataactgcatgagcttgatgcttctcccaccattcaggcttcacaagcggcataactgctatgcacagcaataagcccgcaaatgggatacacaacattaataatgtgtttgacattcttttcacctctactttgttaaaaaataaactaattcaaatctagttcattttacaccattattttttatttgcaaccgtttataaaaagattttaatttatatatgttttttatgtaatatttacatttttacaaacaataatgcattaccagttggtaaaattatctataatatagtctgcatcatgagccatatcatcctttggtgaaatattcgatttcacataaaaggcatccatccggcattcctttgcacccttgatatcggtagtcgaatcatttcctataaaaagcgattttgatacgtcaatatcatgcttatttatcagctccttataaaatctgatatcaggctttttggtattataatcagatgagataaatacgtcatcaaacaaatcaaagatatcaagtcttctcatctcataggctgtaaatatacgctgcgcatttgaaagcagatatacattctttcccgccttcttaagttccttaagcatctcctttgtgcccggataaagctttatgtattcggtgctcatcaccctgaaaaactgacctgtatgcactgaaagctcctttgtcggattcacgcccttttcctcataaagcttttcaaatacatcctctatatgtatctccggtgatgcttcatgggcatatgagatggcaaactgcgcatctgaaacttcattttgcttttcaatgtccatatcttcaagtttcttcttaagctccgcttcgctgctctttacaagtgtctcatagcgctccttaagctcctttgtctcatacagtgctccgtaatagccatagaacatggcgagcttttcccagattgcagtgtcactctcatctgtgtgaatatccacgagcgtaccatagaggtcaaatatatagttatcatatgtaagtggaagtttcatgcttttttcctttcgacaatccaattatatcccttaccacccattgtaatatgctttgtggcttgggtgcaagtacttttccttcttttcaataatacgtggcataagccggtggtgggggcaggcggtgctgtcgtgctggctacgcttcgctgttaagtgtctgtacgaattatgcccacaggttttctatgcccgacgaaaccgtcgaaactcgccctccatggctcgatttctccttgcctcggcgtccatgcctcggcatttctgtgctttacagcataattctacagacactaaacagctgcgctattcgcccacccgacagtaccgcctgcccaaccaccggcttatgccacttacgctgagatataatgtgccggtcctcacctgcggttcggacggctcggcgctctcagcctttatgtgggaagctcccatcctacgatgcttcccacttgacacactttatttgccggaaggcatgcagtgtgttctgaagaaaattatgaactgccacgaggttccatattccctaataacaaaaaagccccggcatatccacaatctatccgcacatgagctcggggctgacttcataatttcctgaagaatatactacatgccaccctggcatcctctcagcctgcatgtgggaagctcaaaacctcctctgcttcccactcacatcatcgccctgcgaagcttcgccaatgtattcttctccattcgcgatatggccacctggttgcgtccaagcacttctgccacctgcttctgtgtcttatcctgcatatagcggagcataatcagtctgcgctcgctatcatccagtgagttaaacgcctgctgcattgcaatgtgatttatcactttatctgtctccgatggcttgtctgatgcttctgcactcattttattgtccaaataatcaagcacactttcattttctattgacgatgcatttttatcggcttccatggcaattattatatcctgttttgacatgccggaaataatttccatttttttaagtgatatttcactattttcactcattctgtatttttctctgataattgcaatttttcttgcatcatcctgtatttttcgactgatatgtaccattccatcatcacgtagaaagcgctgtatttcccctattatcaacggtactgcgtatgtagaaaaggcaaagcccttactttcatcaaatcgctgcgctgcctttgtcagcccaactgctcctatctgaaataaatcctcccggtcaacgcctctgtttctaaagcgtttcataactaaataaatcaggtttatattttctgtgacaagtctgctgattttgtcactcttcatagtacttttttcatctttactgttgttccgtgtcccggttctgatgtaactgtgagcgcgtccataaatgcttccatgaatgaaaaacccatgcctgatctgtcaagctgtggtttggatgtgtataacggttccattgcttttgccacatcctgtatgcctactccgctatctgatatttctatgtaaagctctctgcctatatagctgcaattcatatgtacctgtggacaacttttttcttctgctgcctggtgatctgcctgaccggatgaaatattgtcatcccccatctcatagccatggataattgcgtttgtcaccgcctctgacactgctgtctttacgtcctccacgtcatctagtgtggggtttaattgtgccataaacatggctgctgtcattctcgcaaatgcctcattctctgaaattgcatcaaagctaagcgatatatgatttgtttttgctgcgttcattatgctccctttctgtttgattatattttaattaattcagttttaaagcttatgtacaatagtgtaaatgccggcacatttcaaaagcttgtccactctgtccgacatattgcaaactgacaccgagctgtcattaaagtacttaagcttctttgttcttcctattatcaccccaatgccggagctgtccataaattctgtctgtttcatgtcaaatactatttttctgacaccacagccctctataagtgcatcaagctctgcgattatctgcccggcgcagtgatgatccacctcctttggcataaggtatgtcacccggtctgcttccttgatataattttctatcatgtcaaactcttcctttcctgctcatataaaaaagacaccggagattatctggtgtctttcgtaattctatatttaattattgcctcgcaacagttgttttactgctgttcctgtgccagataattctttgatgttctggccttctcagtgcctgcgtagttgtctaccacatactgataatatggctttgcagatgctaagtcacctgacttcctgaacgactgtgccaggtaatatgcagctgaaccatccctgtatgcctcatccatgccgacaagcttctggaatgtagggattgcactctgataatcgccactgctgtatgatgagtatgcctgactgtacagtgcttccttatatgaatctgcaattgaaccattgagcgtatcatatgtctgcttagccgagtcactcaggtagcttgtgttgatattttcaagtgcttctcctgcctttattacatcattggttgtatagtatacataggcattgagcaaagcctcatatgtggaaatctggtctgatactccatcatttttcttcttctcgtcctcaagctccttctttagcttgtctatctgatcattaagtccactgatggtctgcccatttgtggaaatcgtatcattggccgataataactgcttctttgcatctgttttcgcctggctttttatgcccggaaccacaaggaagcacgtaaccgccaccccgactaccagaccgattacaatatagagtatatttgcccacattgagctctccctgaatcgcttcggcataatgattgtttcatttccactctggtaggaaattaaatcatcatttttctttttcctctcagatcctttttccttgagacgtctgttcacttcttttaagtatctgagggtagtggtattgtctgtatctatcttgcctgcatcgcgtaaggctttctttgccttatccagatgcccctcctccagatataaaagagccaaaagctgatgtccctttacaagctttggatttaaggataacacctttcgaagctgtataaccgccaggtccttactgtcctgcttgcaataagttaaagcctgattatattttttaatagtctgattgattgtttcgagctgatttctgttattatgaatctgatctatatacttctttgccagattatcatcaggctgatagtttgcactgatgacccactcacttaaggcgtcaaccatctcacccatctcatagtatatgagacctaacagattccttgcctggatattgtacttataaaacttaagactctgcctgagagatataatcgctccggacagatttctcacctgtgccttttgtaaaccatcattgtagtatgagttggatattctaatagctcttttaaaaagtgaaagatcagccccacatacagggcatttatcgttccagcctgcatcttgtccgcatttataacaaatcatcttaaatcaccctgccttttgtcctgctcacgtaataactgtgcaatgatatctgtgacatctgtcagatcgtggctgtaaatcgcagattcagcctcctctatctctagacttggctcatagttctttatttcttcatcaaaatttatcataatcctgcctccataattacctgctaaataatcccatcaaaaaagggtcactatatattataataaagtaacccctttatgcaagtatatttccattaagatttaataaaaatatcgcaatttttttatttcatcgacagcatcacgactgccttgtccttctccttgaactcaatcttgtcgaattcctccttggtgacgagctttgagttgttaatacacacctcgacatttggatatacatgctccaaaacctgtactgtcgcgcctgtcgagcgctccactatgcccttaagccgctccagctcctccttatcttcggtaagctctgctgttttctcaatttttgccctgacaagcgcaagcttcttttcctcaagattcataccgtcagcggcactgcccatcatctgttctatctgctttatgcctgcattgatattgttaagcagcatctgcttttgatcaacaagcttttcaagctctgctatctttatcttaatctttttatgcacgcccacatgcacctcagtcttgataaaggcatcattacccaggttttgcacctcaatgcctgcacagccatatacttttccaccgactatgcttgcatgtccaccattgaagattaccttatcattgctgaccacattgcagttgattgcagaatcagcctccacaaagccatctacctccacatcggtatactccatgaacttggcaaacagattgccctttacaataatccgggcctttcccataccaatcatgcccttcctaagaatcaggtcattgccggcctcaagcacacagccctcgcaaacaccatctatcgtgatggactttgcagcccttattctggctccggtcttcacactgccatgtatgaccacgtccccgacaaaatctatatttcctgttcccacatccacatcaccgtttatttcaagaataggaagaataatgattctgttcttgtgcctttcaattttaccatcgatagcagctgtatatgtaagtccatccacagatttgtcaaagccgcgccccacaagcggtggcagtcccttgcctttctttgcggcaattaccttgccaagcacatcaataccatcctcgcctgcaacaggctcacaatagtttgcaatcgtctggccttttttgaccacctcaaccgagtgcacactccagtaatccactgagccatcgctcttaaccgttgggcggtggttcaagtcactgttgaagtaaaaatcaaaatatccatcagccccgtcaacagccggctttccctttgcaaaaagcacttccctacccataagtcttttttctatcatatctgaaatgatctcgcaattgatgccgtatatcacaccattgcgatttacagcttcaagcacctcatccactgtatagtagtattcttcttcaacagtgggcagcatgataaatgcctccatcctgtcgctgcttattctgataactggctctctctttataccggtatcatccatattttttcctcactatatatcggtctttttgttcctgctaaagtataactatcatgctatttctttaataaatgcatttatgtattattctcactttcactcattatatcatcatttgaattttaaaaaaagccactaaatataaaaaatccgggcaatatcattctattgatactatgcccggatttttctgcaatctgaatcttttacggaatttgagtagattccgacacttattttatgcagttctatctttatgagatttcatcaacatcataatacttaaaatcccggaagcaggcacttcctcctgtttcctctgccgcatagcagaacagaccaaaccggcaaccagtaaaatgatccagtttgaagtacagcttatgcacggttccgatgggtagccagtctcccttatttacccggtaatagcagcgtgcttcatccttcatgttacagaaatctgcttcaagacgaaaatccatctggtgtgattcaacaacagttccttccgtcatatccaatataccatcttcttttttatccagcataaggacttcatattttccatgatgttttgtaatgccaactgcagcataacaaccctgcaacgcacacaaacctgcgacatcgccctctttcaatgcagaagcatcaacagtaacctcagctgcgcaggacggataactcatcctttgcgtaagcgtatttactgcctgtgtaagctctgtacaaacttcccgtgttgtaattgtataggttccctgcaatgcatccagatgatagtaccgtggatctggatcatgattaaactgccagcgcggaagcagcccattacggaaatcatcacttcccactaatggctgataaatatatcctggtctggtactgtgaacctctatttcttccggcacatgtccgttctgtccaaaaaccggaaaatgatccttccaggtaaccggaatcagaataggaatccgtccaactgctccggaatcctgaaacagcattgcataccactttccatccggcgtatccactattcctccctgtgccacgccctgtccacaatatccacgatcatcacaaagtacatctccccccgtgaattctccttccagagaatcactgtaaaagcatgcttccgtccgcatccagcggtctctcagggaatgaaccagaaaaatataataatagccgtttattttttgaatatgagaaccctcatagcctagctccgggttcttatgatcactgactaaaagacgatgtaatccgtccttccttggtgcagtcaaatcttcattcaattctgtaatccagatttcatcatttccatatacaatatagtttctgccatcctcatcaaataataaagagccgtcatgataaaagccttctatcagctgctttttccatggaccatctattttttccgaagtatacaaataagtcttacgggtatcatttgccacaaagcagatataaaatcggccttcatgatagcgcagggaagctgcccacatgccctgtccgtaaatattctgaccgcttttcagttgctgcgcatccgtatgttccaacgtctcatagacataagtcacatgctcccagtgcaccagatcaaaagactgcagaatctcacagcccggcataaagtgcatggttgtggataccatataataggtgtcttctacgcggatcacatccggatctggataatccaatcttgttataggatttacattcattgtttattcctttctgttttatctccatattctttctttgttctattcaagaaccaccgcattgtggacggcctcctttgcatcctttccccaggaaaacagtgttcacaaaatataatctgtatttaattatttaaactgagccagacgttcctctacctgagccatcatctgctcatactttgcaagcttgtccttttcctcctgaaccttttcaggctttgcattgtttaagaatttctcatttgagagcatgccccttgagcgcgcaagctcctttgtaagcttatccttttctttattgagtctttccttttccttctcgaaatcaacaaggtcctcaagcggcaggtatgcaaccgcatcaggtatcactactgatacagcgtcatcaccgataccggccttgccctgctgtactgtaatctcgctggtaaatgcaagatttacatatacctccttgttgtcctcgaatatctttctgactgcctcatcgtcacttgtgatgaaaagctttgcctttcttgaaggtggaacatccatctgtgtacggacatttctgataccctttacgagatccttgcagtgctcgattgcagcttcctctgccgggaaattccactcttttttgtactcaggccatttagagagcatgatagtctcctcgtctgactgaagtgtgcagaagatttcctctgtgataaacggcatatatggatgaaggagcttcagtgcatttacaagtactgtcttaagcgtccagagtgctgcatttgctgactcagggttttcatccttcttgtaggtacgaacctttgcaatctcgatataccagtcacagaactcatcccagatgaagtcgtataccttttgtactgcgattccaagctcgaacttgtccatgttttctgtggcatcctttgcaagagtatttacccttgaaagaatccacttgtctgctgcatgaagctcatcaagctttggctctctaagctctacaccttcaaggttcatcatgataaatcttgatgcattccataccttgttggcgaagtttcttgaagcctcaactctctcccagtagaaacgcatgtcatttcccggtgcatttcctgtgataagtgtcagacgaagtgcatctgcaccatacttgtcgataacctcaagcggatcaattccgtttccgagtgatttactcatcttgcggccctgtgaatctcttacgagtccgtggaaaagcactgtgtggaatggtgccttgcccatctgctcatagcctgagaaaatcattctgattacccagaagaaaatgatatcgtagcctgttacgagcacatcgtttggatagaaatagtccagatcctctgtcttttcaggccagccgagtgttgagaatggccagagcgctgatgagaaccatgtatcaagtgtatcaggatcctgtgtccagtgctccttgccacacttaggacatttgcccggcttttctattgaaactaccatctctccacagtcatcacagtaccatgcaggtattctgtgtccccaccagagctgacggctgatgcaccagtcgcggatattgtctgtccagttgaagtatgtcttgtccattcttgaaggaagaagcttgatttctccgttctttactccctcaactgcaggcttgatcatctcgtccatcttgacgaaccactgctgcttgatcattggctcaactgttgtgtgacagcggtcatgcacacctacgttgtgtgagtgtggtacaacctttactaaaaggccctgctccttaagatcctcaaccagtgcctttctgcactcgtatctgtccattccggcatattttccggctttttcattcattgtggcatcatcattgattacaacgatttcctctaagctgtggcgttttcctacttcgaaatcgttagggtcgtgtgcaggtgtaatctttacacagcctgttccaaactctttatctacgtatgaatctgcgattaccggaatctccctgtctgtgcatggaagcttcaaggtctttccgatgatatcctgataacgctcatcatcagggtttacagctacggctgtatctccgaaaagtgtctcaggacgtgttgttgctatctctacaaatctgccttcctcgccaactacaggatagttgatgtgccagaagaagccatcctgctcctcatgctctacctctgcatctgaaatagatgtcttacataccggacaccagtttacgattcttgagcccttataaatccagcccttcttataaagctttgtaaatacctcctgtactgcgtgtgagcatccctcatccatggtaaatctctcacgctgccagtctgctgatgatccaagcttacgaagctgctttacgatacgtccgccgtactcttttctccagtcccagcatttctccaggaactcttctcttgtaaggtctgccttgttgattccctgctccttaagtgcctggatgacctttacctctgttgcgatggatgcgtggtctgttcccggttgccagagtgcattgtagccctgcattctcttgtatctgataaggatatcctgcatggtgttgtcaagggcatgtcccatgtgcagctgtcctgtgatgtttggtggtggcatcacgattgtgaatggttttttgctgcggtctacctctgcatggaagtagccattgtcttcccactttttgtaaagacggtcctcgatgtcctttggatcgtaggttttgtttagttctttgctcatgttttcctccttttatatgaatgacgcaaaagctttgggggctttgttgtgtcaggtcgcgcattatgtatggaattatgttcatgattacgctgccaagacactgtaaaaattatgattagggattgcttagaccatgacgcaaccggcttttagcgccgtccatggcgctaacgcctcgcccgcacgtccatgtacgtgcgttgctgggctgtgtacataattttaacagtctctaggcagctccataaatcacataattccatacataatgcgcggcctgataattcaggctgtgagcttttgctgtttttcttttcatttagctatgggcgaccgattggattgcatgcgcaatcttccggtctgggtacataaaaagaccctcccgatcattgaccggaagggcgaattagcgctgtaccaccttcgtttacatcggagcatatatatgcatataaactcgaatgcctcttgtcctgtaacgtggacgaatcggaagaacttatgccgcttgcggctttctgggttcttcagctcaaaagctaccttccatgatttctgtcttaagcacctttcagcctgcccaaaatgtatcaccatcttacggaccggatgctctctctgaaagctttcgtcatgtactcctctttcttatgcctttaaatatttgcctgtttctttctacaatattaaagtgcattgggtgatttgtcaatatgatttttcaatcatcataatgacctttacatgaaacaatataaattatctcatctttttcataataaacaattcgattagtgtcatcaatgcgtctgctccacataccactaagattttcctttaatggttccggtttacctataccctcaaacgtacttcgctgaatatccttgataagtccattaattcttttcagtgttttcttatcctgcgtctgccagtataaataatcgctccatgccctatcttcccatagtaacctcattagtcctcctctatcaaatcatgctctgcgaagtgagctttgccatccttaatatcgcgcacgatattttccaaataacggatattgctatcagaataaaacggatctaccgatacctcaaaaggaatacgcttttctctgcctactttttttgcaaaaacggtgaacgctgcactcatagaaagacctaattccgaacacacctgttccatgcttttttttacatctgcatccaatttaaaattaacattaactgactgtgacatatacaacactcctttcttgcttatagtatatgcaacagcaaagaaaatatcaataagatttctttattttttctttacttatattcaacattcttagttgcgactatatccacactggttgctgcaacatcgcttagcagtacatcacctatatgcaccggtgcctctaccgtgatttggttgatacactccatcacatccattatcttttcctttggaatatcctgtgccgtctttacggataccatcggtattgtgccatttttcacacagactgtacttgtcacaattcgtgtcggatgtgtcacttcctttgctccgtagtctgctccgcgcttgcaggtatttccggttactgtgacattttctccatctattgtcaccttaagagcacagcccagagggcagcctatacatgtcaaatttctttcttccatgatactatgcctcctcaatctttatcgtaattgtgcggggattgtctgtttcgatgagctccttcttcttaagcactacctgctccatctcacccggtgccataacaggacgcttacggtgctgcagctgtttatcatccagatatactgcaatatagcaattcttatacacggctcccactcgaaaccttaccgtcacagtatcatccatttgtgcagtatttatagtacttggaacagtgtatcgtactccgcctgtagcggttatcgatatttctttgccatcgcaactcttatcaccgccattttttacatactctgcggcatggcggcctgctgctgtcgcttcctctgacacataatccacgaggtcatgcacatgaagcacatttccgcaggcaaatacaccgggcacatttgtctcaaggctttcgtttacgaccggtccgcttgttaccggattgagctctacacctgctatttttgaaatctcattttccggaatgagtccgcacgagagtaaaagcgtatcgcactcgtaaaactcctccgttccctcaataggcttgttgtgctcgtccacctgtgcgagagtgataccctcaacacgctccctgccctttatatcaaccactgtgtggctgagcttaagcggaattccaaaatcatcaaggcactgcacaatattacgcttcaagcctcccgaatacggcatgagctctgcaaccacctgcaccttggcaccctccaaggtcattctcctagccatgataagaccgatatctcctgagccaagtattactacctttcgtcccggcatgtatccctctatattcaccagtctctgagctgtgcccgccgagaaaattcctgccggtctgtagccgggtatgttaagagcacctcttgctctctccctgcagcccatcgcaagtattacggtctttgcagcgatatggaaaagtccgtcggtgcggttcatagctgtaactattttatcgtttgcctcatcttttatctttacatcatgcctgccatccgctctgttttcgaactcgtcacctgtcgagatgtccatgaccatcgtattgagcctgtactctatgccaagctctttgacctctttgataaatctgccggcatattcagggcctgtgagttcctccttaaaggtgtgcaggccaaagccgttgtgtatacactgatttaagataccgccaagctcacagtctctttccagtataagtattttatctattttatttttcttagcggaagctgctgccgcaagacctgccgggccgcctcctactatcacaatatcgtaaaattccatattgtccccctatgttaagctgatattaatccaatatcaagctatcgtcacctgtctcttggaaataagacagactatccgcgattcctgctcattccaacaactatctttgactttccaccgcttttagtgatgtcaagctgcgaaattcccttctctctggcgataatctccatagttctcggagaacaaaagcccgcctgacatctgcccattccggctctggtgcgtctcttcacgccatcaagtgactttgcgcccagtggtctgtttaccgcatccattatctcgccctccgtaatcatctcacagcgacagattatattgccatactcaggcttttcttttatcagctttttatactcatcctctgaaagcttctttggatttaaaataccttttcttatctcgatgaaatccgcatttttagaaggattaaaaagtccctcaactattgctgccactctctcaccgatagccggcgcacttgataagcccggtgactctatacctgcgcagtcaataaaatacggtgcgtcagaaagctcctcgatgataaactcatgtccgtcctcatgtgcacggtttcccgcaaacgaggttatgacctgacgcataggaagtgacggcaccgaacgtgtgccggatgtcacaacatgctctaagcctgctctcgttgtatttgtaccatccttgtcctcatggtcatctgctgtaggtccgattaaaatatttccgtgtactgtcggagttacgagcacacctttgccgtatttgcccggaagctgaaaaatagtcttgtcaacgatacctcccgcagccctgtctaaaagctcgtactctccgcgccttggtgtaatatgtattttgttttcacttaccatgttgtggaacacatcagcatatacaccggctgcattcacaacgcagcgtgcatgaatttcacctttttgagtgatgagaatatagcctgtccgctccttttgtatcgccttcacctcggtgttaaataagaactccacaccgtttgctgccgcattctcagcaaatgcgatattcatgccaaacggacatacaatgcctcctgtcgggcagtaaatagctgccacaacttcatcagacagattcggctccatctcatgcgcttcgcctgaatcaagaatttcaagtcccggcaccccgtttgcaatcccctgattataaagctccttaagccttggcatatcgtcatcgctaaaacacactatcagtgaaccgtttcttctaaactcaaaatcaagcttcttcgaaagctcatccatcatctcatttccacggagattcatctgtgccataagtgtaccggtcttacaatcaattccggaatggacaatagcactgtttgcctttgaggtgccacagcacacgtcctcctccttttccaccacacaaatggacaggttatatttcgaaagctctctggcacaggcgcttcccgatactcccgctcctataattactacatcatacatgttattttctcctaccaatttccatgcattgtttaattgccgtatcactaagctcatttaaaacaatgcaagcataagctattattcatccttcgcccagttaaatgcgcaggcgacagcctttttccacattttaagcttcttttctctcaaatcagccgctatctccggctcaaacacacggtcaatagaccagtttctctttatatcatccatgctttcccagtagcccaccgcaagccctgcgaggtacgctgcgcccatggctgttgtctccacgcacacaggcctgttgaccggtgcattgctgatatcagcctgcatctgcatgagcagattattggcactggcgccgccgtccaccttaagtgatgtgagattgatgcccgaatcagccttcattgcctcaagcacatcatttacctgaaatgccattgattccagagtcgctcttataacatggtacttgtttacacctctcgtaagccccacaatggttcctctggcatactggtcccagtacggtgctccaagccctgtaaatgccggcaccacgtagcagccgtttgtgtcttttacctttctcgccatgtattctgaatctgttgaagaatcgataaatttcatctcatcgcgtagccactggatagaggctcctgccacaaatattgatccctccagcgcatataccaccttgccgtctatgccccaggctatagtggtaacaagtccgttctttgaggataccggcatctcacctgtattcatgagaaggaaacagcctgtaccgtatgtattttttgcttctcctgccctaaagcaggtctggccaaaaagcgcagcctgctggtctcctgccgctcctgcgataggaatcggaccgccgaaaaacacaggattcacctcaccatacacacagcttgacggcataggctttggaagcatgctctttggtatgtcaagctccttaagtatctcatcatcccactttaaggtattgatattaaacatcatggttcttgatgcattggaataatccgtaacatgcacctgcccctgagtgagcttccatataagccacgtctcgactgttccaaacaaaagctcgcctctttcggctctctccctcgctcccggcacattgtcaaggagccacttgagcttagttgccgaaaaataagcatctatcacaagccctgtcttttttctgaaggtctcggtaagccccttttccttcagtgaatccgcatactctgccgtgcgtctgcactgccatactatcgcgtgataaaccggctcaccggtatttttgtcccatacaattgtggtctctctctggttagtaatgcctatcgcacatatgtcggctaccgtagcctgaatattggccatagcctcctttgccacctcaagctgtgtggcccagatttcctctgcatcatgctccacccagcccggctttggaaaaaactgcgtaaattccttctgtgccacactgcacatctcgcccttctcattgaaaagtatacatctgttgctggtcgtgcccgcatctaatgccataatatactttgccatgtaaaaatcctccaactctctatatttccagcttttttccttctatcctgctacaattcttcctctaccatgctcttctctctgttgaacgcatcatagatacatggaattactataagcgtaaggatggttccgtatacgagacctcctattattgcgattgccatcggcctaatcatatctgagccatctccgatacctatcgccgatgtaaacattgcgagtatggtggtcatcgctgtcatcagtattggacgaagccttgtacggcctgcgtctatgattgcctcatgcttgctcatgccctctctcctggcctgattgatgtaatcaatgagcacgattccattatttacaatgagacctgccagcatgataaagccaagcattgaaatgattccgagctcatttcccgtgatgaaaagagctataaatcctcctgtaaacgcaagaggtatacagaacatgataataaacggtgaaagcaatgactggaactgcgccaccatgataagatagataaatatcactgcaagcacaagcataagtccaagctgactcattgactcatttattgtctcatcctcaccctccatgtctattgaatagccatcaggaatgctaagtttatcaatttttgatttaattttattgcttagtaatgttacattatggttttcatcaaccgcacctgatactgtaatatatcttgtctgagcatctcgatgaatggtactcagtgtctgttcctgcgaaatagtgcagatatcactgagcggaatctccttttcactgtcatcattatccttataggtaaatgtaaggtttttgatgtcgtccacagtcacatcagactgctctgcggattgtaagtatacctcatagtcctttatgtcagtcgtaatggttgttgcgctcttttgagatgatatctcaccggatacgagctggtatacctgagccaccgtatagccatactttgctgctttttccttatcaacagttatcttaagctcattggttgtatcgccaagaccgtcatctatatctgtcacgccctttgtatccttaaggatatctgccacatcacctgcaagcttctgcagcttgtctatatcattacccttaatcctgacagagagaccacttccgaaaaactctgatgagtccatagcttgtgaagatgctgttaccttgcagtccagattctttgtgcgtttttcaatttcatctattaccttatccgatgaaacatccgacttctcatcaagcaatatatacatgctcacactgttgcttcctgagctcatcaggttcatggtcgagctgccgcctgctgtagctcctattgtgtctatgccctttatatcagatattttgtccataaccttatcagacagctctgtaagctgcttgaagtcaagcttttcgtcatcctttgcctctatggtaagtgaaatctgatttgactccatgtccatatccataaatgtcattccccttgacatgcaaagtgcgccactgccgactaaaagcactactgccgcaataaataccaccggcttaaatctaagacatataccgagcacatttccataccagtccttaaaacggtcaaaccatggatgctttatatccttcgtctttttgagcatgcctgaagcaattgccggtacaaatgtgagtgccactacaagagatgccataagagtaaatgctaccgtaagtgccaggtctacaaagagctgtctcgtgattccatcagtaaaaatgattggcgcgtacacacttaccgtggtaagtgtagaggcaaaaatggctcctgccacctgatttgccccctcaacagccgccttctttaccgaatatccctctccccttaatctgtagatattctcgattactacgattgaattatccaccagcattcctattccaagcacaagtcccgacatagaaatgatatttaaggtgatatccgtaaaatacataagcaccactgccacaataaccgatagcggtatagatgctgcgataacaagcgttggctttatatcctttaagaacaaaagcaatacgaaaatagcaagtattgctcccactatcatattttccataacactctttactaccatgtcgatgtatacgccctgattcatgagcactgtggtgtgtaatccgtcattttccttttccagcgaatcaagcttgtccaaaagacggtctgtgacgtctcctgtagagtagccggtctgcttctccatggagagcattattccgggattaccgttgactatcgcatatgtctcatccgaattgtcagtcatctcaacatctgccacatcaccgacatgaataggagctattccatcaagcttcatatccataagcactagatttgttaaatcatcaattgattttatctcatctcccacctgtactatgtactgcgtgccatttgaatcatttacatagcctgcaggcatatcaaagttctgtgcgacgagcagctgcgagagtgagtcaattgttaaaactgcatttaagtttgacttgtcaagtgcatcatccttactcttttcaagctccttttttgagctgtcaagagatgccgctgctgttgcaagctgtgccgactgctgtcctatgcttatcgagctgatggctgcctgactgtttagattatcataggcatctaaaagtgctgtctctccttgtgctatccggtcaagcccgctttggcactgctctatacctgtattcacctgaatgagagtctgtgctatcgctgacgctgccgcaggcagatcatctgctgtgtttacggtgattccaagcgccgagagacctgaaaactgtgttgcaatctgcttatcaacctgctcaagttgcgctttgagtgctgtgcccgcttcacccggtacatttgcgccctctttgagtgacggaattgtctttgtatatgtatcactattcatgaagtctgaaagagctgactgaattgtttcaagctggctcttctgctcatttaagcttgcaagagtactctctagctgagtcttctgctctgcaagctttgccttttgctcctttagcgtatccactcccgcgctcatctgatccgatgcagatgtgattgcgttttgtccgctctctatctttgcgcttgcatcatccatctgactttttgcatcgtcaaatttctttgaaacggcattatttattttctcattgagcgcatctatcttggcctgattcatcgtgacctgtatctgctcggtgagctcacctgtcgcagtcactgatgcgactccctctgtactctcaattgcaggcttaagtgtgttttccacaaagtctgtgatttccgacttgcttttcccatccatatccacagcagtcatcatgattggaagcatgtccggatttatcttcataatggtcggagtacccactccatccttccagccagccttgacctgatctattttctgctgcatctctatcactacagaatccatgttggcattctgctcatactcgcatgtcaccagcgaatagctgttatatgacattgagcttacgtttttgatatttgacgtagttgccatagctgcttcaagcggcgcggtgacatcgctctccacctcctgtggacttgctcccatatctgttgtcacgataagtgcatactgaaagctcatatccggcagcagatctgtcgtcatcctgctaagtgatacaacaccgagtactattaccagcagtactcctacaagtacagtaaaaggcttttttacactatatcttgatatcatctgacccctcctttttcttttctttgataatgtcctgcattagtttgatagacattgtgattactacgattttcacaataaatttaattcgctgttatacttttattatacaatgtggcggattgcaactcaattggtttatacttttttaagagattttgacaataaaaagacacccgattatacgattaatataatccgatgtccttaaatgtccttaaatgtcctttaatgtcttttatttattttagcttcaaatgccctcttcctcaatctcatcctcatcatcattgatacctgcaacagcacttgtaacggctccgattacagcgacaagcgcaaagatgataactaaaaaaataactataaagaatgctactaaaaaacctgtatctgtcatataatttacccccatagctgtctcacagcttctttaaaatatagttttagtttaacacacttgtctgtaaataacaatatcgtatggggctaaattattgactaaatattgactaaaatattgatttatgaaattgatcagtccttgatctgcataccgtttgcatccatatgatagccttctgtcatgatcagctttgataccggaactatctcatagcccatgtcctgcagcttcgtgagcatctcatcgagtgcctgcgaggtgtatttggcgcctagatggcagagtattatcgagccacaatccaggcttttgtgattgcacactgtatctatgatgttttgcacaccatagtttttccagtcgagcgaatccacatcccactggattggataatagtcacagccatacactgtgtcaatcagttcattgttgtacgagccgtatggcggtctgaataccttcatatcctttcctgtcagctccttgacctttttgtgcacatccattatctctgtcttcatctcgcctgccgtgattgttgccatatcatagtggtgctcactgtgatttccgggctcatgccctttttcaaccagcgtctttacatattcagggttatcactcacaaaccctcctgtcataaaaaatgtagcctttacgttgtgcttgtcaagtgtctccatcatactgtcaaaatcctctgctccccaggcacagtcaaatgaaagggctatctttttttctgttgtctgaaccgaatatacaggcagctttctgtccccgaactgactcacagcactgctaagtgtctccatcacctctatatttttcagctgtgatatgtcatactctctgccatataaagcgcctgtaataagaagcgccgacagcagcactccaaaaaggaatctgtgtcggcgtttctttcgttttgtcccattatgtagtttcgtattttgcatgtatgctctgtattcactcatgctatatactattctttattatcacaaaatatgaataatgaaataactctatttcagttcttctgcccttccgataaactcaagcactacctcaatcgactgatgtgcagccttctccgcaaaggtctggtagtctgtctcgccgccgtcgccgtctgatattgaacgaagaatggcaaatggcaccttgttcacatagcacacatgaccgatgctgccgccctccatctctgctgcgattgcatcaaaggtattcgaaatataatccttctgctcctttgtggcaataaactgatctcctgttgcgatattgccctttttgtagtggatattcctgtcagctaagcatgaacacataagctccaccatttttgtatctgccggaagcagaatcatattgatgcctgaaagaagtcccttcggatctccgattggcgatgtatccatatcgtgctgcagcacgtttgtggctactgccacgtcaagcacatttaagtcctttgtcaaagtaccagccactccgatattgacaatcatgtcgacatcatatttcaaaatcatggcctctgcacatattgccgcaaatacctttcctattccgcattttgccgcaacaacatactgatcaccgattttgccctcaacaaactccactccgctgtaaacctctgtctgtgtgtctgtcatctgagcctttaagtcatcgacctccatctgcattgcaccaattacacctattgtcattttatttctccattctgtttattgtgggtaagtaaactccatatttgtctggctctcaagcaccttaagatatgcacagcactccttttttgcctcgtcaagtgacagattctcgtaatgtccgcactctatggctgatgcaccaaacaccggtccatcatactctagtatctgctttaagacctctttggtgatttcaaaaacctttcccggctcgacatccctcacaacgagatagaagcctgtctgacagcccatcggtccaaaatataccacatcatctgcaatctcagagtttctcacacatgttgcaaacatatgctccactgagtgcatagccgaattggacatataatcgcctgcatttggttttcttgtacgaaggtcgtatgtaacgatttctccgtcttttcttgaaatataaaatccaggtttaagaatattatgattaattgtaaagcttttaattctttccataaaaatgtttctccttacttagttgctgtctcaaactgcttcagataatcctcaaatacattgagtgcatcatccacaggctttggtgtgctcatatcaacaccggcactctttagcagctcgattggattcttcgagcatccaccgcacaggaaatttcctatatacttatccacagcaggctttccctcctcaagtatcttttttgaaaaagcaactgctgccgaatagcctgtcgaatactgatatacatagtacggtgtgtaaaaatgcggtatgcgcatccactcatatgatatctcatcatccacgcgcatatccggtccgtagtactgcacattcagctcatgccatagctcatttagcacatcctttgtaaccggctcgcccttttgcattttccggtgagctatatgctcaaactctgcaaactgcgcctgcctgaaaagtgtcgtcctgaagccgtccagaaaatgtgtcatgagatattttctctcattctcatcctcacaatgctcaagcatatagtgcattagaagcgactcattgcaggtggatgcaacctctgccacgaaaatcaggtatcctgcgtaggtgatgctctgatgctcatttgaataatatgtatgcatcgcatgtcccatctcatgagccagcgtaaacacactgtccagattgtcggcatagttcaaaagcacatacggatgagtgccgtaagcgccccatgaatacgcaccgcttctcttgttctcattctcatatacatctatccagccactctccatgccagccttaagtgtgctgacatactcatcgcccataggctcaagcgcctttgccacaagctttttcgcctcatcataggtgtaggtggtctgtacattgtccacaatcggtgcaaacaaatcatacatatgcagatgctccacacctaaaagcttcttcctaagcgccatgtacctgtgcagagccggcagatgtgcatgaaccgtctcgatcagattgtcatatacactctcaggaatatcgccatcggataaatacatggcccttgcgctgtcatattttcttacccttgcataaaaagtgtcatttttcagcttgctgatgtacatcatggaaacagtattgctccacttcttgtacgaatcatacactccacggaacacctgcttacgcaggcttctgtccttgctgcttaaaaaatctatgaaattgccgtgcgtgatacggattttatttccctcgacatcagtgatatacgggaatttgatatctgcgttgttgaacatgctgaatatattctccggtgctgcagccatctcaccgcactgcgccaggatattctcctctgcagccgataaggtatgctctttctgacgcattatctcatcaatcgcacgcttatagtgcataagctcattgctctcactgtaaaagctctcaagccttttatcatctatctgcaaaatctccggactcgcaaatgccagcgcacctgatgcctgaacagtcagtgtctctgcctttgacacatatgcctgatatttcgacacggcagtgtcctgatgcgaacgctcattcgcatagaccactatacgctccaaataataagacaactcatcctgcttcttaaaaaaatcaagcagcgttgctgcactgtcggccagatgtcccttaaatccggatagcttttctgcaagctgtgacgctttttcacactcagcctcccacagctcatctgtcttatacatatcctcaagcttccatttgtactcgtctgagatttcatctctcttttgaagccttttctcactcattttgtgttaccttctatcttacttttcttgttctcgggggttctgaatagttaccttgttttcaactcttcagaaccaccccgcgcacattcgcaaaaccgcacgatgttttttataaaactacccacacatctgctctgcaaaatgcatatagacgtgtgggatatgtgtgaattataacaattaagctctactttgtaattaaagtgcccataccacctgaaactgtcttgccctctttgttgagctttgtgataagcactgaacggatggcagagtcaccgataaagtcgatagccgcctcaatctttggagccatggtaccctcatcaaactcgcctgctgcaaggtacttctttgcctcatcaacagtcatggtatcaagtggcttctcatcctccttgccatagttcaggcagaccttgtcaacgcttgtaagtataacaagtctgtcagcatcaagagtatctgcaagctttcctgctgcaagatccttctcgataacagcactggcgccctgaagcttattatcctgtgctaaaacagggattccgccgccaccacatgcgataacaacctgatccgcatcaacaagagccttaatagcatccttttccactatatcaacaggctttggagctgccacaactcttctgtagcctccctcaacctgtgtcacatggttgcccttcttctcttcttcctcagcctcagcctctgtcataacacggccgatgatctttgtcggatgataaaaagcctcatcatacgggtcaacaaccacctgtgtaagtattgtagaaaccgtcttgtaaatacccctgccaagaagctctgtacggatagcattctgtaaatcatatcctatatagccctggctcattgcagaacagactgctgtaggtgtagctgtatactcaggataaatcctgcaaaactcagacatagcggtgtgaatcatgcccacctgtggtccgttgctgtgagtgatgacaacctcataatcgtccctgataaaatctgcaactgcctttgctgtatgctttgtagcctcgtgctgctccggaagagttgttccaagagcatcatgtccgagtgcgataactatttttttcttcttcatgccgacctcctatgctgcatccgctcaatgtgtattatatctcataatcataaaccgatgtgtatactatgataaatctacctataaaccatcaattttgaagaattcctatgcggtgcaaaagtaaaattatttatatacattatctaatattttagggaatttgtctagtactttgaactgatttgaacaacatttccgcca

SEQ ID NO: 1439 - DNA, 8196 bp, Unknown
  gut microbiota DNA sequence
atgaggatattaagtaaagagatatttccaaaatgtaattagagtttggaaatatctctttttttaatcctcgaatatttatattcttggtattaaggtgtacaatattccacctgaaatagctggtttagtcactcttacaaatgattcacttacagtacaatgaatacagcttaagcaaatatataaggtgccggaaaagagtggaaggtgtactacgatattgttaatagtggagaaagaataaaagagttgcgtgcggcaagaagaatgacaagacagcagcttgccgagcagattggattgtcagtggatgctctgcggaaaattgaagctggtgtaaatggagcaaaaatagatactttgattagtattgctgaattgtttcatatatcgttgagggtgtacttgcacctatgcaaaaacaggaagaattaactgtattatagttaaggatttatcgagacttggcagaaattatgttgagatggggaactacattgaaagagtgtttccttttctcaatgtaagattcattgctgttacggatgattttgactcgttcagaccgggcacagaccttatgatgcctttgaaaaatatcgtaaatgagttttatgcaaaggatatacatcaattgccaagctcaactcctttatctgatacattcaagcaatctccgtatttcttaaccttattcataacatcagcacttttaaaatttcctatttttccattatgagtaaattttacaataccatctggagagacttgagcatatttatctacattgtactgcaatgaattgtaatagcctcgtggtcaaactcattctacatcagaaagccctgtactatttcttttttatgaaaaaagttgcaaagtgcttgtagaaagataaaaggtatgattactttgctttgctgcagagtaagagcgtacacaaatgaacatccagtcacagcgtaagaaaaccgggagaccgtgaatgtgccatcccccggctgcgttcacggtctcccggttttcgtagttagtcaagtgaattaagcagtctttccggtataaagctgataatactttcccttctttgaaatcagctcatcatgacttcccctttcaataatgcgtccctgctccaaaaccataatgcagtcgctgtttctgacagtagaaagcctgtgtgcgataacaaatgtagtacggccatgcatgagcttatccatgccgtcttgaacaatacgctcggtacgtgtatcaattgagcttgtagcctcatcgaggatgagcacaggcggatcggcgatagcggcacgcgcaatggctagaagctggcgctggccctggcttaggtttgcaccgtcacctgtcagtacagtattgtagccgtcaggaagctggcggataaaagtatcggcgtttgccaggcgggcagctgcgtatacttcatcatctgtggcatcaagcttgccgtagcggatgttttccatgacagtagctgtgaaaaggtgggtatcctgcaaaacaatgccaagagagtggcgcagatcagcctttttaattttgtttatattgatgccgtcatatcttatcttgccgtctgctatatcgtagaagcggttgataaggttagtgatggtagtctttccagctccggtggtgccgacaaaggcaatcttctgaccgggtgttgcaaaaagatccacgtcgtgcagcacaattttctcaggcacatatccgaaatccacatcatcaaataccacatcgccctcgagctttttgtaatccacagagccgtcagcctgatgagtatgcttccatgcccataagccggtgcgctcaggggtttcagtgagctttccgttttcttctttagcatttacaagtgtgacatagccctcgtcagtctcaggcgcttcgtcgagcagtgagaagatacggtcgcatccggcaagtgccatgatgatactgttgaactgctggctgacctgcgagataggcatgttaaagctcttgttaaaggtcagaaagctcgcaagcttgccaagggtcagaccgccaaagcctgaaagagccataacaccgccggcaagagcgcagagcacgtagcttagatttccaatctgtgcgtttacaggaccgagcatgttggagtacatgttggcattgtaagcgctttcaaagagttcatcgtttattttgtcgaaggcttcaatattttcctgctcgtgggtaaataccttgactaccttctgaccgttgagcatttcctcgatgaagccgttaaccttgccgaggtcgcgctgctgtgcaaggaaatagcgacttgagaagcctgcaaatttctttgtcacgactgttgttacgattaccatcacgatagttagcacggtgagaggaatatttagtatgaccattgaaacaaaaacgctcacaacagtgattgcactgttaagtatctgcggaagactctggctgatgagctggcggagtgtatcgatatcgtttgtataaatcgacatgatatcgccgtgcgcatgtgagtcgaagtaccggattggcagatcctgcatatgggaaaagagctcaacacgcaggttcttaatggtgccctgtgatacgtagatcattattttgctgtatgcaaacgtactgatgacgccgatgccgtagaatacggcgacctttcccattgctgcaaggagtggtccgtagtcgggcgttcctgtcttaagcagtggaactatatagtcgtcaatcagatttttggtaaacatggttccctgcacatttgcaagtacactgacaaagatacatatcacaacaattatgcaggcaggtaaatatttcttgaaaataaatcccatgaggcgcgcaaaaagcttaccgggatttttaattttgggttttggaccttgtggtcctcttggtcctggcatcaggcagcacctccttcatcaaagtctcctccgccgtttgtctgggaatcgtagacatcgcggtagatttcattatttttaagcagattttcgtgagtgtcaaagccgtccacttttccgttattcatcacgatgatacggtcagcatccatgactgatgagatacgctgtgcgatgatgagcttagtggttcccggtattgtttttgcgagggcagcacggatttttgaatctgttgctgtatctacagccgaggtgctgtcatcgagtatgagtatccttggctttttaagcagagctcttgcgatacacagacgctgcttctggccaccggatacgttggttccgccctgctctatgtaggtgttgtacttgtcagggaaggactcgataaagtcatcggcgcatgccattttgcaggcctttatacactcatctgtggtagcgtttttgtcaccccagcgcagattttcgagtatggtgcccgagaaaagcacgttttgctggagcacgacagctaccttgtttctgagagtgtccatgtcgtattcacgcacatcgtggcctccgacgattacagagccggtgtctgtgtcgtagagacggcttatcaggtttacaagggaagatttcgagcttccggttcctcctatgatgccgatggtctcaccggattttatgtctagatttatatctgacagaaccggagtttcagcggtgtctgaatatctgaaggttacatgcttaaagcttatgcttccgtcaggcacatcgtaaagcggctcctttggattgtgcagtgtgctctgctcatttaatacctcgctgattcgtcttgcagatgcgagtgagagtgaaatcattacaaacaccatcgagagcatcatgaggttcatcagaatattcatgcaatatgtgagaagagccatcagatcacctgtagtgagtgtactgtttaccaccatatgagctccgagccagcttattaaaaggatgcatgcatacacggtaaactgcatgagcggagagttgtataccacaaggctttcagcctttacaaatacatcgtagatattttgtgctgcctttgaaaagcgctttttctcataatcctcacggacgtatgcctttacaacgcggatagcggatacgttttcctgtacgctttcattcaggtcatcgtagcgcttgaaggctctgtcgaagtatttcatggccgccttactgatgaaaagcagtaaagctccaagcacaatgacagcgattaaatatattgtcgcaagacgtgggctgatgaaaaatgacatagccatcgcacatattatggatgcaggagctctcatagccatgcgaagcatcatcatataagcattctggatgttggtcacatcggttgtcatacgtgtgacaaggcttgcagatgagaatctgtcgatgtttgcaaaggaaaaggtctggatgttgcgaaacatagcagcacgcagattctttccaaagcccatggcggcctttgcaccatattttgcaccgagacatcctgtcaaaagaccaaacagtgctgcgacaatcatccacacacccatgatatagatatgctttgtatcgcccttattgacaccgttgtctatgattgatgccatgagaatggggatgatggtatccacagccacctcaagcagcatgaaaacaggtgtcgcaatcgaagcccatttgtattcctttatttgggcacctaatgtttttaacatatgttttgtcctttcttattatattttacattaatttctaactaaaaaacttgcatttaattagttagtgtgctaagtatattatagatatactttttttattgtcaagaaaaatttatgagaggatttcagttatgaaggagtttacaccggacaaatacttaggacacaagataaatcgcatcagcaggagcatagacagatattttgacagaaaaaggtgcagcaaaaacgagtgcataccgcgaagccagggcatgatgattggatatattatggacaatcctgacagaaatatatttcaaaaggatattgaggcagagtttcacctgtcgggagctacagtgacaaatatgcttaaaagtcttgaaaaaaacggctatatcgtgcgcacacctatggaaaatgatgccagacttaagaggattgagctgacgcaaaaagcactggaccacgaaaaccgtgtgagagaaaatataagggtaatagaggaagccatgcacaaaggcttttctaaggaagaatttgacatgatgcttggttttttggacagggtgattgacaatatggaagagctcaacatgtaacagaataattatagagttgaaaaagtagcataaatattttggctttttttgtgcaataagccaaaatgctacaaaatattgttgagcgtattgacatagcaacaatatcttgtataatttagattgtcatcaaaagacagatgcacagatttgtattaaataatatggcattttatatgtagctatattgtaattgtttggtgaaaagcccgctttacattgcagggcagtgacatgaattaatgattacatctcatttatagctgcatattttgtgccattacacatggtaaaatgcatatatatagtatgtgtattggatggtgatactatatatagtacgctacattatatgaaatatagtatacagagaggagaaatttacatgaaaatcatcaagcgaagcggcagtgaggacatatttgatgcagccaaaattgtagctgccattagaaaggcaaacgattcagtgctggactatgagaagcttactgctgatcagattgaggaaattgcaagcaatgtggagactgcatgtgagaacatgaagcgctctccaagcgttgaggagatacaggatatggtggagaaccagctcatgaacaagcgtgcctttaccgtagccagaaactacattacttacagatataagagagccatcgtccgtaagtcaaactctacggatcagcagattcttagccttcttgagtgcaataacgaggaggtaaagcaggaaaactccaacaagaatcctactgtaaacagcgtgcagcgtgactacatggcaggtgaggtgagcaaggatatcacacgccgtttcctgcttcctgaggatatagtggaggctcatgagaaggggcttatccatttccacgatgcagattatttcgcacagcatatgcacaactgctgtcttgtaaaccttgaggacatgcttcagaacggcacagtaatcagtgagactatgattgatacaccaaagagcttttcaacagcctgcaacatcgctacacaggctatcgcacagattgccagctcacagtatggtggacagagtatctcgctcgcacatctggcaccatttgtacaggtcagtcgtgagaagttcagaaagcaggtgctaaatgagttcgagagcgtaggccttgatttggatgaagaaaaaatcaacgaggtagcagagcttcgtgtcaaggaagaaatcaaccgcggtgtgcagatgattcagtatcaggtcatcacactcatgactacaaatggacaggcaccgtttatcacagtattcatgtacctgaatgaggtatccgatccgcagacaaaggcagatcttgccgcaatcattgaggagatgctgcaccagagaataaagggcgtaaagaacgaaaagggtgtatatatcacaccggcattcccaaagctcatatatgtgcttgaggatgacaatatcacagaggattcaaagtactgggatctcacagtactcgccgcacagtgctctgcaaagagaatggtgcctgactatatttcagagaaggtcatgaaggagcttaaggacggagatgtgtatacatgcatgggctgccgttcattcctcacagtggacagatgctcacagacagcgggaaatgtggcacatgccatgaactttgatccaaacaagcgtaaatactatggacgtttcaaccagggtgttgttaccttaaatctcgttgatgtggcatgttcatcagaaaaggatgaggaaaaattctggaagatacttgatgagagacttgagctttgtcacagagcgcttatgtgcagacataagaggcttcttggtaccaaatccgatgtagcaccgattctctggcagaacggagcacttgcacgtctgaaaaagggagaggttatagacccattattatttaacggatactcaacaatctcactcggctatgcaggactttgtgagtgtgtacgctatatgaagggagtatcacacacagagccaaaggaaggcacaccgtttgcacttaaggtaatgcagcgcttaaacgatgcatgtgagcagtggaaaaaggagtcaaacatcgatttcagtatatatggcacaccgcttgagtctaccacctataagtttgctaagtgcttacagaagcgctttggtatcatcaagggtgttaccgacaagaactacatcacaaacagctatcatgtgcatgtaaccgagcagatcaatgcatttgacaagctaaagtttgagtcccagttccagaagctgtctccgggtggcgctatcagctacgtggaggtaccaaacatgcaggacaatatccctgcagtgctttcagtaatgcagtacatttacgacaatatcatgtacgcagagctgaatacaaagagcgactattgccaggtatgcggctacgacggtgaaatcaaaatcgtggaggaagagggctcaggcaagcttatctgggagtgcccgcactgtggcaatcgtgaccagaacaagatgagtgtagcccgccgtacatgcggctatatcggcacacagttctggaatcagggaagaacacaggagattaaagagcgagtgcttcatctgtagaagttaaaggaggttattgtttatgactaatgaagaaatctggaatattggccttgaggagcgtacagacgagctatcaaagctgcaaagcgaatatgacaggctcgacgtggagtgacgtaaagcagaatttgaaatggatatgtatgcacgtctcagggaagtaaacaatgcaatgctttataagcagaaattctcagaaaaatatgagaaatgtgccagggaatctgaaaagcttacgaaacagaagaatgcacttgagaatgagattagtgttctgaaaaaagagatatattacattaatagcctgatgtaacataaaaatatgc

SEQ ID NO: 1440 - DNA, 275 bp, Unknown
  gut microbiota DNA sequence
gaaatgggcttcatatatcgtataccaatggaagtgtagaagattttgcaagtatttttgcagcacagtatgaggcaatgaaagcatctggagctttgggagaagacaacaatcttacccaacaggaatttttggagcagttttataggcagggagaatttacccatgacagcagcaatccgtttttaaactttgtttcatccgtgttggatatcacaattatcaaacctatcatagaggcatgtaccggagaagatttgataaccggagaagac

SEQ ID NO: 1441 - DNA, 203 bp, Unknown
  gut microbiota DNA sequence
taagtccttcttttaaccccatttccgagaactttgttgctgcaatggctcctccaagtgtaaccaaatccaccactgcaaaaaccaccttaagtccacgttccatgtctgtcaggtcttctccggttatcaaatcttctccggtacatgcctctatgataggtttgataattgtgatatccaacacggatgaaacaaagttt

SEQ ID NO: 1442 - DNA, 4381 bp, Unknown
  gut microbiota DNA sequence
aaatattcttacttgacagagaaacttaaagtgctggaatagttggcatctttctccaaagctcatttcaatataaaccctattttttccgcgaccgagttaaattcgcccatactgcaatctttttacactgattactaaagtgaatccaaaaagcatatcaaaatatgccttttaagatactatcgggcaatataaacatgttcaagtcatttcttcaacgcctaaaaataacttcggatcgcattgatccgaagttataagtatcatatagctatcggaaagcattcttacctttcctgcaattttaatttattttgcctcataagaagaagtaaacctagtccgtccagaatcgacttgattattatacgcatctacaatgtcgctatattccgttgaatcgctaaaaggagcaatatcgcttgtattgtcagatacactcatgttagaaacaggaccggaaattaacaatgacccgtccggctgggcataagcaaaaaagatatattcatttcctacaaccggaagctcatcaccctcataaacaaaatattgtgagccatcttccgaaagtccgccagatttttgaatcggaatagccgtgtcagtaactaaattgcctttgatattttttgtgacgttcacagtataatttgtgtatgggccggaaacttcacgagtctttccatcgtctgtttcaaccgtaacagcatctttataaacagtaccttcttcacttgcgaccgtaccaacgaatacataatcagcatcgcctacaactgcattcagatcgctataatcaatcgaaaaagtacctctcaaatatgatgtcttaatttcgtcagaagttgaaggtttcgcaatgcaaaaaaacagcacaccaataaccagcaaaatcacaacagctccgataaaaataccaattttggttttagactgaaatttcatagatcttcctcccttctttaatatcttttataacttgcgtcataggaagccttgtcgttggcagaaagacttgttactgagcttacatacgcatacttttcatttgacttttcctctctatttactaagattgatagtgccttgtttcaatgttaaataatcggaagttgcgctaataatatataaattgtattctcccccctctctaacttttaattcgtaacttccgcttagacttccaaaactttctccgtcatacataaccccatctttaatatatcctataaccagcgcctgattagaaaccgcatctgactcatatttttcaaacgaaaaggttaatatatcccctgctttacaattccaacctgcataatcctccagataaaatactgccatacttccgttagtcataataatttcaggtgtcgtatcattctccaccttaaactcagaaacagataatggcagcacaatattatcatctgcgacactctttataatatggctttcagttatagctcttccctcagcattccctatatcgctttcttcaccatgcgtaacctccggttccgaattatctatgacttcttttccgatcaatccttcgttttcatctgtaactaattccgcaccaaacagcccattaatccattgaaccagtttctctcctgtcgctgcattggcaattcctcctgttgtaaaaagaatgatacttaccgccattgcagttgcaacgcgagccaaccgtttacggctatgtgcgttactttcattaaatagtttgatcttcttttgtgaggaaatatcgcttttctttttttgctctaaacattgtgcagcctctaggatatatttatcgttaatttcattcattgcataaaaaatatctgatttcaaagttttcataaatacttcctttccgctaattgttctctcagcttttttcttgttctaaataagattgtttcgactttgcttttgctcatattacaacatttcataatctcttttaccgacataaagtaccaatatcttaatacaaaaacttgtcgatgaggtttttgcaacgattccaaaaaatcctcaacaatatctttcaattcattattttcccaattttctcctcccactttcgccagataattactcaattcctcatatggcaaacacatatctatatctctttttgccgcatgaatatgttcatacttttttagcgcctgattccttgcaatttttaaaatataagctttcaagttatctggtgtttttgggggaatcgtaaaccagacacctaaatatgtatcatttgtacattcttcaacatctaactgattctttatcagcttgccaattataaatgatacaagtttcccatatttcttctctgtttctagcaatgcatcctcagatcggcaattatatagtttaattatttctctatcgtccattacaactcttcctttatttattaagtacggattcgatcccttttgcttgcaagttataaaactttttgctttattttttttatttgtcatttcagctacacagaatatagcttttgatgttaacagtgcctaaccctttccatgctggtgttttaataaaaaagccagaggtcagtgtctctggcaaaatgtatattatattaagtttgctaagttcgtccaatttgcatcataacccattatggacatgatatctgtggctgaaatggtatgtaactgtttttgaagtttgccaaaagcagttctcatagatgaaataaagtcctttaagtcggatttgcttagtaatagcgcaaacattatagctatggcgtatgcatcattagttccataagtataggcgccatctttggcacgtacaatccctaaaacggagaaatttttaatactttttgtatgatttatctgccatggtacctcctatatataaaaagcccccgggtccgaaggacaccggaggacaaactggcaatctcttgtataagtattatactacacattggcaaaatgtcaatgacactatgctgatttggtgtggatcgcatcgtgcagtccaaatttttcaatttcactttattaacctgctattccaaaaacaattcaaacccataacagctctacaaagaaacaaggacattgatatttactatcaacatccttgttctaattattacaccatctcaggaagtttgtagcctaatttttacattgcgtctgcgaagtcatctaatgacatacttactctacttgcgcctacctcaggttctaatataccatcctgaacaagtgaatatatttcaaggcatctgccttgttgtattccttcctgtatgccaagctttttatgatcatcctatgccttacacatatttaccacatcttccttttcatcatacttaatatcagttcttgtctcaatataacctatcacctgcaataattgcccataaagcagtatcgatatactcaccatttttatagtatttttgtctggcaatgccttctaacaccatgccgcatttctttaataccgcagaggaagcatcatttccatagaatacttctgcctgaactctgttaaatccaactctatcaaaggcataatctaagacagcctccaatacttctgtcataatgcctttattccaaaatccgggagacaacatatagcatgtatcacacatatgacatgcttcttccacatttcccaaattaattgttcctatcaattctcccgtttctttccactcaattacccaatgaaaatatgaatccgactcataattagatatccaatgctttaccttgtccctatatatttctatgtcatcaacaggattaaatggatagtatctgcaaacttcatcatacttagcccaattttcatacatcatagtataatcggatagtttgattcttcgtaaaaagcatcgttttgtttcaaaattctgtgtgcctatataattcataaattattccttttcatattcaaaataaattcctgcaaatatctattaatcacctgcatggcaaaatatacagatacaagatacatctactgcccctgtcatataaaaatcatgccccaacacaaatcagttggggcaatttctatacttttaagctattatactacaccatctcaggaagtttgtagcctgctttttgcattgcgtctgcgaagtcatctaatgacatacttactctacttgcccctacctcagggtctaatataccatcctgaacaagcgaatatacttcaagacatcttccttgttgcattccttgttgtattccttgcttcatcccctcctgaatgccaagttttttatgatcatcccatgccttacacatatttaccacctcttccttttcatcatacttaatgtcagttcctacaaatagattgatag

SEQ ID NO: 1443 - DNA, 88798 bp, Unknown
  gut microbiota DNA sequence
tgaattccgtttatgaaccagtcgccgtcagttacggtatgcaatgtaccgtcaaagtcataatctgtaaagccatcgttattcggatatgccagcattgtctttacgctctgcagtgtgacaccatccggaagcttatcagtgatggtatactctgttgcatcggcatccataagtacatcaacgcgccatgtgagtgttccatcgctttctgttgttttcaaataagtctgacttgtattaccgtttccatcagtctttacaatctttgatgtcgtatggctgtaagatgcagatgcacttgaatttaaagcttcaaatttattcacatattcaactcttccacttggcgttgtgtcggcggttgtgctgtatgtaaatgcgactgtcctttcactgttgcttatcggataatccttattaaagctgatatttaccgaggtaaatctgtagtcatcagcttctgataatatactaaaatcggccgtttttgacttattattcttatccagatatttaacagtaatgtcaccgatatatccatcaaacttttccttaacctgacttacaaaatccttcatctgggtataagtcatgtaatgacaattcttccgggatttggatgacattgtatcggctatgccaaactctttaggaaatcccgatgccggaattgtaaattttgcttgccactttaaagtatacagcccgttatctgtcttttgagcttcaacaagcctcttcgtaatatcctgctttgtttttggaacatttacacttgaagaaccatcatatgacttatcatccttagtaagggtagccttattattaaatttctggtcatcaaatgtccgcaatgcgtctgtataatatttgacagtatacttattgcagttcttgttaccatctgtaggattaaatgtaaccgatgtcaccttgccactgctgtctttgttaattgtatatccgtcactaggtgatatatcaatgcctgtaattttatcaaacatatcatctgtcaggacagctcccgcaatatcctcacagcttttatttactgtaaccgtccagataatccggttattagtcttatcatatttaccggatttctctataagatttttgtaatacttcacatagctgcttgatgtatctatgacagtttcttttgatttttggtctgttgaattacctgtaacgaaattagttgcctgccatgtagcattatttcccaaatctccggcattggtcaggtaatacctgtatgtaatagaacaactctcacctgcacttaattttggaagctttgcagtaagtgttgcctttcccgcatctgccgggtcatcctttcctgtcgcctttgcagtataactacggtcaacagcctgaccgtttttctttatgctgtaggtaaatccggtagtatcaaccctcataccattgccgttaaattcatctgtgatttcgatatcatcaggtgtaccttttttagaagatacatccacagtaaactcaacataataattaccattttcatcaataccaatattattattatttgtattgctcttctttacagaaatatcgtagtttaaggaatcatttccgttccagtggatattatccttgtctactgttatggtaacatcaccaccgatatagatatccacatcaccggaatcattggtcttgccctcgccaagagcttctgcctttgcccagccttttatatcgctgctgttaccctcaatataaccatctgcaaacttgataagaattgcatatgtaccatcctcattcttgatatatctgtactgaaactgttccttatcgccgttgtcatcacattttgtcttccagtaattgcacagctcatccggaatagtcaccgatggatcatagacataatagtaattcttaacagtattgccattggcatctaccgtatcattctttccgattccaaagtccaactgaacctcaagcttgaacttctcgccgttccagtccaccggtttgccctcacttgacattttggtatatgagccatttgattgcagtttttgaagattaacatagttttctgtgacattatctatggtaaaatccttctgattctgatctgctgctgatgcaggttgtataagtctgtatgcagtaatgcccagcactataacagccatcgatataataaatgtagcaagctgtctacgtcttctcactcttttaagacgttctttgccgagacgttccatatccttatccattctgcatcctcctttcatagagttatatataatttcatttaattaatctcttaatcattattcaacagctaatatattacacccttttggtcacacaacggtcacacgggactttaaatcgggattttctatttttttaccaaaaagtttcaaataacactaatcaattttgccaattttagacaacggccagatggcaaatgtgattttgccgaccacctgttcctctgagacacagcctatagctgtatttctcgagtcaagtgatacgcttctgttatcgcccatcacgaaaattttcgactccggaacctgataaggcagctctatattgcagtctcctaaagctttttccttgagatacggctcatcaatcgcaatatcgtttacgtaaacagttccatcatccgatatattgacccagtcacccggcatcgcaataactctttttacaagtatcttgttattgtaataaaaagctatgacatctcctgttttaaagtcatgtccctttgatgccataagcacctgcccctcctgtaacgtcggtgacatagaggttccagtcacctgcaaaatcggaagccacaggtttgcgaccaatattgctgccgctgccactaccacaagtgttcctacggtattgaagagtgttgctgcaaatttgttgttatacttcactcttcttagctcctgacgcagctcctttatgccaagatcatcgctataacggtcatagtcgtctgtcatgatactgcgatagcccgatgtatcttcagtcttctcagcacttttattctcaacttctttattctcaactctgttttcttctgaaaccttccttgatatttccttttctatatgtacagatatatcctccggccggttttcttttttagtctgctgaaattccttctctatttcaatatttttttctatatcaggagttatgtctggcgccggtgttacatatttgaccggaattatttccgctatttcctgtgatatattttcatcaacattttgggtctgcttatgtacctgcgttactttttcagatgacttaacagatttttccatcatctgtgccaaaagtaaatcaagcttatcctcattggtaagtggtttctgttcgacatccttcagctcctcatctttgcttaaatccactacatcaatattatttttgctttctgcaacagctgcagtattgttatgattaatctctgcaactacctttttattgtattcagcatctgtgtagctttttgtcgaatttgtaaggttagctgatttattctgcttaattttcttctgttctcttttttttcttagctcaatgtactttacggcaactcttgccagagcatatactgcctttttatatattttttctatcattcttttgtccaattatccatttcataaccacaaaatattgcttctatattattttcttgtcagattatttgaagccattgatattacagcagcaaatttctggatttcctctgttgctgacgtgagtttattaattgcagcattgatatcaccggatgtcttcacctcacgctcaagtgtctgaatatgtttttttgtctcgtcaagctcttttcttaagtgttcaacctctttacttctgtctaaaagcatctctagcagctcacttctgctaagcttctttaattcttttgcttccatattcacaatctccatatatcagaacaaccaaagaatagattactatatctttggttgccctttattatctgtattatattacaaaattaaaattcaaatttctttgcaaaataagcatcaagctcatcaatcgcgatacgctcctgctccattgtatcacggtcacgcactgtcacgcagtgatcttcctctgaatcgaaatcatatgtcacgcagaatggtgttcctatttcgtcctgacgacgatatctctttccgattgttcctctgtcatcatactcacagttgtatgtctttgacagctgtgcaaataccttctcagcgctctcattgagcttctttgacagtggaagcactccaatctttacaggtgcaagtgcaggatggaaatggaatactgttcttacatccggcttctccggtgtaccgatatcctcctcatcataagctgcacaaaggaaggcaagtactacacgatctgcaccgagtgatggctcgataacgtatggcagatatttctcattcttctgatcatcaaagtatgtaagatcctgtcctgaaacttcctgatgacgtccgaggtcataatctgtacgatcagcaatgccccaaagctcgccccatccgaatgggaataagaactcgatatctgtagttccctttgaatagaaggctaactcagcaggatcatggtcacgcagtctcatctcatcctccttgattccaagggaaatgagccagtcacggcagaagcctctccaatacttaaaccactcaaggtctgttccaggctcgcagaagaactcaagctccatctgctcgaactcacgtgttctgaaggtgaagttaccaggtgtaatctcgttacggaatgacttaccaacctgtccgataccgaatggaatctttttacgtgatgtacgctgtacatttttaaagtttacaaagataccctgtgctgtctcaggacgaagatatactgtattcttagcatcctctgtaacaccctggaaggtcttgaacatgaggttgaactgtctgatatctgtgaaattgtgcttgccgcatgatggacatggaacattgtgctccttgatgaaatctaccatctgctcgtttgtccagccatcaactgatgtctcaagctcaataccattgtcctgcgcaaaatcctcgatgattttgtcggctctgaatcgctcgtggcactccttacaatccataagcggatctgagaagccgccgagatgtcctgatgcaacccatgtctgaggattcatgaggatggcacagtctacacctacattataaggattctcctggataaatttcttccaccatgctctttttacgttgtttttaagctctacgcccaggtttccataatcccatgtatttgcaagacctccgtaaatttctgagcccggatatacaaatcctcttgcttttgctacctgtacgattttgtccatggtcttttccataattcctgtttcctctctatcttatgatttttattcttatttaaaattaaataacgatttaacaatccgaattgtaatagattttatttataatttatttaagtattaatgcactaatctatttatcagtctgcttatatactacttatatataacatatgtgacatatgacaccggcaccgaattatcctcctcgctgtcaaagtcgaatgtaacctcgttatcttccttgaccgagtttaatatatcatcatcgctgacactgtcatccgctccgttttccgttccttccgtcgcatcggattttactgcttctgtgccctctgtggcactctctgtccctgtaggctgtgaggcaagcatgctgtatttgtcaccaatcgcaactgtattatcatctacaagctttacattgtcgacagatacatataatattttgcctttcacatgcagatttgaactgccctcataaataactaccttgtagccgttttcatccagaaactcagatgattcacatttctttgccttaccatcatctattgcagcaaaatcagtcttgaaatcatatccggctgccagagcctctgcaatagtccctgaaaagagctttgtcccattaaaatcagtatattcgtcagttgaagcatagctcatggtaagtgatgctttctttttctcgacagtcagctttttgagcttgaccgaaccgtcatttttcttattgtaatcgtctattgacttgtcaacatagctttgtaagtcatcctgcttgtatgtagctgtatcaaagtcctcgacatccgtagatactacactgccgttttttgcaacaaacaccgtgctatccttggtataataatcagtaccgcacccggcaagcaaaccgcatgtcgcaataacaggcaacagcattgatagctttttattcatagctgcctcctaaaatataatctatgccattatacccttttgtatatatgatttcaagtatcatatttaaaagagcaattacagtaatacttatagcttaaacaacgatatacatggtatctattaattatttcatgatttaatttcttgctttaatttatcaaaggaaagctgctgatttaaaatcatgatgcacatagattgaaagatattccttcattatgctcctcagctcctcaagcacatcatctgacactgcaaacctgtatagctttgtgatatctgctgaaacaatatactgcatggtatagagtgtatcacttagtatatgcctgccctgcacctgcgtgccacagttatcgcaaaacacgcctccgcgtcttgccgaaaagacattaagtccttcccttgaatgacagtgtatacatgaaaacagcgatggcccctcgccatttatcgtaatagctttaagctcaaaaacagccctgaccagctcattcttatatgccggtgattcaagagccctgagtgattgataaaggagctttaacatatccttctcgtcattgttctcctgacagaaatatccgcagaactccagaaagtaaaagccggtgtatactgcttccaaatcctgtgtcagttccctgaaatagttgctgattgtgacctttgatagagaatatgcgcttttaccctcaaacagctcaaactcaccaaacgaaaacggattgcttcctgccataagctggctgtttggacgtcttgcgccccttgcaaaggctgtgatttttccccgttcctttgtgagaatcgttattcttttgtcaaaatcccctaccggcatggccgaaagcaccataccggtcaatactacactctgtgacatcttgatcttactttcaaaatactattcttcctctttatatccaaagttcttgatgaggaagtcgctgtctctccagtccttctttaccttgacccatagctttaaattcaccttacagtcaagcagtctttccatctcataacgcgcattggtgccgatttttttgagcatgctgccctgctttcctataatgatccccttatgggagtcgcgctcgcagacaattgtggcatccatatctataatagaaccgctctttgtctttcttgttttcatgcggtcaattcctacggcaatgccatgcggtacctcatcatttaaagcatggagtgctttttccctgataatctcagcacagattgcacgctccggctgatctgtgatggtgtcctcatcatagaactgtgggccataaggcaaatacttaaatatagaattaataacatcatccgtattctgtcctcttaaggctgatgtaggaataatctctgcaaagtcgtataccttgcggtaggtgtctatatattcaagcaccttttccttttccactgtatctaccttgttgataatcaatataacaggtgtattgacctttttgagctgctctatgatatgctgctctcccgccccgataaagttggtcggttccacaagccacagcacaacatccacctcattcaatgtcttttccgccacattgaccatatactcgcccagcttgttttttgccttgtgtatgcccggagtatcaaggaacactatctgtcccttttccatatccgtgtatactgtctggatgcggtttcttgtggtctgaggcttgtttgatgtgatggcaattttctgaccaataagcctgttcatcagtgttgacttgcccacgtttggtctaccgattattgtaacaaaacccgatttgaaattctgtatcatttttcctcctatgtgaatctgtatttatataagcttttcaacattctcaaaaagtcctgctgactctttaatcatgttttcattgccaatgacacatatgctgtccttcttaagcactgcctctacaagatctgcaagccttctgatattctcaggctgtgcatttagtatctcatttcgctccttttgaatctgctcgtaggtaataccctcgagatatgccgacattgatctgcttccctttgcctccggattcataggcgtatcaagtgcactgaaggtaccgataatatactttgtcatatccctctcatcaggtgagaagctctttatatactcaggtattctgtcatagacatcaagtgtgtctgacagattagggtctcgatatgagacaaagtagctctctccgcttctaaggaatgtattcatgcagccgtaagcaccgccctttaccctgacatttatccagagataatcatagcttaggatgatacgcagcagtctcagcgctccggtatattcatagccctcgcagatgaaatcacctgtctttgccacatactgtatctgtgatgcatcgataaaagcttcctttgctgtgttaaaatgcacctctgcctgattgcctatagcactcattttgttaaatccagctataactttctccaatgatagctttgcattgccatatgcttcactatttccggtaaagctgatgagcattctgtttcttgcaaacagctttttggctattgcagcaagcttatctgacacactctccggtgactcgaaaagctccttttctatacggcatatagagcggtaaaaagcaataccctttagctcgtcctgataaagtgcatagcgtgagaagctcgacatgcttcgcatagctgcaaccagatggcctgagctgctcaggttagcctgaagccttgccttaatctgtgctacaatctcgcccagtctctttgtatcggtaaaatccgatgaaagaagcatctgctccataagctcaagtgccttgtcaagatttttctccaatacctttagcttcacctcaaacttaaaaacgaaattatttctatccttaatatccgggtgacttgcagtacctgtgctgattccgccggtatatatattggtcgcattggctaaatcggtatagctgtaattttcggtactcaccaatccgagtgcgtttgtgaaaaagccaagatagccaagctcgctctgtgcaaaatcacctgcatcaaataaaaatgatatataatcaatgccgtttgactctatgtcatgacgcacaacctttacatccaaaagctcatcctcaatgtttgaaaaaggcatagcctcctttttcatgtcagctcttgtaagcattggaagcttgcgcagatcctcatctgatgaaggctcctcctgatatttctttaaatgctctgtctcctcaatcagcttgtcaatctcttcatctgaaagagatgccttgtaatcggaaagctcctttgccagagcctcctccctctcattgccaagtccacgctttggctttacagtaacagatgaaccatgggtattgtcaagcagatattcctgtataagcttttcaaaataatccgtatcaacagcccttctaagcctggcaaatgtatcaagacactccagatgtataaaaggcttcatatcatcaaacagccagctgtctaagcagtttaacccaaaaagaagtcccttagggaactgtccgaagtcagcctccctgaacttaaactcactgctgttgattcccgcaagcagcgcttctttattaattcctgttttaacaacctctttaagagtgttttctataatgctttcaaactcatccgcctgagatgcattggcattctttgccacaaacgagaacaccggctgcagaatgcctgcatcgtatgagccatacacatcatcaccgattcccgcatctatcaatgcctgcttaacaggtgctcccggtgagctgacaagtgcatagtcaagcacatcaaaggcctgatatagcatctcatcaagcgtatcccctaccacacgattataagaaagatacgtcttattctcctgtgaatcatccatggtaattgaatactgtgcctcaacattctttatttcatcaaatgcaggctgtttattaatttctgaattaacttttttataatcatacaggctcagatattccttatccagccactcaagtctctcgacaacatccatatcaccatacagataaatgtatgaattggatggatgataatacttgtgatagaagtccagataagcttcatacgtaagcttaggaatatactccggattaccgcctgaatccttgctgtaggtattgtcagggaaaagcgagcggtaaatctggcttgaaagcacctcatccggcgatgagtatgctcccttcatctcattgtacaccactccgtttatcttaagctcatcatccttgcctgtaagctcgtagtgccagccctcctgcttgaaaatctcctcgtactttgtgatattcggattaaacactgcatccagatacacatccatgagattcttaaaatcctgatcgttgcagcttgctacaggataaactgtcttgtcagggtatgtcatggcatttaaaaatgtattgagcgagccctttgccagctcaataaaaggatcctttacagggaacttctttgaaccacagagtgtggtatgctcaataatatgcggtacacccgtctcatcctccggcggagtcctgaagcctatataaaagaccttgttatcatcattatttgataaaatggcaatccttgcaccactttttttgtgtctcagaatgaatccgtccgactggacatcctccactctatgctcatttaaaatctcgtattcagccaaatcgtgaattgtcatcaattattcctcctaaaatgcgatgatgatagtataccacatttttacatattatagttaaattataagtatatttaccacaaaaaatctgttaacgtaatattctgcaacatccggctttaaaagtcagagtctatgctcctcttctgaatattaacatccacctgtggaaacggaatttgtatgctatttttatcaaatgctgttttaatttcttctgtaagctgccattttgtgttccagtaatcctcgttcttcacccagatcctcgcgccgagctctatagcggaatcctgcagttcgctcacaaacacattgcacggctcatcgtgaagcatcgtatctgctgacgtgacaacagactccagtatactctttgcaaatgctaaatctgtactgtaggatactgtcactctcaaatcaagcattctcttatccatcatagatacatttgtgatacacgaatcagcaagctttccgtttggtatcataaccatcttgttatctattgtcaaaagccttgtataaaacagatttatatcctttacagtgccctctgtaccacttgaaccgtcaactatgtaatcgcccacgccaaacggcttcatcaaaaggataagcacgcctcctgcaaaatttgacagactgccctgcaatgccatacctacagtaagtccggcagagccaagaaccgctataacagagccggtcgccactccaaagcccgaaagcaatgccatgacaaggataaaatacaaaaaatatttaatcacatttgccagaaacgatgccactgcagcgtccattctgcttctatcaaatcctttttttattatttttacgattgatttaatcaccttaataccaataagcagtatcacaatcgcaacaacaagctgcacgagaaagcttataagcgatggcatatatttctccagatacgtctttacaatgcccgggttttcaataacctgctgtacctcggtatttgcaaccggcactgatacttcaccaagaatttgtctaatcatataatctcctatatctctcttatatctcttatatttcttatatattttctatatttgttatttccttataaccaactaaatcccccatataaaatatgggggatcagtatttaaatcaaatattaattcactatttaataactctcactctgagcactccgtcaatggcagaaagcttctcaacggtagaagcatcaatagctgaatcaagatcaagaagtgaatatgcatagtcacccttgcccttgtttgtcagatcagatacattgatatcagcctctgcaagagctgttgtaatctgtccaatcatacccttaacattcttgtgaaggattccgactctgcctgaagctgtgcatgcacccatgctgcagtcagggaagttgactgagtgaacgatattaccattctctaagtaatctctcagctccttgacagccataactgcacaattgtcctctgactctgctgtagatgctccaagatgaggtgttacgatgcagccctttgctccaacagttgtgttgttagggaaatctgaaacatacttcttaacctttcccttggcaagtgcatctaccatagcctcttcgtcaacgagaagatctctggcaaaatttaatacgatagcggttggcttcatcattgcaatagcatcagcgtttaccatcttctttgttgaatcaagaagaggtacatggattgtgatgaaatcacaattcttgtagatgtcctcaacattactgatatgcttaacgcttcttgaaaggttccatgcggcatttactgagatgtatggatcatatccgtaaacatccatgcccatatgtactgcagcatttgcaacaagtacaccgatggctccaagtccgataacaccgagcttcttgcctgaaatctctgttcctgcaaagttctttttctgcttctcggctgtctttgcaatattctcatcgttctggtttgcaagacaccagtcgatacctccaacgatatctcttgatgcataaagcattccggcaaacacaagctccttaacaccgtttgcattggctcccggtgtgttgaatacaacaattccctgctcggcacacttgtcaagcggaatattgtttactcctgctcctgctcttgccacagcaagcaccttgtcaccaagctccatgtcatgcatagcggcacttcttacaagtgctgcatctgcatccttaatatcatcaacctttttataatcgtcagagaacagttcaagacctactcctgcgattgggtttaagcatgtgtaattaaacattatgcattctcctcctcaaacttcttcataaactctacaagcttctcaacgccctcttttggcatagcattgtagatagatgctctcattccgccaactgtacggtgtcctttaaggtttacaaatccggctgcagttgcctcctttacaaacttggcatcaagctctgcatctcctgttacaaacggaacattcatgagtgatctgtcctcttttcttactgttcccttaaagagcttgctctgatcaaggaaatcgtagagaatcttggccttctcctcatttctctccttcataactgaaagaccgcccatcttcttgagccatttgaataccttgccacagatatagatgccgtagcatggtggtgtattgtaaagagaatcgttatcggcctgagtcttccacttgagcatagttggtgtgcccggtagacaatcatctgtgataaggtcctctctgataattgctataactactccggcaggtcctacattcttctgtactccgccatagataacagcatattttgatacatctacaggctctgataagaagcatgaagatacatccgctacaaggttctttccctttgtgtttggaagcttcttgtactttgttccgtagatagtattgttctcacagatgtatacatagtccatatcatctgtgattggtaaatctgagcagtcaggtatgtatgagaaggtctcatctgcagacgaagcaagctctacggcgtctccgtaaatcttagcctcggcaaacgcctttttagcccactgacctgtgataatgtatcctgcttttttatttttcataaggttcatcggtacctcagcgaagaactgtgaagcaccaccctgaaggaaaagcaccttgtaattgtcaggtatattcataagctcgcgaagatccttctcggcatccttaatgatgtcatcaaaccatttagatctgtggctcatctccataaccgacattccgcttcccttataatccatcatctctgctgctgcttcctgcaatacctcctcaggtaaaactgcaggtcctgctgaaaaattgtaaactctactcactctaatttcctccttgtgtcgcattgtagtcctcttcatcgaaagactcgttgataggcttgcccggtgcaaccataggccataccttgtcatctgaatcaatgatacaatcgataacaaacggtgtcttgctctttaaggcatctgcaaatgctttttcaaattcttcctgggtcttaacacgtcgtgcggtggctcccattgcctctgaaagctttacataatccaccccatcatcgagtacggttgccgagtaatgcttctcgtaaaaaagagtctgccactggcgtaccattccaagtacatggttgtttattataacctcgataagaggaagcttttctcttgaagctgttgcaagctcgttcatgttcattctgaagcatccgtcacctgcaatattgactacagtcctgtccggattagctgtctgggcaccgattgcagcaccgagaccgtatcccatggtaccaagacctcctgatgtaagaagagttctcggcttactgtatttgtaatactgggctgcccacatctgatgctgaccgacctcagtaaccattatagcatttccttttgtcatttcatagattttttcaataacaaatggtccgctaagtccatctttgtgatatgtaagaggaaaagtctttgcatatgccagcacatgctcaacccatgaattgtggtcaagctgtgtgagctttttgttgatacgtgtaagtatttccttcacatcacctataacactcgatgtaacacggatatttttattaatctctgctgcgtctacatcaaactgtaatatcttggcctgatctgcaaactttttaggattgccaagcactctgtccgaaaaacgtgtaccaatcgcaatcaaaaggtcgcactctgaaactccaaggtttgaggtctttgtgccatgcataccaagcatgcctgtgtagttatcacttgtgccatcatatgcacccttgcccatgagcgtatcgcaaacaggtgcattcaccttgtctacaaattccttaagctctttgcttgctccggagagaaccactccgcctcctacaaatatatatggctttttggatgcttttatgagttcaattgcattatcaatgtcactgtctgtaattgtttctgtctcacgctcaggaagcttgatttcctgcctggtgtactctaccagatctgccgtaacattctttggaatatccacaagcacaggacccggtctgccttttcttgctatattgaaagctcttcgtattgtatctgcaagcttctctacatcctttacaataaagctgtatttggttacaggcgttgtaattccggcaatatctatctcctggaagctgtcctttccaagtaacgagactccgacattacatgtgattgcgacgattggaatcgaatccatgtatgctgtcgaaattcctgtgaccagatttgtcgcacccggtccgcttgtagccagacagacgccaacctttccggtgcttctagcatagccgtcggccgcatggcttgctccctgctcatgcgaggtcagcacatgcttaatctccggatgcttgtagagctcgtcatagacattaaggatggctcctcccggataaccgaatactgtgtcaacaccctgttcttttaagcattctataataacctgtgatcctgttaactgcatcttgtattcctctttttcttatacgaatcctttacgataataggtaaaagccttattcgtactgaattttctatcaaaatatatactacgcgttctgctcgcccggaagtgcaaggatggctcctctgtttcctgatgtaacaagcgctgcgtatctcttcaaatagcctgttgtaacctttggctcccttggctgccactttgccttacgctcagcaagcacctcgtctgacacatcgagctcaagcttcatgtttggaatatcaatctttatgatatctccctcttcaaccagggcaatcggtccgcctactgcagcctcaggtgaaacatgacctattgaagctcctcttgaagctcctgaaaaacgtccgtctgtgatgagtgctacagagcttccaagtcccattccggcaatagcagatgtaggattaagcatctctctcattccagggccgccctttggtccctcgtatctgatgacaaccacatcaccctctacgatcttgccgccctttattgctgcaattgcatcctcctcgcagtcaaatactcttgcagggccctcatgaaccatcatctcatcgacaactgctgaacgctttactacagagccgtccggagccagatttcctttaagcactgcaagtcctccggtctttgaatatggattgtctaccggtctgatgacctcagggtctctatttactgcattctttatattctctccaactgtctttcctgtaacagtcatacaatctgtatttaaaagtccgatatcagcaagctctttcatgacagcccacacaccgccggcctcgtttaagtcctccatatatgtagggcctgccggggcaaggtggcagagatttggtgtcctctcactgattggatttgcaaagctgatatcaaaatcaaagcctatctcatgagcgatagccggaagatgaagcatagagtttgtagaacagccgagcgccatatcaactgtgagtgcattcattattgcatcctttgtgatgatatctctcgccttgatgcccttgttgtacatatccataacagccattcctgcatgctttgcaagacgtatacgctctgaatatacagcaggtattgttccgtttccgcgaagtcccataccgagtgcctctgtaagacagttcatagagttggctgtgtacattcccgagcatgaaccgcaggtaggacataccttgttctcatactcacatacatcatcctcagtcatagtaccagcagcgtatgagccgacagcctcaaacatcgatgaaaggcttctctttctgccctttacgtggcctgcgagcattggtccgcctgatacaaatactgtaggcagattaagacgtgcagccgccatcagaagtcccggcacgttcttgtcacagtttggaaccattacaagtgcatcaaactgatgagcgattgccatacactctgtagaatcagcaatcagatctcttgtgacaagggaatatttcatacctacatgtcccattgcaataccatcgcacactgcgattgcaggaaatactacaggaactccgcctgcctctgcaactccaagctttacagcctcaacgattttgtctatattcatatggcccggaacaatctcattgaatgagcttacgattccgaccataggctttttcatttcctccggtgtaaaaccaagagcattaaataaacttcttgccggtgcctgctgcattccggctcttgcgttatcacttatcatattttatctccttatttatctccgactatttctttgagtacttcatcattactactgtatacataatgatctgcctatctataatctattagctgtctataataagttatgcagctacacacgttctgcgatgagatcacccatctgtgctgtgcctacctgtgtgataccctctgtagtctcacccggctgtggcatgatgtcgattgtcctgtagccctccttaagcacctgctttacagcatcctctattgcctgtgcttccttgtccagatcaaacgagtagcgaagcatcatggctgctgaaaggattgttgcgatagggtttgcaatgccctttcctgcaatatcaggagcagatccgccacttggctcgtaaagtccgaactttgtatcgttaaggcttgctgatgaaagcataccgattgagcctgtcaccatacttgcttcatctgataaaatatcgccaaacatattctctgtgaggataacatcaaactgcttaggatcctttacaagctgcattgcacagttatcaacaagcatatgctcgtatgtaacctccggataatccttagcgacctcctcgacgatttttctccataatctggaagaatcaagcacatttgccttgtctacagatgtaaccttttttcttctcttcatggctatatcaaagcctcgctttgcgattcttctgatttcattctcattgtatgtcagtgtatctgtggccgtaacaactccgtccacatcttttgtctctctggctccgaagtaaagacctcctgtaagctcacgcataatcatcatatcaaagccgtctccgatgatatcgctacggagcggacatgctgcagcaagctccttgtacaggtatgccggtctaagattagcaaacagattgagcgactttctaagctttaaaagtcctgcctccggacgaagctcaggggccagcttgtaccatggtgatgtggctgtgttgccaccgatagaacccatcagcaccgcatctgaatcaagcgcagtcgcaatagcctcatctgtaagaggaacacctgtagcatcaattgagcagccacccataaggatgtctgtgtagttgaagctgtgtccatacttgtctgctattttgtccaataccttttttgcctcagtgactatctccggtccgattccgtctccggaaattacaccaactttatattccataatttcttacctcttttacataaaaatacatattcttatattaaagcattaaagtagttatttcaatatgccgggatattttactttttcatgcaatttataactgcagcttataataactgcatactataataacagttttttattattattgcaagagatgcggataataagaaaaccgccacttatgtgacggctttacaaatctgcattatttagctgaatcctctgctttctcaaggtcagcgatagctgccttctgcattggaatacggcagttcttgttgttaccaaactcaacgattacagtatcgtcctcgatatcgataactgttccgtagaatccacttgttgtaagaactgtgtctcctgttgcaacctcattaagcataagctcctttttcttctgctccttcttctgtggacggatcataagaaaatacataactgcgaaaagtactactaaccagacaatcattccaattgttcctgctgcctgaccgtttgctaaaattgatgtcatcaattgttcctcctaaatattctataattgatgtgttctaagcactattaccataatacacgttaaacgtgctaacggcaaggattttttatcattttcgagattttttatatttatctgctagctctgctctccctgtgtcattccatagagcttttcagccttgtatgaggcaaaacggcctgcatcaagcgaatcccttatctcctccatcatgttgttgtagaaatacaaattatggagcacgcacagtctcattccgagcatctcctttgcctttaaaagatgcctgatatatgcacgcgaatatgtgcggcaggcaggacagttacagccctcctcaataggacgcatatccttctgatacttctggttgaacagattaagcttgccgtgattcgtgtatacatgtccgtgacggccgtttctgcttgggtatacacagtcaaagaagtcgattcctctctctacgccctcaagtatattggcaggagttcctactcccatcaggtatgtaggcttattaacaggcagatgaggcactgtttcatcaagaatatggtacatctcctcatggctctctcctaccgccagtccgccgacagcatatccatccagctcaagctcagaaatgcgctttgcatggtcaattcttatatcatcataaatagctccctgattgatgccgaataaaagctgctccttgttgatagtatccggtaagctgtttaagcgtgccatctcctttttgcacctctcaagccagcgcgcggtcctgtttacagagtttgtcacatactgtctgtctgcaacactcgatgggcactcgtcaaacgccatagctatcgtggagccgaggtttgactgtatctgcatgctctcctcaggtcccataaatatcttggcaccgtcaatatgcgagttgaagtacacaccctcctcctttattttgcgaagacctgccagtgaaaacacctggaatccgccggaatctgtaaggattggtctgtcccacaccatgaatttgtgcagtccgccaagctctttaatgattttgtctccggttcttacatgcaggtgatatgtatttgacagctcaacctgacactttatctcctttaaatcgtccgtagagacagcgccctttatcgcacctactgttcctacattcataaatacaggtgtctgtatatctccatgcacagtatggaatgtacctctcttggcacgtccctcttgttttagtaactcatatttagccatattttcgtttaattctcctgtttcttttacttatcgccattgcctacgatttttctgattaatattccgttggtcagcaatgtggtatctatgcaatgcctctcaaaaagtacctcgccgtcctttggcacctcaatatcctcatcagagcagttgactataacctccacatatgtatccacccagcccatctttctgaactggattacccttggattgtcagcaaaatcgtcagggaaatggaagtttctgccctttaaaagcggctcactcgcccttaaatgaatgagctttgataccatctcaatgcgctccttaaacctgcctgcctcaatatcatcccacggcatacatcgtctgcagtcagggtcatagctgcccggcatggcaatctcagtgccgtaatatatacatgggctgcccggcatggcaaaaagtactgcaagctgtgcaaagtactggtcgagattctttgtatcagagcgaaggcgctttgtatcatgtgaatcaagcagattgaaaagcacatcattggtctgctgcatgtagttggtataacatctgtttatagtatactcaaaatcctgattcgtctggctcttatctatccagaaatccttgatgctctctccaagcggatagttcataaccgcatcgaactcatctccacgcagccacggaagagcattatgccatatttctcccaaaatgtaaatatccggattgatttccttaagccttgccctaagctccttgcagaagcggtgtgacacctcatttgccacatcaaggcgcagtccgtctatatgataattttctacccagttggcgcagatatcgataaagtattttcgcaccgccggattatttgtattgagctttggcatattgtcaaaaaatccaaacgtataaaactgaccctttttagccgctccatgcttaaagtcaagaggccattcattgatcataaaccagtcataatactctgaatctgtccccttcgctaaaacatcctgccacggtgcaaaataatagccacagtggttaaacactccgtcaagcattattctcatatcacgcttatgggcttctaacacaagcctcttaaaggtatcttcatctccaaagcgcgggtcaatctttgcataatccgttgtatcatacttatgattgctcggtgactcgtttatcggtgtcaggtagattccgtttattccaagctcctttaagtaatcaagcttttgaatgattcctgcgaggtctccgccgaagcactccttatttttgacctttcccctgtttctccacggaacaacataatcaggatctatcgagtggtctccattgcagaatctatccggaaatatctgataccatatagtgtcatttacccacttcggtgtgaccggaatatcacacggattcatccacgggaatacaaagcactggcggcttctgccctcaagtgccatctgctctgcactcacgaagccatcctcaaagtaaaaccatctctcatcctctgtgatgagctcaaaataatatttaagtctcttgaatggtggctttaccgtggttgtccaccatatctggtgctttaatttctttttaaatataatcggctgcttatcgccattccatgtctccccaccgcctaagataccggctgcgaacgggtcaccgagtatgatatttacttccttcacatcataaccggtctttatatttatgattaattcatcctcatttaaaggatagcagtagttgtcgtatgcctggtgaaataccccgttaaattccatgttttttccctcttttgctgtcttattgtagttgtttatcattgtggcgctaaggacggcacgtaagtcgcggtcaccgtgagcgtccacgcgctgccctgttcgctacgctgcgctgttaagattctgtacgaattatgcttatagattttctccggctgacgaaaccgtcgctactcgccctccatggctcgatagctccttgccccggcgtccctgccggtgcatttctgtgtatcgaagcataattctacagactctaaacagcttcgctattcgctctcagggcagcacgtgtacgctcgcggtggccgcggcttacgtgccttacgttgtggcaaaattgctacaaatgatgctgcttaattatacttgcttaaattatgcttcgcttaatttgcgctttgcatatacaggcatgcaagcatgcatcgatgataccttttgaccctttaatcacataattatacacaaacatagttcgaaagttatctaaataaaataatatcatagttttcttgactattcaacttgctattaattataatgtatttattatcgtaactattcgagtcacattgaaaaccaaaaatgctgtttacatgcaagcatgatgtatcattttttctcagaggtttaaatagttacccattattataataaggagaccatcatggcaggttcatcatacggaaatatttttaaggtaacaacatggggagaatcacacggaaagggcttaggtgtcgttgtggacggcgttcctgcggggcttgagctgtgtgaggaggatattcagatattcttaaacagaagaaagccgggacagtctaagttcactactccgcgcaaggaggatgatgcggttgaaattctctccggtgtgtttgagggaaagactacaggtacacctgtttctatggttgtgtggaataaaaatcagaaatcaaaggattacagtgagattgcttcatactatcgtccggggcatgctgacttttgctttgatgagaaatacggcttcagagactacagaggtggaggtcgttcttcgggacgcgagacaataggccgtgttgcagcgggtgctatcgctgtaaagatgctctcgggccttggcataaaatttcttacatacaccagatcaataggtcctgttacaattaatgatgttaattttgatgcccatgagatttacaacaattcactttatatgcctgatgccgatgcagcgctaaaagcttctgaatatctggaggaatgccttaaatcactcaattcctcaggcggtgtgtgtgaatgtgtcatcacaggtcttcctgtcgggctcggtgatcctgtattcgagaaaattgatgccaatctggcaaaggctattatgtctatcggagctgtaaagggcttcgaaatcggcgatggctttgatgcagcaagagcaaccggacttacaaacaatgatgcctttattatgagggatggcgcagtttcaaaagagacaaatcactccggtggtactctcggcggcatgacagacggctcaccgcttattttcagagctgccataaagcctactccttcaatcgcagctacacaacgcactgtaaataaatccggtgaagatatagagatttctatcaaaggacgtcatgacccgattatcgtgccacgtgctgttgttgttgttgaagctatggccgcaattactattgcggatgcactgcttataaatatgggagcacgcatggaccgcatcacagatttttataaaaaattataactttgtcctatattaaaaagcatctatccggtttttccggacagatgctttttatctatttcattggaacaatctgtaatgtttttcctagtgaattcaaaatatattttagaatatatttccaatgagcagcggattaaacagaagatactgcgcattcgtcaccccaaaagccacaagcgccagtggcagcacaataaaaaggacgcatgatataatcacagacatgccgcttcttaagtatttaaacattgcaaaaacaaacaggctgaccagtaatccccctataaagcgcatcagcattatcataagtatatactgccctaccgatatattctgtgaaacacgccacagatgctccatacttgccgccggagcattaagcccctgcgtgccatatgccaaaagcacattgcacagccgcacaatgtatacaagtgtaaatgctgtgacagtgcccaaaaagccaagtatgcatttgattcccatatgctgcttcctgccacgacaggtagtccttaaaagacggatttcatggtttgcataatccgctccgcatataccgcaggctattgctattaggagaataacatacacaaaggcctgtgctgtatcacggtttttgaagtctgttctgtcggtaagaatatcatagcccttttcaaaaaacagccagccctcatttaacgtcttaagataatccacatgtgctgtaagcttgttgaatgcctcctgtctgctcagttcatccttgtactttatattgatatagctttcactcttcccctgtgccatatcgtaagcaatgttatctgccagccggtcgtattttactctttcttcatccagaagctcattggttttggcagttaaaggtccataatatttgtccatatattccttgtaatacacctcatcaaccgagtcataggaaagcttctctgccggattccaccataccacaaaaatagctgctacaatcaatataagtaacacttttcccggaacaagtgccttatagcattcgtgcaaaaataaagatgtatggcagcctgtatttttaccgcaggcaaagccgggcagtaaaagcagcttcttttcatgcaccgaattgagataatttgtaaccgcaaaaatacatacagctatacacacaagccagaataagccatacaataccccggtattaagcggatatccaaacaaattgatattgacataatcagaaaaaagtctgcctgtcctgactccatacatgatatttatgtacttaaggaaggccaggaagctggttcctgatatcgttgtgtagcagatagcctcaataaccacggtcactgcagaagcaacgaacacaaatataatattgtcaagcgctgcgcatatcagcataaaaaacatgccaagcaatataaagcttattattttcacaggaaaatagcatgccagaaattgtcctatactaagcttaaacggactgccatagtacagataaacactttgaagcggacttttcagatttatcggattgtaaaagcacatgcttatgactgcattgattccatacaatagcaaggtgataagaatgaccgccataatcatcacaaatgactttgacgccataagctgccttctgccccttgcagttgttctaagcaatgcaagctggttctcgcttttttcataaaacacaagattgagcgcaatgataaaaagcataatcacagccacatagtcggtaagctcattgtctgtaatattcaaaagtcccgatgcatcaataacctcaggcactgtacctttaagcttactgtagactctgctcgttttagcagcatttttctctgcgaagcctccattgccggaaaacttattcataatcgaaatctcgtcagccttttcatttacagagtcgagatactcatcataagacagacatgctcctacttccttgtataccctgctgcacagactaatcctgccgtaagtttctgccgtcatctgcctttgttcaatttccggcaaaacctcctcacggctgtaattgcttatttcgccatacagcgcgctgtagtccttatctgtatacccatcatcatttacggtattcatggtatacagtccaagaacaggattaagaacaagcaaaaacaaaagaataagcactgttcttttagtcaatagtttacatatttcgttttttactatatccattttcagtccccattaagatacaaatacaagtcctcaagatttggccgcacagcctccttctgccatctgccatcatacgaatcggcaataatgcgggctatgacaccgtctgcatcccttgaaatattgctcaccttatatccggtgttcacctcatctatctcattatccgataaaaaaatattccatacctttccatccagctccttaagcagctttgacggagaaccactccttattattttgccgttgcttaacataacaatctctttggctataaactctacatccgtaaccacatgagtcgcaataataacaatcttgtcctttgcaacctctgatatcagattgcggattctgattctctcctttgggtcaagccctgccgttggctcatccagtataagtatgccgggattgcctatgagtgcctgtgctatcagtgctctctgcttcattccgcccgaaaaagctccaagcttctttccaaggacatcatcaagctttaccatgcgcacatagtgatctatatcttccccggcttcactcttttttaatcctttcagggatgccataaagtaaagaaaacgcctaagactaagctccggataaatattctgctgctgtggcatatatccgagaagcttcctgtattcacttccaagctcgtctatgccccttccgtcaagcagcacacggccttttgatggagtcagattgtcagaaatgagattcatcatagttgatttaccggctccattaggtcccaaaagcccatatatgccgggtgtaaatgaaaaagacacatcatccagcgcagttttatccttataaacttttgtaagcccctccaattcaagtgtcattgtttatattcctcccactggtttcttacactgtcaagatagctgtccattccatctgctgtaagcttttcctttgcaccttctatactctcctcaaccgacttaccatttaagccattcatgaaatccgaaagatcatttgagatattgttcaaattctccgtatcaggctcaaaaccgataaacggagatactccggcattgtcataaagggcaaaaaactcatcttttcgattttccatgtatctttcacctgttaccggatatacatttataaacagatccagacagagcttacttaaatagtcatcctccagatcagtaccatccgtattgcatgcaacaccgtctacgaccttgtaatccgtgccttcctgtccatacaggagaatatctgcgtactttccgtttccatataacagacctaaaaactctaccacagcatcgacatccttagtgtttttcgctataccaatggatgcgtttacccttgatgtcagataatgctctactgtttttaccgctatattatctttttggaaattctcgtctatctctccggaacacaaagctacaacaaaattgccggacttaacattttgtaatatttcctcattatttaatccgatattattaaggtatgttatctcaccggtctcatcgtccttcaggtatccgtcttttttcatcttatcgagccccttaagatattccgtaaacttttgcgattccagtggattttcgactgacatcgtatcataatcgaagcaaagtccgtttcttatctcacagccgatcatatctccaaatacatattcgtttatgagatattgaaatcccggagctttgctgttatcccactctgaagccttgagtatctgataaattccatctatgcttccatcccacgaatttatgacatcatctgagatataatccctgttaaatgcagcataaactccattatcatctgcaagtgccgatggtatggaataaatatgtccgtcacattttgccatctcccaaagattctttgggaaagcatcataaagtgtctttccctgatctttcgacaaaacatcatcgagatttaagacaagatccgaacttataaggtcatataccggattatttccattctcatcgcctaaacctaaaaatgcaacatctgtttccccggcagcaaaggcactttcaagcttctggctgtattcatcatactccagatattttatattcagctcatagttgtagccatcactcataagtgcagcattaaactgcttaaggttattctcatcaatcctgcaaatatcgggtacagcaaatgttatgacctttgtatccgactttttgactgttgtctcggtctgtccctctttaagttttcctgaatcgcctgcttttttattaatacataccgctgctactgccgccacgatcagggcaatcactacaactgctattaaaacaccctttttcttattcttcattatagcacctcaattttctcggattaaaattgcctttattcagattatcaagacttataactccaagtgaaaattcgccttcatcatcagtatagttgacatataccgactgaccgcatatgttttcaataccaaatgccttttcagtagacagcttcatcagttcttcactcttatcatccttcaagcggtaatatgtcacttcatcactgttttcttcagaaagggcataatatagaaaatctccgctcttttttaatggtccatattgtgtttttccatccgcatctatcggaagctgtcttgtctgtctgctttcggtgtcaaacacaaaatatccatcctttgacgaataataaccatcgccatctaacagcctaagattgttaatatggtctatttccgtcagacatgttgtcttttcatctgctatatcatattgatatattccattaagcatattatcgtaggcaaaagactctgcatcagctgtcgccccctcctctatcatcagctctgtaacatcatctccaaaccgcacagtcgaatagtacactgcaccgtcttcataatatatgcccataatatttgcctgttcgcttgttatcttatcactcatatacaccttgtaattatcaagatctataacaaaaataccggcttcaggcttatcatcatttataatctgtccttcatcattaagctccacactgttgctgtaagctcctataacataattatccctgtacaaaacagccttaacatgttgaacattctctaatttagctgttttttttcgattctcaccattagaatccatcacatacagatactgtattgtcatgtcttcatctgacatatttcctataaaatagagatgatcattgtaaattaccgctccagcttttgacgatccataaaaagctgcagggcatgaaggattctgatttgttcgcgagtatccttcatgtgtgcagtttggcttgtcacaatagacaatatccttaccggatgctgtatcaataagatgcaatattcccgagtcatcaaaatagaatacattatcctcagagtagttatattccggatttacattggaatatgtgtacattgtattggatgtactgcggtttctattctttattataaaaaccgcagccacaatacagatgataagtatgaagatgattgatgcgattaatatgcgttttttcttcatagtgcccctccctttttgataatattatacataaaacaaattaccccgaatacaaaaggcgaaattagtacttttcaaggtgaatttattaaattttcatcaatattttcacggtgaaccgttcatctgaacactcaaaatccagtgtgcttatatatttatcaagcactttctttacattctttaatccataaccatgttctattacagattgttttgtcgtaaccggcaatccccctttaaatatcactttttgtaaacacctgttactaatctcaacaacaagtgaatccattaaataattaatttccaaatctatgcttggattttttacatctttttgtgcctctatcgcattctccaaaaggtttccaaaaataatattcatatcatatgccgataattttaaatcactcggaaccacaacttttacattcaactgaattttcttatccaccgcacgctgaagcatataatttaaaactgtatcaagcgccgtatttcccgaatcaaccagccgccttgattctacaagattattctccatagctgacacataattttttatctgttctatttcgcctgttgaagcaagcaccgaaatctctgcaaaatgacgtttcatatcatggcgaaacgatcttaatgcctccatgttttcattctgaagcataatctctctttcataagaactaacctgatctctaagtgcctgattttccaaagccttctgagaagacttaacaagatcatccatcagatatgaaataataatattcacaagcagaaatgctccgcacactaacgaaagagaaaatgatgacacggttttatccataaatattactattgatgttataatacatactaataacgacgcaataataaacaaccaatagcgattattcagctctatgcctaaatcattttcaaaaaatctttctgtaatcaactgtgtagcatgcaataataaaagagcaaatatacttacaaaagctgaatatccatcatatccaaatggttttatcaaaaatgcacttactactaaatctatgagacagcttactgccaaaatataaaaaacaaatatacattttctttttatcgtaccattatatgataaagcaattgctgacagccctaagaaaatactaaggaaattaaatatcggtttatgaaaaaacaagtttacaaatatcgcaataaaaacactaaataaatatgcaaatacctttcgcactctgtttccatcattatcaaaaaaagtatgagtaaatctttctgcaataacagtctgagctacctttgtaaacaaaataaccattgctctttcaaaagtcatatcacttccttactccttccatagttaaaaactgcttgcttaaatgaagcccttttagactgtgctatacttatttccataccatttttcagtaaaacagcatcgcttttccatgatttaatacattttatattgactatatatgacttgcttatgcagacaaactgaaacggaagatttgatacaatatcactaagttttccataataagatacactttcaccatcagttttacatatagtaatagttttatttctgctggaaaacaacataatttccccatatggaatagaatatcctgtcttattatatgtatatctgaattcttttttctgcacatcttcaagttgtaatattttagtcatggtatcatacaaaacattatcatctatcggttttataaggaaatcatatggatgaatttgaaaaagttccatagcatagcttgttttatgagaaataaacacaatattcatcctgtcattatgaagcgtttcccttatatattttcctgcataaaccccattatcacccggtaactcaatatccagaaaaagtatctgcggattgaattcttttatgtctctgcataatgacatagaatcataccatacttcaacctcgcatttttcagctctgttattaaaatattcaataattattttttcgagtacagcgcactgattaatctcgtcatcacatattgccactttataaatcatttgttatttttccttctgttatcttactccaaaattactttttataattttatctaacataatagataaaatcaacaatccatgcacaaaacgaacattttttgcagaaaatggacataaactatggtcacatattataatgggataataatagaaaaactaaattcattgttctcatttttaataacatattcgccattgtatttttctacaatttgaataatattttttataccaatgccatgcatttccggttcatcttttttacttgtttttatttcattatcactgtaaataattggattactgcatgtatttttcactgaaagaactataagattttcctctatcacaaattttagttttatagttttcttttcctcacatttttcacatgcttcaatggcattatttagcagatttgctaaaatcactaccagatcctcatcctctattacaatttttgataaatcatttaccttaaacacaaaaacaatattcttactgatagcctcctgatactttgtattaagaatcgcatttattatcacatgatttgtattgattacatttttttctccaataaaagtattgctgatatttcctacatatttacttgccttgtcatattcatgagctttcaataaagattctatacacaatatatgatttttaaattcatgtgactttttcttctgaatttcataattttccgaaatagaacggtacatatcaatttggtttttaaactgtagtcccaatatttccttttcatgcaatttagcttcactggttacaatatcgttaatcaggaaatatacaaatatattcatcacagccaatcccaaagagatagaatataaaacgttcgcctgcacttcattttttgtatattgaaacgtcataatcattgctataattgtaattattgtaaatacaggaaaaaacataaatcttccccatattttgtcaggtaaagtctctgttgatttttttccaaagtgtttttttagcagtaagatacataaaaatacggtaatcttgctaaaaataacaaccaagcttccctctaacgcatatcctttttgtacctcacccgcttttgaaataattgtgttattactaatataagctatataatcaactatgattgataatccttgatataataatgcaaaaatgactgatttttttatactaatttcaaaataaaaactcataattataactgcagccagtacaaccaacgtcattttcaatataagcatatcagacaaaaataatccgcataaataatagcagcaaatcaatgatagcatcagcaaaactttttgactttttcttaatctcgaattttctttgcaaaaaacatcgtaaaataaattacaacatatcgcttcaaatataataattactaaactgaaaaaatatgtaaacatatatcacaattctcccttatatgaaatgaatgcatccttcacattcttatatcttgccttaggtatgagcaattcctgattattacataacagtactttatagcatttaacactcctaatatatttcaaattagtcaaatagctttgatggattctaataaaatggaaatcttttagttcattttccagctcatttaatgtgccatataaattatagattttgattttatcctccatgatatagaattgcagtttatgtaatttgctttcaatatatagtatattgtctatattaatctccttttctccttcattgaacttgaattttttcttttttactacaaaattcatcttatgaagaatggcatccatgcattcgcttatggaagcctccaaattagtattatttttcaacaggtatcttatggcatcgaccttgtagccctccaacgaataatttatataagctgtcacaaatacaatatatatttcagaactatattctctgattttttgtgccgtaacaattccatcaacatcatccatattaatatccaaaaaaatgatgttgtattgtttaatttcaattcctaaatcaattatttccttacctgatgaaaatgtatctatttcataagaaatctctttttcgtttaaataggctgcaacatatttatttatattatctctaaatactttttcatcatcacatatagctatttttaacattttttctccattactatctgttgtatttcagttattgtttcaacaaattttcaaataatccgtatttttttacgaaaaaaatccgcaataccataatttagtatagcggattcattcctaaaaaacaattattttaatctaaagcgatagcctcattctcctgacgtcttaaaatatcaaactcatcaggtgtctctgacagctttacatagaatatctgctgtggatgcgggcaggattccatctcattgccatcctcatcaacgagtgcaagcactgttgcaagcacattgtctccgtttggcttcatgatttcaatctgctcgccaaccgagaacttgtttctctgctccatgcggtagagacctttttcatttggagcacctacgataccgagataggtgtagcccttctcataagtattgttatcgtatatctgagtctcctccgaaggctttccgtagaaaaagcctgtggtaaactgtctgtaggtacagctctttatctgctctaagtaccatggcatatttgcctcgtatttctcaggtgactcaagataatcatctatcgccttgcgataggttcttgctactgttgccacatagagagcggtcttcatacgtccctctatcttgtagctgtctattcctgcatcaatcagatctgggatatgctctatcatgcaaaggtcctttgagttgaagatatatgtgccacgctcattctcgtataccggcagatactcacccgggcgcttttcctccacaacagagtatttccagcggcacggatgtgtacatgcgcccttattcgcatcacggcctgtgaaatagttggaaagcaggcatcggccggaatatgagatacacattgctccgtgcacaaaggtctctatctccatcctgtcatctatgtgccctcttatctcctttatctccttaagcgaaagctctcttgctgtcaccacgcggctggctccgagattccaccagaactgatatgtgccgtagttcgtgttgttggcctgtgtgctgacatgtctttctatctccgggcagacctcctttgcaatcatgaaaactgccggatctgcaataatcagtgcatcaggtctgtccggcttcatgttgtgaagctctgtaaagtattcgcgcactccgtcaaggtcatagttgtgagccaaaatattggcagtaacatacactctcacaccgtgagcatgtgcaaaggcaacgccctctgccatctcctccattgagaaattcttggccttggcccttagtccaaatgcctctccaccgatgtaaactgcatcagctccatatataactgctatcttaagtacttccaggctgctcgccggacaaagtaattctatttttctcattttttctcccatacagttttgtattcatcaaatctttgttgacaccgtaattccatcacctataggcatcactgccgtcaccagctcatcggagtgtgtaagctcgtagagatactccctcatacgcttgtagatggtacggtttctgcgctcaacgatatagtgcgattctatgatatcgccatcctgcagcacattgtcggacaccagcacaccgcctgtccttaaaaggcgaagcacctgcggcataaagttgatatactgtccctttgccgcgtccataaatatcatgtcaaactgtccttcaagctgtggaagtatctccgttgcatcgccctctaagagtgtaatctgctcctgctttccggctctttcaaagttggcctttgcgataggtattcttttttcgtaattttcaatcgtcactatctgacaacccttcggtgcatactctgccatcaaaacggcagaaaaaccaaccgctgttcccacctcgagaatacgcattggtttttgcattgcaagaagcagctttaaaaagctctgcatctcttttctgataatcggaacgaagtctcttaatgcttccttctctatctcatctaatacaggcgtgttgcctctgtccaaggaattgatatatgtgacaagtctctcatcaactatcattcttgtatttcctaatctgattattgacacaaatgcgcttaacggataattactgtgtatccgaaggctccgtagtctgtgtctgttcttcatcgctcttgtcggaggacatgattaccatcatatcctttgccgtcattgaagtgttgagtgtgtatattcctggctttatatgtcctgagtaagcagacagcttaagctggagataaaataaattgtgatcccttacaaggcccttgtcctctaaaagctgtccaagctcctctgcggagatgcccttttccacctgaacgagtacatcctgaccatcgccatttgtcatggcaggctcagtaaaaactctgtagccaaaatcatagcagatgctgcagatttttatgcccgcaaacagcactaaaagagcaatcattattgaaaaagcaacccttataaaaccaaataaagccttgttaaaatccataagctgttcctacacttccataattataggtataatcatcggtcttctctttgtttccttccaaacaaagtctcccaatgcatcctttacctctgtcttaatcttgccccagtctgtcacattgttgtctgtcagacgctccattgtgtcatccagcacgcattttgcctcatccatcaggctctcagaattgcgcacgtatacaaatcctctcgatacaatatcaggacctgcaagcagctgtcctgagcctgcctcaagtgtcatcacaacgatgatgattccgtcctcagccagacgctgtctgtcacggagcacgatatttcctacatctcctacaccaagtccatcgaccatgacattgcccacatgcactctgcctgtcaccttggcaccgtcctcattgatttcgagcacatctcctgatgaaaggatcttgatgtggtctgtatcatatccgagctgctcggctattttggcctgtgccacaagatgcttgtactctccatgaacagggattgcgtactttggattgacaagagaataaataagctttatatcctcctggcacgcatgaccggaaacatggacatcctggaatataacgtctgcccccttcatcatgagctcattaatgatacctgtaaccgacttctcatttcccggtataggatttgagctgaatacaatggtatcgtttggctttatggatacctttctgtgggtaccgtttgccatacgtgaaagagctgccattgactctccctggcttcctgtcgtgatgatgacagtctgctcatcaggatagcttctaagctgttctacatctataagaatattgtcaggcagcgacagatagccaagctctgaggctatcgaaatgatatttaccatgcttcgtccctcgatggccacctttctgccatacttctccgcacagttgataatctgctgcacacggtctacatttgatgcaaatgtagcaatgataattctgtttttcctgtgatcctcaaagatgccgtccaatacctttccgacagacttctcagactgtgtgaagcccggtctttctgcattggtactgtcgcacataagcgcgagcacgcccttctttccaatctcaccaaaccttgcaaggtcgattgcatctccaaatacaggtgtataatctaccttgaaatcgcctgtatgcacaactatacctgccggtgaatatatagcaagcgctgctgcatcctggatactgtggttagtctttataaactcaaccctgaagcagccaaggttgatatgctgtccatattttacgacttttctcttgacagtcttgagcatgccatgctcttcaagctttctgtcaataattccgatggtaagctttgtagcgtatatcggtacatttatctcctttagtacataaggaatagcaccgatatgatcctcatgtccatgagtgataaagaagcccttgaccttatcgatgttctccttaagatatgtgatatcagggataaccaaatctattcccagcatatcgtcctcagggaatgataatccgcaatctactacaataatactgtcctcatactcaaaggcagtaatattcattccaatctgctctaatcctccaagtggaatgatcttaagcttacctgtattctgtttttctgttttcttcaaaatattacctccaaatttatttcacgtacaactgcaatcctaatattcaagtgcagtgtcatcatccgtaagctcagaaaataccttagcaatagccgaaaactcaacatcgtcttcaaccatctgataaagcacctcttcatcctttgtgcttacttcttttaaaatatatgcttcacagtctccgctttcttctccttcggaaactaaaagatatcgtgttccattaagtgttgtctcttcttcaaccgcaaactcgacaacatcattagtctgcgggtcagtaaatttaattttctgcataaaaactaagaccgactatttgacagataatccaaatatccctgcaaaataaaaatcgctgctatctcatcaacaaactccttgcgattctccctgcgtatgccggtttccatcatagaacggtcggctgcgactgttgtaagacgctcatcccagtatatgacctcaagacctgtgcgccttgcaagcatatcaccgaactccttcgtcttctcgcagcgttctccttccgtattattcatgtttttaggatagccgagcacaatcctgtccaccttgtactctgcaataatctcctcaatacgtgccaaagtctgtctgagcttggatggcgacttcctgcgcactatctcaacaccctgtgctgtgattaagagctcgtcgctcaccgctactccgactgtctttgaaccaaaatcaagacctaatatcctcatattaatcccatgcgctgttctcaatgtatgtcttgagaacctcctccacaagctcgtctctctcaaccttcatgatgagacttctcgcgttattgtggcttgtgatatatgttggatctccggacataatatatccaacaatctgattaacaggattgtagcccttttcctttaatgccttgtacacaatctcaagtacatcgcttacctgaagctcaggctccttttgaactgtaaaaaattgtgtgttgttaatatttttttccatacgtttcgcccttcttgtaatattattttattataaatgtaataaaattacaaccttttattattcgaagagtaatatttcgtctgtaagcatacccgatatacggcctgaaactatctgattttcaaggttttcgtcagttttcttagcgaccttgacatattccttagtatatccgacaaagtattctttatcaccgattacggccttttcctcaaaaagcacctcctcattctttccgatatagaatttcctgaactccttagacatgtcatgaccgagtgctatgagcttttcgcttcgtgccgccttaatctgctcatctatctggtcaggcattactgctgcgcgggtgccttttcgctttgagtacttaaagatatgcatctcataaaaatgtatatgctcaagatatgcctcagtctgttcaaactcttcctctgtctcaccaggaaatcccacaatcacatcggttgtgatggccggatgaacaaaatatttacgcaaaagctcacagcctctctcgtactctttagtggtatattttctgttcatcctcttaagtgttgcatcgcagccgctctgaagcgacagatggaaatgaggacagattttatcaagctttgaaagctcgctcgcaaagtgctctgtcacaatcttaggctcaagtgacccaagcctgatgcgctctatgccctttactgcgttcaccgcctgtatcagctcaagaaggcctgtagcttcctcaaaatccacaccgtatgagcttagatggatacctgtcagcacaacctccttgaagccgtttgccgcgagcctttcaacctctgctattacattttcaaacctacggcttctgacacgtcctctggcatacggaatgatacaatagctgcaaaactgattacagccgtcctgcaccttgatgaaggctctcgtgtgctcctttgtctggtctataaagagctcctcaaaatcatgctttccatcatttatatcgtccacggtatcgtttacactgtccaaagagtattcctcaagcagccttacaaggtcatgctttctgtcatttccgatgactatgtccaccgataagtcgtttaatacctctttttcacttgtctgcacatagcagccggctgccacaactattgagtccggattatttttctttgccttgtgaagcatctgtctggattttctgtcagccatgttggtgactgagcatgtatttatgacatacacatcagctttttgtgtgaatggaactatctcatagcccgcctcctcaagcagatgctgcatggcctctgtctcatatgcatttactttacatcctaaattatgtaaggctgcttttttcattttatttttttactcctatttaattgacttttccttaaaaaactattactatctatatgacagtagttatttaaggaggttttcaatatgaaaacagtacagatttcattaaattccattgggaaagtaaaatcattcgttaacgctattactcagtttgatttcgattttgatttaatatcgggcagatatgtcattgatgctaaatcaattatgggtatcttcagcctagacctctctaagccaatagagctcgctatacatacagaaaccggacttgacgagattatggaagtattaaagccatatatcatcgacgaagccaagtaatacagacacaatgatttgattaattaggacctgaagctcaggtcctttttattttgctctaaggtggcgctgattactcagcatccaccataatcacttctgtagtatctatagctgtcttcataagctcatctatcacatcgttaagtctttcctcagacttcttaatcctgtttatatttggctttgtaacaggatgctttgctacgaaaatagtacagcagtcctcatacggaagaatcgatgtctcataggtatcaattttgtttgatatatcaatgatatcattcttgtccatggcaatgagaggtctgtatacaggcatatggcacacctcgtttgttgcagcaagcgactgcattgtctggcttgcaacctgtccgatgctctcacctgtgataaggcctaagcatttatcctcatcggcaaagtgctctgctatcttcatcatgtatctgcgcatgatgatggtcagctcatcatgaggacatttctcatatatggcaagctgtatatcggtaaaattgacaacatgcagctttatcctgcccgaatatttagcaaccttctttgcaaggtctacaaccttctgctttgctctctcactcgtatatggcggtgcatggaaatatgtggcattgattaccacacctcgctttgcaatcatgtatcctgcaaccgggctgtcgattccacctgagagcagaagcattgcctttcctgctgtgccaagcggcataccgcccggtccaggaatctcctctgaataaatatttatcataggtctgatctctatattgatcataacctgtggattatgaacatctacccttgtctcaggaaatgcctccagcaccttttcaccgactgcggcatttatctccatagaggtcatcggatagttctttctggcacgtctcgcatttaccttgaaggtaaagctcttatccttgtatacatggttgatatgctcgataactgcttcacagagcttgtcaaagccctcatcctcatgcagctcgaccggacagatacccacgataccaaaaattcttgacaatgtggcaactgtctcgtcataatcatagtctccgtctgtctccacgtacacacgtccgctttcctttcttacctcaaagcttccatccacattgcgaagctgatatttgatattcttaacgagcgcgtcttcaaaaatgtatctgtttttgccctttatcgcaatctcagcatacttgatcaaaaatgtcttgtacatgtaactctcctattctggttttatttattatttattatttttaattacttaatatttcattgtatgcgtaactttttagccattcatgattaccggctatgctaatacctgcgatctctttgcagctcattagcgccttgtatatcttcgcagcattggtatcacctctgccatcactgatacagcgtaatcaatttcctcctgtgtggtattcacgcaaaaactgaatctgatcgtggaatccaaaagtgacggcttaagccctatgctctttagtgttgaactgattgccggtttgtttgatgaacaggcacttcctgcagacacatatatctgcctgtcctcaagagtatgaagcataacctccgctctcacaccatctacgctcacgcttaccacatgaggtgcatttgtatggtccgtgcgtccatttacagatactccgtcaatacgctgcactgactctataaaatgatccctaagctcatacatatgtgctatttttttatcaaaatccgtgtaaatttcctctgctgccactccaagacctgcatatgcaggaacattttccgtacctgagcgcatgcccttctgttggccgcctccgtatataatcggcttgattttagtcttgtcctttatatataaaaaaccgctgccctttggtccgtgaatcttgtgtccactgactgaaagcatgtctatattcatgcgctttggtctgatttcaagcttgccgtaggactgtatggcatccacatgaaaaagtgtggcaggatttttctcttttatagctgctcccgcctcctcaatcggcatgactgcgccaatctcgttgtttacatgcataagcgatacaagaattgtatcctcccttacggcatttttcagctcttcaacacttatcacgccgtcatggtttacaggcagatatgtgatttcaaagccctgctcctccagaaactgcatcacagacaaaaccgatgcatgctctacagaagatgtgatgatatgccttcctgcacgcttattggccattgcagcacctattattgcagtattattcgactctgtgcctccggatgtaaatagtatctccttgtcctgcaccctgagtgtctttgcaatctttttcttagcatcattaatataattttctgcctcaacgcccttcatatgaagtgatgatggattaccgtaatcctctgtaagcagcttataaaccatatctgccgctgcttttgagcatctggttgtggcagaattatccaaatatgcttccatttttgctcctaacttctacttcttaactgttaagtatctctactgtctatacatccaaattgtatacaagcatggcaagtgcagcaagtcctgctgtctccgtgcgtaaaatcctgcgtcccaagcttattctgtgcattgtggcatgctcatccacaagtgctatctcctccggtgcaaagccgccctcaggacccacgacaacaccgatagtctgaccagccttaagctgccccattatctctcttgtcgcatccatgccacgctcattctcatatggcaccagcgtgatgtcaagctctgaagcgattttcaaagcttccttgtatgtaaccggctgattcactgtggggatcacagtgcgctttgactgctttgctgcgctctcagcgatagcctgccatctctgcagcttttttgctgcctttttgtcatccagctttaccacacagtttttcatggcaaccggtactatctcagatacaccaagctccacagccttttgaataataagctccatcttatcgccctttggcagcccctgatacagcacgatgtgattgtcaagctctgtgcccatctcatctgcactgtcaatagctgcgatgacctcatcatccagaatcgacgatatgtgacagaaatatgcctgtccggattttgagcttactcttattttttctccgtttttcatgcgcagtacattctttatgtgatttacgtcacctccagtgattgagatgctgtcagaatgaacctgctcttcctctacaaaaaactgatacataatccaccaaactatttagtcagcttctgcgcagtgatattgacccattcaccctgatgattgatttctatcaccttaagccccgctgcttcgatagcctctttaacttcattttccttgaaatctatgatacccgatgtaataaaatatccaccttcctttaacctgtcaggaataacaggtgccataggaatgatgacatcagcaaggatatttgcaacaacaatatcatatttttcggtaccgaccttcttttgaaactctgtatcatctatgagattgccgacataaaacgtgccaagcttctcatccagatgattgacctgcatattgtcacgcgtagaaatcatgcagtcagcatcaaggtcagtacctacaacctcctttgcaccaagctttaaagctacaattgaaaggattccgcttccacagcccacatcaagcactgtaggtgcttcctttgcgccctcaatatacttgataagctgcttgatacaaagctgcgttgtctcgtgctttcctgtaccaaaggagattcccggatcaatttctatcataaatttatcctcatcctcaggctttacctcttcccatgtaggcttaatcaatatatcaccgattgtaaatgatgaaaagtacttcttccagttattaatccagtcgagatcctctgtctcagatgacgaaattacaccgcttcccacatcaacagtatctcttaaatcctcaagtccaagctttacctttctaagcatatctgactgatcactgccatcatcctcaatataaaagctgacatggcttatgccctcatccggaggcagctccggcagaaaatcaataaacatatccgcctggtcctctttggtcaggggaatattgtcctcaatctcgattccctcgataccaagctccataagcatgctgctcatgaaatcctcagccgcggttgttgtctcaatcgtgtatttcttccacttcatataaaaatcctctcttaataaaatagatacatagtataaatacagttttatttcaaaacatttccgtacattttacaaggcagtcatacgactgcctccacaacttatctcatataataccataaaaatgtgctgtataaaagccccatttttttatacgtaaaaataacctaaaaaatgccccgccacacatggcgggacatatattataggatcatctattacagatcatctatttacagatcgtccaaagactccttgagcttatccataaatccttttttctttttagaatcagtagaagctccgccctccttggtcagagaaccgcctgaaagctcatcaaacttcttaagagcctctttagcttccttagacagacctgtaggcgtattgacaacaagtgtgacataatggtcacctcttattgctttatttcttgttgaaggaacgcccttgccctttaagcggatacgtgtacctgtctgtgtacccggtgcaactgtgtatataatatctccatcaacagtcttgattcttatatctccgcctaaggctgcaatagcatacgagatggatgcctttgaaaagatattaacatcctgacgctcaaaatccctgctgcctgaaacaataacttcaacaagaagatctccacgcggtccgccatttatgcccggctcgccgtattcacgtattctgacacactgtccattatctataccggctggaatctcaacagtctttctgaccttcttggtattgtagcctgtaccgtgacatgtaggacacttatcctttactaccttgcccgaaccaccgcaggatggacatgttgtgacattctgcactacaccaaacagagactgactctgtctgacaaccttacctgtaccattacactgggtacatgtctcaggagatgtgcccggcttagctccgtttcctccacatgtagagcatgtctccttatagttgaattcaagctcctttgtacagccaaatatagcttcctcaaaagaaattcttacactgagacggacatttgcaccctgtgcaggaccatttcttctgccactgcttcttccacctccgaagaaatctccgaaaatgtcaccaaaaatatcccccatatccatgcctgagaaatcaaagccaccggctccgccgcctgtgccatcaaatgctgcatgaccgaactgatcatactgacgtctcttatccggatcagacaatacggcataggcctcctgagcctccttaaacttctcctcacactctttatcacccggatgaatgtcaggatgatatttctttgcctgctgtctgaaggcttttttaatctctgcatctgtagcggtcttagatactcctaatacctcataataatctcttttttctgccataattgaaaattccttttattatacaactaattcgcaaggccggccaagcggccaaccttgcgagtaattttacttacgcagccattatgatgctttgattgataacccggattacaggtcattaatcctcatatcattatggcagcatctgtttaattatacttccttgaaatctgcgtcgatgacatcatcatctgcaccgtttgaagcacctgcattcatatcaggacctgcctgacctgctcctgcattcatatcaggacctgctcctgctgcaccctgtgctgcctgagcctgctcatacatctttgcaaataccttctgcgcactctgtgtgagcttctcctgtgctgccttgagctctgcaacatcagcctctgtcatagcctctgcctctttatgtgcatcaaggaatgacttaactgctgcgatatcagcctcaactgctgacttatcagcggcatcaacagaatctccaacctgctttaatgcatcctctgtctggaatacaaagctctcagcatcatttcttgcatcgattgcttcttttctcttcttatcctgtgcctcaaactcagcagcctctttaacagccttatcaatctcatcatcagacatattagatcctgctgtgattgtgatgtgctgctcttttcctgttccaagatcctttgcagacacatttacgataccatttgcatcgatatcgaatgtaacctcaatctgtggaactccacgacgtgctggtgggataccatcaagtctgaactgtccgagtgatttattatcgcgggcgaactgtctctcaccctgtactacgttgatatcaacggctgtctggttatcagcggctgtagagaatatctggctctttcttgtaggaatagttgtatttctctcgataagtcttgtagcaacaccacccattgtctcgattgaaagagaaagtggagtaacatcaaggagaagtacttcgcctgcaccggcatctcctgcaagcttaccaccctggatagaagcaccgattgctacgcactcatcagggttaagagacttgcttggctcttttcctgtcatctgctttaccttgtcctgtacggccggaatacgtgtagaaccacctacaagtaatacctgtccaaggtctgcatttgtaacgcctgcatccttcatagcgttctgtacagggattgctgttctctctacgaggtcatgtgtcagctcatcgaatttagctcttgtaagagtcatgtcgaaatgctttggtccctctgctgtagctgtgatgaatggaaggttgatgtttgtagtagtagctgaagacagctccttctttgccttctcagcagcttcctttaatctctggagtgccatcttgtctgtagaaagatcaacaccctctgccttcttgaactcgtcaatcatccactgtgttaccttgttatcgaaatcatcaccaccaaggtgtgtatcaccgtttgtagataatacttcgatgactccgtcaccaatctcgatgatagatacatcaaatgtaccaccaccaaggtcataaaccataatcttctgctctttctcattatcaagaccataagcaagtgctgctgctgtaggctcgttgatgatacgctttacatcaagacctgcaatcttgccggcatcctttgtagcctgacgctgagcatcgttgaagtaagcaggtactgtgataactgcctctgtaaccttctcaccaaggtatccctctgcatcagcctttaacttctgaagtaccatagctgaaatctgctgtgggctgtagctcttgtcatcaatctgcaccttgtaatctgtacccatatgtctcttgatagaagaaattgtcttctcagcatttgtaactgcctgacgctttgcaggctcaccgataagtctctctcctgtctttgtgaaagcaactactgaaggtgtggttcttgcaccctcctggtttgctataactgtaggttttccaccttccataactgctacgcagctgtttgttgttcctaaatcaataccaatgattttgcccattttattttcctcctattaaatatagtgtttttacatgtttaatatatttgtaaccatccgttgtctcacatgaatcccttaaatgctgtctgcattcatataaatctgattcactgtcatgccggatagatgtacacatcattactgtactaccgataccatgctgtggcgtaccactgaatccttgtacatatagcccttctgaagctcctgcgctacggtgcctgactcaagttcatcattttcaacctgcatcactgcattgtggaaatcagggtcaaactcctgtcctacgcactctattggctttacacctgcagcatcaagctctgtgagcatctgcttgtagaccttatccatacctgtgataaaaggatcatccttcttatcatccggtactgctgcaagacctctctcgaaattgtcgattacaggaaggattttctcaactattgtctttgctcccatgtcaaacatctgggatttttccttctcgcttctcttgcggaagttctcgaactctgccatctgtcttttcagacggtcgttaagctcttctatctgctcgtccttcttgtcttttttctttttcttgaagagacctttcttttcatctgacttatcatctgcttttgcatcttcatcagctaaagcatcatcatctgattcagtttcattcatatctgtatcttttgcttcttcggctgcctgagtgctttcctcatcagctccttcaatctctatctcttctgctttgctttctgcagtctcattgtcgattgtttcttttttaatatcctctggcatttttgaccaccttcctatgtttcatcctcagacttcttataaattccatctaactgggatttaagagtctttagattatccattactttttcataatccatgcgctttggcccgacaattcctatcgtgccctttacgccctcacccagatcatatgtcgcagtgacaacactgcagtccttcatggtctggattggagattcatttcctatataaacctgaatacctgttccattgtccttcttctcggaatcggatagggattcagtaacaaggcttgctagctcttccttttcctcaaatgctgacaaaagtgtcgctgcattattggaatccgaaagctcaggatacttcagaatatttgtcgctccgctggtgtaaatcttaagatcctcactctcagcgaaagtctgtgccaatgcatcaatcacatcagagacaattcctgaatgaataccggctctctcctttatgcttgctatgtttccaagattaatctcgttcattgcgagtccgtttaatgaggtgttaagcagaatgttgagcttaagtattgtctcattgtcaagcggctcatataaatcaagcatcttgtttctgaccatattgttgttcataacaattactgcaagcaagtgctggtcgtcaacctgtgaaagctggatgaatttcaccttgttgtgattgacatccggtgcagaaacaagtgtggcataattggtattgtttgcaagtaccttcgccgcctgctttaacacctgctccatcttctcggtattttcaatgaccagctccttcatatcagaaagctctttttccttcttatcattggtctctataagatggtctacatataatctgtagcccttatccgagggaattcttcctgctgaggtatgtggctgtactatatagcccatctcctctaagtcactcatctcatttctgattgttgccgagctcagattaagatctgtatattttgaaattgtacgtgagccaaccggctctcctgtggcgagataattgcggatgattgcatccagtatggtaagctgtctctcgctcaactctagttctttgttttcattttccattggtcacacgctccatctgaagtatgcttttagtttgttagcactctgtattttggagtgctaattttttatctgtacataacataccaccacctattagcaatgtcaaccctcgagtgctaatttttttaataaaatttttgaaacccttgattttactagggtttcaggctttataaattttctattaaattgattttagtggttaattcagttattattcctaatcaaaatctgtatgattttatcataattttccggtctgtgtggaaacgtacagtctgtgcataccttgattttttttccattcttctctatgtatgtcttacttccgggacagtttggcatactatacataggacaataacaaaacagacaattaaagtcatccgaaagtcccttgtgacacggaaaatatttgcaatctgtgtttttaaagtatttataagagttttccatttttattccttctatattcatatgcttttcttacaaagctctctgcaaaatgcggatttgacggataatacaggtgcggaaacccaagccagtaattatcatggcttatcacgcaatcgtagcttctgcctgtgaccggcttggtcgcaatacaatcagctccgttatcggtgctgtcgtaataatgaaattcatgcgcctttattttttcatttggcggtaaaaaattgctatgcttttctgcaagctcaatatatccaaacctgaccagctttcccttaaaatggcacccgccatccaatgcgcccacaagctgcgacttattcatatcattttgtatatctgctttgttttgtatatctgctttgttttgtatatctgctttattttgtacatcagccttgttttgctcctctgtatcatcacagatgtcacggatatatgtgtgaagatacataaatcctccacactctgcgaccgtcggcattccggctctaaaagctttttttatgacattcagcatagatacgtttttactcagttcctttgcatacagctccggataaccgcctccaagcagcattgcatcacaatcctttggaaggctggtatcgtgaagcggcgaaaaatactgtaattttgctccacatttttcaaggagcctgaggttatcttcatagtaaaaacaaaatgcttcgtccatggcaacagctatgtttacggtatttattgctttattttgcgaaaattcattttgatcacaattacctatatttttttcattatatacatctgcatttccgctgtcaccgatttcatctgccgcttctgctatatctataaacaaatccatatctattgtcttttttagtctgtcggcagtttcattgagctgtttttttatatctgaaagctcatccggcatgacaagccccagatgtctgcttgaaagcccgatatccttctgttccggaaaatacccgactacttttacggaaagatccttctctatcaaaggctttatgatgtcataatagcccttcgacatccgattgagcagaacccccttaatcaagtgctgagtgtcatactgcaaaaaaccggctataagagcaagcactgactttcccatgccctttgcatccaccacgagtattatcggagtctgcgtcacctttgccagatggtatgacgaaccctgctcatatattccgccaagtccgtcatataatcccatcacgccctcaagtactgcaaaatcaccatcggctctttcatctaagaaaagctgcactgttgtcttttcgtccgtaaaaaacgtatcgagatttttggatggtacgccaagcacctttttgtgaaacattgggtcaatataatcaggtccgcacttatatgatgatacgttttttccgctatcctttaatagctgcagtaaagcgcaggttatcattgtttttccactgccgcttttgggtgcggctatcataaaacgatttattttcatgtattcatcctttatttcatcatataccttaaaatatcagccttcgatgatttattacacgtgttgtagcataaaagcccgggttaaaattcaaacgaacatatccacaccggattttcggcctgcatcagatggtaatgtcctatctgctttgagcggctgacctgcagctgcacgatatcctcatttttcacatcatatgccgacaatatttcctttatctcacaaattgtttccatagaaattgcatttatcactatacggatatgtggattttttgctttaagagcctctattatttcctttagattgccaccgctgcctccgataaatacgtgtgtcggcaccggaagattttccattccgtcaggagcctttgcatttatcacatggatattttcaagtccatgcttttctttattttgtgtgataagctgcacggcattttccttctgctcaatggcatagacctccatatcatcggaaagtgatgcggcctctaccgctatggagccggttccgcttcccacatcataaagcactgaatccgatttcaaatgaagcttgcagatgcttacatgccttatttcctctttggtcatcggaaccttttcacggataaatactgcatcacttagctgcggtgtgacattttttgcaaccggattgggattttttatcatgcagatatacaatccctcccttttaagctttgtgcactcctgtggcgaaagaactgatattttttcatccggatatgatagctggtatcccacagttaccgagcatttttgtaaaccatacctttcgtcactgcttaataggtgtccaagcatattcacatcctttacacctgacatcagcataaacgtttttgcatgatggctaatccgtgatgtgatattagacagctttactccgtggatgctgcatatacacgcatcgttgtaggtttcaccgactgctgccgccatatatgacacagatgaaattccaggaaggattgacacatccgcatttaattttccttcagatatttcattttttatcgccagatacagctttttacttccactgtaaaagcccgtatctcccgagaataatataagaacattactgatttttgcagtatctgcacaaatttcgtatagataaggaataatctgttctgcaagataatacggctttttgtctatcttcgcactgtatttttctatcatgcggcttgcgccaagtataatatcagcgctttctattgcatctgaaacagcttttgtcatacaagcatcatttcccattccaatgccggcaagcatgatatgaagcttgttatatttcctgtcaatatattcacaaacagcttcaaatgacattccatcatcctgcacgctttgccctacaatatagaccggaatatttttattttttgcggcagctattttctcaataaagcccccggccgcaccgcttttttttgtgaccagacatctgatgtcatactggtcaataagtgcctcattaagctgtgtgctaaacggtccctgcaatgccagaatgtgctttcctgtaatatcattgtgcatgcacaagcttatgctctcaagccccggaagcacgcgcacatacaatctttccctgacgtctgaggttttacaatacactgacagctccttgcttcctgttgtgagcagtatatttccgtctgtattgttaagtgccttagcacatgcttcattgtcctcaaaatagcggatattatcataatctgctgatatatccgtatctcttttaagacgcacatattcgatattttctgatatgctgctatccgcctgattgtctgtaacagcatatgcctcgttaaaagcataaactgcctgctttatattttcggtaacaatggctgcatatggatgggttgcatccactatgagcttacatttttgttccgcaaagaagcttctcatgccttcgctgtccatacgccccatatgaacatgcgcgagcggattgtcatgcagcacgatttcaccatactcggttgccacacaaaccgtatgctctatgcctctttcacacagatgctctgatagcttacgtccctctgttgttcctgcaaaaatcagtattttactcaatctgatatcctctccttgtgacaagctttccgtcaattatttgtgtaccctcattgccgataaagactgtcgtaaacatgttaacctgtgcactgcgaagctcaccgagggtacagaccgtatagcttgttccctcacgtccgatattttcgacatagccacatggtcgttccggctctatcgcacgaagcagaatatcacaggctctcatcagatagtcctttctcttgtgacttgacggattgtacagtgctatgacaaaatcaccctctgcggcagccacaagacgcttttcaatcttatcccacggcgtgagcaggtcacttaagctgatggtacaaaaatcatggtttagtggtgctccaagcactgccgcaccactgtttgccgctgtaatgcccggtattaccgaaagctctacgttatcgtattcctgcccaatctcatacataagcgaggccagtccgtatattccggcatcaccactacatacaagcgagactgttttgccctcaagtgcctttttaaagcacagatggcatctttctttttcctgacgcattggagtggtcaaaagctcttttgtctggaatttctctccaagcagctttatatatacggtgtatcccactatgacatcactctcttgtagtgcgtcaacggcctgctttgtcatcatgctttcaaagcccggtcccatacctactatgtaaattttattcatgttaatctccatctctactaattttatataaccatgcagctatttgcaattttttaatgatatgagggtcaaaaggtattttacccctcatttatgattaatcaggataccttgctgccgcaaccgttactctgtcatatttatgctttttatagacaagttttcctgcttcattacattccctgctgcatgcaagcactgctgcacgctcgcacacgttgtccactccaacatgctccctgacaaactgcgaggcactgaattctccctgcaccgccataagctcatccgcggtataagtgacaaaatctatcctgtttctttcgcaaaattcctttattcccggttcatcttttttcacatctattgatgcaatcatgtctatatccgaaatatctatttgtagctttaaaagactttgcctgattgccccgtcaatattttcaaacgctgtatttcttctgcacccaataccaagtacaaattgtgtgggttttaagtaaatactgccacttttcaagtctttttctttttcgcatgatactacaatatcaactccgtaaacaggtgggaaatccactgtttttactacatcagcactcatatcagcttcatctaaaaatgcctttataaggcttctgtgcttagccggaatgtgctcccagtcgaccgacatagtaaccacttcccccgccaatacctttgatgacactttggcaatgccatctttattgactattgcaagcctgcatttcttcgcaaaaacatcaactgcaaatttattattgatatcagtagcggttgtgataacaggggtggcattcatcagttctgctaataatacagcaagctcattggcacctcccatatgccctgaaagaatcggaataacaaacttccccagctcatctatcacaataacaggactgtctttaagcttgttatttacagaagaagcaatagctctcactgcaataccgcatgccccgataaaaatcagagcctttttttcactcatctgtgtggctgcccagtctgatatattttgtgatatgtagccggtatttctataattttcattggtgaaatttttaatattcacatccgataatctcgagcacttggtaaaaacctccacctcatatgcacttttttttagcttatgagctatgtcacatgacagcccatagcccttttttgtgaagcttacaatgcaaattttcatattttcagttcccatatatttcccatatttatatattcacgccttttttcaatcgttatcctttgactctactgaagccttgcgatactctgtcgaaaaatccggtgcgtaaagtcttgatttctcgtaatgactgtgagctattacatcacccacaagcactatcgctgtctttgtgatattgtgcttcctcgctgtctgctccagtgtagcaacagtgcacacgtatgcctcctcctgtggccaggttgccttgtatacaattgcagcaggtgtatctgccgcgtatcctccctcaataaggctttccgtaagcttctctaaaagcccggtgcttaagtaaaccgccatggaagcgtggtgtgaggcaaagcttgctatgctctccttaggcggcaccttcgtgcgcccctccatgcgtgtgatgatgagcgactgggaaataccggggagcgtgtactcaatgttgagcgatgcagcagcgccaaagcacgcgctcacgcccggacagctctcatatggtattaaaagagaatcaagctcatccatctgctcgcgcactgcgccgtatatgcttggctctcccgtgtgcaggcgcacagtcatttttccgtcagcctcagcagctttcatgactgcaatgacctcatcaagtgtcatttttgcactgttatatatttcacagctctcccttgcatagtccaaaagctctggattaacaagcgagcctgcataaattatcacatctgccttttgtaaaagacgcattccgcgtactgttattaaatctgctgcgcctgttcctgcgccaacaaagtaaaccatttttctgcctttctgctttttgcaagctcaccaaattcgtttgaatacatgatacagtctatctcaagtctgccccttgctctcttatccagataaaagcatatgcgctccatcgcataatccattacctcatacagcctgccgctttccttaagtgccgccaaggcctcctctgtcgtaaggctgtccataatgctctttatgtattcgggcgctacaccgcacttaaacgcaaatgccgtcaaaagctctatcctgcagtctgcctccctcgaatgagtgttcatgatgcctcctgctacctttatgagctttcctatatgccctgtcaaaagcatcctcttaaagcccatatcggctgccatatcaattgtttcaccgataaagttggagcatttgacactcctgtccagatcatagtcatagctttccttcataaagtcaagaccgtaatttcccggagcaaccgccacataatcatatccaaacgaatatctctgcctaagctccacccttatcgtatcaataagagcctgtgagctcatgggctcaacaataccgctcgtgccgagaattgatataccaccaactatcccaagccttggattaaaggtcttttttgcaagctcctttccctttggaaccgagattgtgatgtcaagtgtccccttgaaatccaaaagctcacagacctcccttacctctttttctatcatctcacgcggcacatgattgatagccgcgtttccaacaggctggtctaatccgggtttggtgactcttcccactccgtcaccaccgtcaatatttatgataaccaaatcctgcttttttttgcataaagcacaggtatcgtaatgcaaaatccgtacagaagcatatatataggctccggtggtcacatccgggtcatcccctccgtcttttatcacggcgcagcttacctcgttttcacttctttttatgtcggtgatatcagccgtgtaagctattcccttaggtgtctgaatcgttattttgtttttagcctttccggttaaaagcatatatgccgccgcctttgaggctgccgcagcacagcttcctgtggtaaatccgtatctcataatcactaaatttcctcatgcatcagcctctatcaaccagactgtaaatcagcgcattgcatatagcagccgcaatattgcttccaccctttcgtccgacatttactatgtatggcactccggtctccataataagctccttggctgcctccacattgacaaagcccaccggcacaccgattacaaatgcaggcttatatattcctttttctatcatatcgtacagctctataagcgctgtcggtgcatttcctatcgcaaaaatcacaggcttttctatccttgatgcaaactccatgcttactgccgcgcgcgttgtctttttctcctttgcaataagagcgacctcatcatcagccataaagcagtgcgcctgtccgccgaattttgccagatattttttatttatgcctgaaagagccatgttggtatcagtcactatatcagcgccctctgatatcagcctttttgcaatagcaacggcatccttagagtatttaagcgtctgtatataatcaaaatcagcactcgtgtgtatgactctttttgttatcatctcctgatcagcaggcagcgtaatctgcatttcagacagctcatgtgaaattatctcaaagctcctcttttcaatctccatcggctctaactgtttaatttttttcaatacactcacctatcactttcaataatcttacattttcatcataagtctttactgccacacgaaaatacccttccgaaagccccacatagttggagcagtcccgtatcagtattcccttattaatcagtatatcatataatggaagcttgctgtaaaacagtatgaaatcagcatcacttttatataccttaaaaccaagcttttttagtccatctgacagcagccctctttgtctgctcacatacgatgccgtttctttaatatactctgattccctaatgcatgcctctcctgccatctgtgccagaacagacacgttccactccggcagatttctttgaaccttttgtcttactgcctcatttttactgaacatatatccaagccttactcccggaatagcaaaaagcttggtaaaggctcttacaacaatcagattgtcatagtcatataaaagtgacaaaacacaataatttttttcacaaaagcccatgaagcattcatctgccaccacataaatatgcttttctttgcaatgccctattatttgcttcatgaaagtgctgtctgcaagatatcctgtcggattgtttggatttgcgataaaaaatatatctgtatcatctgtaagcatatccattaaagtatccagccgtgcagcaggagaaaaatcactctgctcatccagcaggaaatatccgatatcacagccgactgcacgaagcacatgctcatagccgaaaaagcccggggccagaagcactgcttttttaggctttatggcatgagctatcgccataaaaagctctgaagctccgtttccgggaattacatcctcgctttgtatgctgcagccttgctgtgtgaaatactctgatatcgcttttttaaggccactgcatgccatgtcgggatatctgtctgcatacgaaagtgcatcactcatagcctctttaacagaatgcggtatgccaagaggattgatatttaccgaaaaatccatatttactttattgttgtatatgtcaccgccatggatgcttttcattcaagtcctccatcaattcttccatcaattcttccatattcaaagcaatattaaaacaagactcataaccgccacagatataagctcacacaaaaacgcagtaatatacatcagcctgtttgcacgctttatatcctcgtactctatctcacgcagaccgtctcctatgtattttttcttcacaagcttcccaaaatacactgcatcacccgcaagctgcacccttaaagctcccgcacatacagactctgtctgggctgagtttgggcttgcatgattgaaacgatctcttttaaagatgcggtatgcatttttgccatcaaactgcctgccaccgataaatgccgcagcaatcatcagatatgcactgattcttgccggtatgaaattgaccacatcatcaagccttgccgcaaatctgccaaaatacatatatttatcatttttgtagccaagcatggagtccatcgtattcacagccttgtatacaaagccaagcaccggcccgccgattgccgtgtaaagcataggtgcaatcactccgtcagatgtattttcagctatcgtctcaactgccgcccttgtgacacctgctgcatcaagcacagatgtatctctgccaacaatcatggaaacggcctttcttcctgcatcaactccatctgtccttagcgcatcatacaccctcatgctctccacacgaagacactttgtggcaagaatctgccacgtcatgacagcctctactattaccccggcatacagatttatgctgtatgcagccacaataataattaccgacattgcaaaagttgcaaaaattacagtaaaagcaagaagcatgcctcttttatattttattagatttaattttttttcagagatattatatccggcatcacaattaagcctcttatcgagaaaagaaatgagtgagccgataagcctgaccggatgcggtataaaatgcggatctcctattaataaatcaagcacaaagcctgctataaatgcaaaaatatgataacacatatgttagtccttcttaaataaatcatagcgatatgggcgctatttcattaaacacaatctcattgccctcaaccgccacctcacacgagtagccacagccgtttttcacctggtaatcatagtaatccatatcacagtaatggctcattatcgccatgatagtccctccatgcacaaaaaatactatttgtatctctttatcaggcatagccctcttaagctctaatgcctgtgtgagtgccttctcaaagccacatatacttcttttgcaaaactcttttttgctctctccgtttggaaaggcaagtgttccaccactgtcaatccacgcctgatatgagtccctgaaacggatatctgtgctaagctctttatagctttttagctcccattcaccgaaatccatctctgcaaactcttttacggtataaattttatggtgctgtgcgaccggcaaaataatctctgccgtctgtttacagcgcctcattggactggtaataattatctgctcctttaagctattttcctccaaagccttgtatacaccattatttagtgcattttctagctcaaaaactccggcttcatcgagtggctcatctgtcctgcccagatatctgtgctctctgtttgagacagtgcagccgtgtcttataaaaatacagtttattttattttctgaccgattccacatattacgcgaactacctcgtctgctttttttgcaagcagtatctctgctctgcctgtctgctccctgtactctctctcaaacgcatcaagaggcactatgccgtttccaatctcatcagcaatgactattgtaaccttattttcctctgcaaattgcataaatttcaaaatatattcctgcagtggaagatttttctcaagcacagccctgataaaataatgaaaattatcaattattaatatccgctcatcatcaactgcaaaatcccatggccattccatgtttgatgccttatcattgcaggcattatcttttaaaaaaaagcagtcgtacacatcatatttttctgattcttctatcatattttcaagcacataatcaagctttccctgtgccactccgcctatcacaagcttcatattttctccaattccaaagtttaaaattcaaagtacaacttttatcaaaattcttatccgtaccattcctatatacaaaacaaatatactaaataataaaagagacaccacccagagccactgccatggcgcactcacatatacacacaaaataccctgccgtatcgcctgtgatgccgccaagctccttttttgttttcacataataataccaaaagctaagtgctgccgcaatgatcatagccaccgcataaggcagtgacacaataaataaaacagccatacacagtgcaagctggatgtatagtactgccctgacaatcgttctgtgtgcagtgtccgcaaacataaataacagtccatcgctttttgccgatttaaatgacacaacagctattccgcttaagcaccttgagatgaaaaagcctgcacaaaaaacaataaatgctttatcatccattatctgagaaaaagctcccataaataataatccgtaggctgcaagcattataacggcaaatgctcctatatgtgaatccttaagtattgcaagcttttcctcccgcggtttgtatgaatgaaacgcatccattgtatccataaaaccatctatgtgaaatcctcccgtaaccgctatcggaatgagtgcgcctatgcatacatagcagatatccgccactccaaaatgagagtatatatatttccaaagcataagaagcagtccaatcacagctcctatccacggaaagaataccagcatgtacttcatgtcatcatcattccatttaaattgtggcattggtatctttgaatacatggaaaaagatactatgcacgaccttattaacttcataatacacttaacctccacactacctcacttaaccgcaacaggaatgcctgcaaccacctcaacaacatgctctgccatcgcagcaagccctctgtttacaattcccattgcctttatgtaattcatcgttgattcatcatagcagactccgtcttcaaatacattgtttgtcacaattacaagctccgcaacattttcacttaagatacttacctcttttaacacctttttactcacacggctgatttgagcagtctcataatccttcatattttcaggggcatccaaagcctctttttcggcttcggcagcctgtataccggaagcatctacaggtggaaacatctcatttgcaacaaggtttgacatacactcaagcagtgctgaccgcccggtttttaaacagttttcagattgcagcttttcaactgcctttttaatatcacgaggctgctcgatggtaataaagccttttccggcacgaagtcttctgtgcctgtctatcttccgctgtccctcatcatcaaatacctgcatggtagcaatgtaatatttttctttgtatcccttttcatttgacacgtgacaaatatacttttctgcatatgctgatttgccactgccgctgccgcctgttataagtgtaatcatctatacgtacctctcatactgtgataccgagatatcgtcgaaagttgtccgtcctttgtatacgctaagtgccatatccaaaagcgcaaacatcatcacggcacctgttccctctccaagcgcaagggatgctcttatgacaggtcttacggaaagtgcctcacacaaaagcgccactgcaggctccctgccctcatgggatggaatgataaaatcagtaactccggaaagaagccttcctgctgccaacgctgaaaccatgcttatcactccgtcgagtacaacaggaatatggtataatgcaccgcctatacatactccgacaagtcctgcaatatcgagtcctccgactgtcataagtatctcaaaggtgtccttattatataaatcatacttttctattgcgctctcaattacacggatttttttctcaagcccactgtcgtttaagcctgctcctcttcctgtcactgtggccacatcgcaccttagcatggcggctgccattgccgcgctggtggtggtgtttcctatacccatctcaccggttgcaataattctgcagccgtctgccttacacccacgcactatttctatacctgctgcaatcgcttcaagtgtctcagcccttgtcatggcaggctcttttgcaaagtttctcgtgcccatgcgcacctttctttgaagcagccctttaacactctcgtcactgtttattcctatatccacaggaattgtatcagcccctgcagtcattgccatgcgtccgacagatgaagccttccttgccatggattttgcaactgcaagtgtcacctcctgtccggactggctgatgccctcagcaaccacaccattatccgcacacataattatgacagccttttttgaaatatctatattttcatctcccaaaacagcgccgattttggccgttaatagctcaaaatcacccatgccgtcgagcggctttgccaccgaatcccagtttgaacggatttttttgtacatttttacatcaggtggcgttatttttaatttttttaattcttcaactgtaaaatggtcagaaataatattattttcaatcatatcttgcctcacgaagcatgccgtacactgcatccatatccagatactccctcagtgtatccgcaagcctgtcatactgtttttctttgaagctcttatagcttacaatagtgctgtcattcacatcaatgccctttttatcggcaatataatccactatcactctggcagcctctgcagtatcaaaaatgccgtggatgtacgagccatacacatttctgccatcagatatgacattatttaactcatttttcctgtcagcacaagccccctgctcctctgaagctgcgctatatgcgctcttacccatatgtatctcatagcccagaaagtgacagcctgaaatcctgctcaatacaccttctacatgtgctatttcaccgcttgtctgaagccgcgtcttgctgtcttttagaacggtatctataggaagaagctccatgccacgcatatatccgccctcctcaacaccgtcggggtcggctattgaagccccaagcatctgatagcctccgcatattccaaaaacaggtatctcacaggagagctttttgacagcggcttcgagtccgttttgtctcatccacaaaagatcccccatcgtattcttgcttcccggcagaaatactatatccggatgacgcagctcatttactgttgacacataccgcactgttacctcggacatctgctcaaagacgttgaaatccgtgaaatttgatattctcggatatctgatgaccgctatatcaataagcccatccgtctttttgtcaaagcgctctgtcaggctgtcctcatcctcaagctgtacatccatatatggcaccactccggtgacaggcaccccgcctctctcctcaagcatctgtatcccggggtcaaggatcgtcttgtctccacggaatttattgataataagcccacagacacgcgccttttcctctggagttaaaagcataagcgtgccgagaagctgagcaaaaacaccacctctgtcgatatcacccacgagcagcaccggtgcatcaaccatatgcgcaagccccatgttcacaatatcattttccttcagatttatctccgccgggcttccggcgccctcaatcactatgatatcagcatactcctcaagctttttaaatgccttttttatatccggtatgagagttttcttgtatgcaaaatactctctcgccggcatgttcttaagcacccttccgtttacaatcacctgcgagcctgtattatttgtgggctttaaaagaataggattcatgcagaccataggcttaatgcctgctgcctcagcctgcatcacctgggcccgtcccatctcaagtccttcgtctgttatataagagttgagcgccatgttctgtgatttaaacggtgccactctgtatccatcctgtctgaaaatacggcacaagcccgcgacaagaaagctcttgcctgaattggacattgtaccctgtaccataattacctttgccatatctatacctgctgtctgaatttatgtggtagtctgttgctttatcatgaatattaaactgtagtgtgaacagtaacttccttaaagctgtgccaattgttcctcatgaaaaggaatttttataattttccctgtagagactgcatactcataaagtctgctgttaaactgctcatacatgccaaactctgttctgtcacatataacgccctcgcatgcatcaataagctcctttgccttttcaataagggcatcgtctacaggctcaaagcttcttgcactgacaatctcagcagaaagcgcctttgccgcaggataatccagatcattttcatagatgattcctgtcgcaaacgggataccctttcgctgtaagctcctaaagctttttctgcccaagccccctcctgctatgacaaataccctcgcccttccatccggtttttctagctctaaatcctcccctgtttcgtcaaagcttcctgccgtaattccaaaaagccctgaaacatattggtcagtaaatatctcctcgggagttccgtatctgtccacatatctgccatctatacacatgatatggtctgacacacgctttgccatatcaagctcgtgaagcgacatgataaccgtaagattcttctgtcttttaagcctttggagtattgataaaaactcaagcttatactttatatctagatacgaggtaggctcgtctaacactataatctccggctgctggcatatagcccgtgacagcataacccgctgtctttgtccatcgcttatctttgtaaaatccttatcttttatctgtgatacattgaccagctccatcgcctcatccacagcctttttgtcctcatccgaaagtactccgaaccggcctgtgtatggatatctgcccgtcgcaaccacatcatagcaggtcataagctccgtctttagcttatcggtgagcacaacagccattttctttgcaaattcattgccattcatcgtcactacatcacttttatcaagatatattgtaccgccaacaagcgaaagctgtcttgcaatactctttaaaatagtcgatttaccggctccgtttggcccgattaatgtgagaatctctcccctttttagggaaaaatcaatattttcaataagcggcctgttatcatatccaacagccagcttttgagcagtaaaataatattccatcagacatttttctccttgctgcgtcttatcatgataaacagcactaccggtgcaccaaatactgccgtaaccgtgctgatactaagctccgtaggcgcaaacatcatcctcgcaagcaaatcacaaaacaggcagaacaccgctcccccaaggaagcaggccggtatcatatatataggctttgtgctttttagcatgctttttactatgtgtggcacggctattccgacaaacgatataggtcccgcaaacgccactatacatgcggaaagcaggcttgaaagcaataccagaagcaagcggatgcgctttatgtttacacccagatttacggcatatgactctccgagctgatatgccataagtggctttgacattagaaaaacaaaaataaatgtgattcccaccacaatgctcatcacaccaacgctgtcccaggtcatgcccgaaaagcttccccttgaccagttatgcagatttactatgtcggaatcatctgcaaatgtcaccacaaactcagtcaccgcagagcatatgtagccaatcatgacaccgctcaccacaagcattgacatgctgcttacctttcttgaaatgataagcacaaaccccattgaaagcattgctcccaaaaacgctgctgcaatcatggccagtgagctcacacgtatggcatttccaagtaaaaataccataacaagtgccacgaccatcttggctcccgatgatataccgagcacaaaaggtcccgcgattggattatgaaaaaacgtctgcaaaagatagcctgcaagcgctaacgccccgcccagtatcatcgctgcaatagctcttggcatgcggatatcccacacaatacgtcctaccctgtctgagtggtcataaagtgttgcaaatgcagccttaaatgatatgtgtacagttcctatacacacattcatgataagcaatataataattaagattataagaataataaatgttgtaaaacaccttatttttctggttttttccatgttgtagctccgctttttatctttttgtgctattgattttcctgttgagcttaaacagatatttcatgccgctgtcgggtgcacctgtaatcattgaatgcatatcatcaatcatatatccgatggacatagactgctgatacatatcgttcgtggtgcaaaatacattgccacctttgacagccctaaaatcagcaagcaccgggcacttgtccaaaagctcattcagattcttcacaccgccgtctatcgcactgttatatatcagatagtcagcatctattgctccattgtagaaatcctctagctgcatattcatggttgacctgcctgtatcgtcgtcatttgatgcatcaaaaatatattttccgccggcaagcgaaatcatctttggcacataatctgtgcttttgcgcacctgaacctgtccattggatgtgatataaaaaaatgcaactgtcggtctgctgtcagcatttgcagcagtatcggtaccatctgtctttgcgatgcaatttacaatatccacctgctcattaaagagctcatcggccttttcatcccggtctgtgagtgctccgaaaaacttcacccactccactctgccgagcggctcctcctcatagcttgagtactcgattattgaagggatatcaaagcttttaagcttttccgttacctgcggcgaatgggtaatcatagtattttctatggcaagagaacaattttctgacaccaaaagctcataatcgggctttgaatatttgccggcataaagcattctgccactttcaagagcctttcttgcactgtcaatgtaccagccatcactgtcaagccccgaaaatttaatagtgtccactgcatcaagcttgtcaaacatatccatcacacctgatgcgaccagatacaaatcacttacaggctccttcaatacaatgatatccttgtcaatatcctttggagtctttctgccctttggcacggtaagtattttggtaccgtcctttgtcgtaagtatcttgtatccaccctcataatagtcaacagaaaaattctttgcatataaaagcttcatactgctcttatatataagaccgttttgtgcctctgcctcagccttcgattcggtattccctgaatcggaagaaggactgtcgcagcctgacagccagaacagtcctataattgatatcaatatatatataattatcttttttcttccatgcatagcttaattattctccatcctcaccaagcacctctgtagcagaatctgaatggaaggtaagtgtgtactcaacctcgtgcggcttgctcatagcaactgtatctccgataacctgcataggtgtatcaagcttaaccggaatttcaaatacagaattgccgtctgtatttacaggcatatatttctgtccgtcaactatcatataatcatagtttggactgctccactgcactgttgcagtagcggctccaccgcttatagtcacctcagccggtgatgcaatgctcgccttaccgcttccgccctcgaaatcaagattgatattgtatgttccgtcaggaagctgttttcctgcactctcagatacgcttgcatctgcgtccgcaggtgtggcatttgaaacctttaccttgtggtcataccatttgccctttgtaccgataagtgcaaggtcaaattcctcatccaaaacaggaaccggtatatcaaacgcattgacctcctcagttgtgccatcgccataatcgacagtctctacagttggctccaaaagatgtgccttgtcctttgaggcatcctttgctgttcccaaaaagagatttacaatgtgtgtggatgtaagagcaacatgtattgttgccttgccatccttcacggtgagtgtacctttgttgtcatatgcatcattcacatgaaacattgagctgtctgtagtaaactctgctgtatatgtaccatctgaaagtgctatcttttctgttttttcagccttttttgtgctctctgtcgcgtcctgcactgcttttttgctttctgtttcagcttttgcattcttattaccacatgctgccaggctcatggcacaaaccagtgccagtgcaatgatgtaagtaaacttgtttctgaataattttctcatgtctgatatactgctcctgttattttatagcttccccactatacatttaagtaactgctacttgctcatagcagccgctgtatgctcaacataaagcttctggataccctcaatctcaccaagtccgttaatctgtgtatcgattttatcgaactttcctgatgccttaaactgtgaaagccatgaatcatcatcacttcccgccatatcattgttggcatggtctcctgcaacaaccataagcggacgaagaatgacattcttgtaaccagcggctgacaccttctcaatgacagactcacatgatgtatcctccggctcaccctctacagttccgataaatacgttttcataacccaaatctgtcatctggctctgcatctggctgtatgaaatctttgctgtatggcttgttccatgtcccataaatacaaatgctgtgccctcttcctttgcagcatcaaggctgtcatagcctgccttttctacagcttcctctgtaagaatttctgcaacggcctttttatcctcatttacaactgtggcatcacttccaacctcaccgaggagtggctctgcaatctttacagactcaaatttatccttatacttctctacagcctctgaaagctcatcatattctgcgccatgcatcaggtgtgtaggctgtaccacaagattctttacaccatttttgactgcacgctcaagtgcctgatccatattgtcaatcttctcgtcatctcttgcctgtacatgattgatgataatctgtgctgtgaaggctcttctgactgaccagtcaggatttgcagctgctattgcatcctccacacccttgatatcagccacacggctgtcgttgaaggatgtaccaaagcttactacaagaatctcgttctcgccgatattatcctggtttctcggatcatcctttgaagcatcgcctgtatctctgccgaaatagtcaggatcagcattttctccctctacaagctccttctgtgtgtctgtgagcttgtcccaggcctccttagcctccttgcactgcttgtctgtatcatctgttctctcctgcacgtagattgcatcgattaaatctgccacatgcattgctgcctcctgatctgcttttgcgcttgtctcactctctgaagccttagatacctgtgtatcattctttgcatcatctgccttgctgccacagccggtcactgctgtcatagccataactgctgccatcagtactactactaatttctttttcatattatctccttttcattagccctgcagctgttaagctgcacatgatttaaatatgtaaaacgaaaacatttaaaacgtcaaaaataaaagctctttgtactattgcgtcaaagagctatacatgtcaaaatccttctaactcagactatacggctatcatagccttatctgtaattataattatttcatcacgtacagccagttactcgtggcttgaaacactattgtttccgtacaacacaaaggcaggtctcccggcttaaatatcatcgcttcggccgtcttcccggttgcccagtgacttctcggccgtcactccttaattacggtgacgagttcgtacaggatttgcacctgtttcccttttcaccggagccagcttcacatcgcctgtcataaatcagattcaaatgcttgtctgctccgacacctttatgctacatattcagtttcttcgtgcgttgcttacgcaatcgcttggattattatattacaacttgtaacattattcaacagatttttatcagacgctttacagacacatttacaaaagcggtgcaaaaagctgcaaaatactctgcagcagcctgcctgcaaatgagatatcatttgtgctttcctcatacacctcctctgaaaccgcaaacgtctctatcgcatcctcttttatttttccgatgcactgagtcctgtacatgtatacaaaatcctcaaaattccagtacatgctcctgaaatccagattgcatgtaccaactatcgcagtatcatcatctgccactatacactttgaatgtataaagccgggtgtatatagatatatccttacccccgcctcgataagaggtctgaaattggcttttgtctgcagataaatgagctttttatcgggaatctcaggtacaacaatacgcacatcaacacctgacctggctgccgataccatagcatgtgacagctccgttccaagtatcagatatggtgtaaaaatataaacatattttttagctcttgagatgatactcacataaagattctctcctacatcatcatgctcaagtggcgaatcgcaaaacggctggacaaaaccgctttcctctgactggctgaaagtattgtgtggattcaaatattcatcatgtactgcattgtccttattgatataattccacatctcaaggaacatcgtcgtgaaactgtttacacactctccctccacacggataccggcatccttccagtatccaaacctaatttttttgttgatatactcatctgctatattgtaaccaccggtatgcgccacacgtccgtctactaccagtatcttcctatggtccctgtcattcataattaccgaaagcatgggcttatatggattgaatcgtctggtctgtattccgatgctctccatctcctttataaaatgtggcggaatggcatttatgctgccaaaatcatcatatatgattctcaccacaactccatgctttaccttttctttgagtatatcaagtatctgatcaagcataacgccactgccgattatgaaatactccataaagataaacttttcagctgaccttaaatcttttaaaatgctctcaaaagcctcctcacctgatttaaagtactctgtgcagtcctccgcatacagtggatatttctgattttgagtaataagcctgctttgtctgtatgcatccatatctgtctgtctgagagtctcatttagcagctcgttctcaggacgaagcggagcatatgcttccacaattcttgccattcttttctgtgtctttgacgtaagctccggtcttccgaaaaagaaatagcacggaataccaacgatcggaacactcagtatcaaaaatatccatgacatttttatatacattttcatccgcctgttgacaatataaagcgaaagcaatatggccgccacatacagcagatcctgaaacaccctgctggcaacagatgccgtataaaacaaaaagaaccaccatatcatctgtatgattattattgtcgaaactataaaaagctttgaaagcagtctttgtaatatttttctcatttaagccctaccacgaaattactattatacaacctaatatttcctatattatctataataaatctctaatacatattataatattcccaccaatttatcaacatttataatcccccacgagcctttgtgactatcccctgccctgtcacatgtattatacagggctagcttaaccgcctccggtctcatatttggatttttttccaatagaagtgctatggcacctgacacaatcggtgtagccattgaagtacctgtttttcttacatatgtgccatccctcgttccaaggcttatgatatcatgcccgggagccagaatctcaggctttacaatacagcaatcggtcggacctttgccacttcttatatcatcaaagcttccgactgttattatttttcttgaaattcccggcacagttacagaaaacggtgccgggccgtagttgcccgctgctgcaacaactaccactcccatatcccacaattcatctatcagcttcaatatcttaatacgctctgctgtatcagaacatggcagatatcctacagagaagttgagtatttttatattaagtctgacgcagttttcttttatatacttaagtgcacgaattgaatccgatgtctgccccatgccaagataatcaagcaccttaaacacatatagtcctgcccccggagccatgcctatatctgcagccgataatataccgcacacatgtgtaccatgcccgttatcgtcataacatgtctcctttccacccacaaaatccataaagtgctttatacacccatcaagctgtttgtgtttaaacacacccgtatcaagcactgctatattgacatttttaccactatatccatttttatataccagatttgcatttatactatatttcgcatttttcattattattttattttttaatttagtatatgattcgttttcacaatatgacacagacgcacctgttttgccttacatcatatcaccttactataatttcatatattaaaaggactgcacctgcgtgcagccctttacttggatattattgttatactttaacgtatattaattaatcctcttttacatccttcatagagaagctgattcttcccatcttgtccttgccaaggcaaacaacctttaccttgtctccaagtgtgagtacatcctctactctgttgattctctcttttgcaatcttagaaatgtgaaccattccctctttgccaggagcaaattcgatgaaagcaccgaactccttgatgcttacaactgttccctcaaggatctgtccctgctcaaaatcagttgtgataatcttaatcatgtcgattgcctttgcaatcatctctttatctgttccgcaaactgaaacagcaccatcatctgtgatatcgatcttgacaccggttctgtcgataatctcgttgattgtcttacccttctgtccgacaacatcaccaatctttgatggatcgattgtaatctgctcaatctttggagcccactcatttacttcttttctaggctcagcgattgccttgctcatgacctcatccatgatgtagagacgtgcctcacgtgttctcgcgattgcctcctcaacgataggtcttgtaagtccgtgaatcttgatatccatctggatagctgtaatacccttatgtgtacctgttaccttgaaatccatatctccgaagaaatcctcaagaccctggatatctgtaagtacaaggaaatcatcatctgtatcgcctgttacaagtccgcatgagattccggcaaccatagccttaatcggaacacctgcagccataagtgacatacatgatgcacatgttgaagccattgatgtagagccgtttgactcaaatgtctcagatacggcacggatagtatatgggaactcctcaatgcttggaagtacaggaacaagtgccttctcagcaagtgctccgtgtccaatctcacgacgtcccggtccacgtgatacctttgtctctcctacagagtatgcagggaagttatagtgatgcatatatctctttgttgtgatatttgcatcaagtccgtcgattttctgaatctctgataaaggagcaagtgttacaacatcacaaatctgtgtctgtccacgggtaaacattgcagagccgtgaactctaggaatcaaatcaacctctgctgcgagtggtctgatctggttgattgcacggccgtccggacgcttatgatcctttaaaatcatctttctgactgtcttcttctgatactggtaaatagcctcaccaagtactgcaaggtactcctcattgtcagcgaaggcttcctctaactgctctgtgatagctcttatattttcctcacgcttctgcttctcatctgtgaatactgcctcctccatctgctcaggagtaacaattttcttgatatcctcgaacatctgctcaggaatagcacagctctcatactcatgctttggcttgccaatctcatcacggatctgatccatgaatgcgataactgtctggttgatatcgtggcacttgtagattgcctcaatcatctgatcctcaggaatctcattggctcctgcttcaatcatgatgaccttttcctttgtagaagcaactgtgagctgtaaatcgccctcatcccactgcttctgtgaagggtttacgataaactctccatcaacaagtcccatctgtgtcatggcacatggtccgtcaaacggaatatctgatatatggacagcaagagctgtaccgatcattgcaactatctcaggacggcactcaggatccactgacataacaaggttgtttaatgtaacatcatttctgtaatcctttgggaaaagaggtctcataggacggtcaattacacgatctgtaaggatggcgttctcagatgcctttccctcacgcttgttaaaaccacccggaatttttcctacagagtacatcttctcctcgaactcaacgctgagtgggaagaaatccacaccgtcacgtggcttgtcagatgctgtagctgttgaaaggactgttgtatcaccatacttgataaaaacagctccgtttgcctgagctgctactcttccgatatctacagtaagagtcctgccggcaagttccattgaataacttttgtacatattaattctccttaaaattcttttgcagaagtgtattcctcttccgaaactactaaacaatacatgtacgctcatgcactctttagtggtctcggcttacttctgcttttcaaaaaacaataataaaaacaataatagagcggaataataattactccgctctaaagaaaatactattttctgagtcctaaacgctcgataagtgaacgatatctctcgatatcaatctccttaaggtatgcaagtaatccacgtctctgaccgatcatctttaacattcctcttcttgagtgatgatcctttgggttctgtttgaaatgctcagttaactctgcgattcttgctgaaagaattgcaatctgaacctctggtgaacctgtgtcatttggtgttctaccgtactctgcgataatagcctgtttcttttcctttgcgatcattgttgatcctccttatattataatgcgccctgataacttgtatgatgctcagcaataggtcggagtgtccaactaccgaacatgggcaaaaccatacttatgcagtatagcatagtaagcatttgttgtaaactgtttttttattaatccggcaaatatcttgcgacacaaatcggatttctgtaatatgcatttgaaaccttgattccatcacgcttgttgctggcatgtacaatctgtccgtttccgatataaattgcaacatgtgagatactccttccacttccgtagaagaataaatctcccggctttgcttcagatgcactgatttttgtgccgtatgaaggctgtgcttttgatgaatgcggtaatgagattccatactttccaagaattctcattgtgaagcctgagcagtcaattcccttctcaaggcttgtaccaccccacacatatctgtttccgacaaactgtaacgcatacgatacaacagatgcccttacatctgatacaccgtcaccatacttcacctgctctattgtctttgctgtaggaagtgcctgtgccagtgtcacataatcctgtgatatatatcctacagaatcatccacacttatctcaacccagccgtcagcgacagaattaaccgtgaatgcctctgaatttccaacctgcgaaagcaccgcagcctctgttgacttctctgcacgcacattcagtgtttccgtatttactgtggcaaccgtcttaatctcctgttctgcaatagcctctgcctcatctcccgttacaagatactgcttgttcacatatcctgtgaccttgcctgatgtgaccttataccattctccggcatcctcaagaagctcacaggcattgtgatttgtaagtattcctattacctcgctgtctgtcgaagcttcctgtctgatatttaagtttccgctgcttataaccgacataccaagatttgtataaccacaggtctgtgcggctgtcggtgtctgcgctgcctcatttgcctgctcagactcttgtgaggcaccatctgtctgcggtgtgccctgtgcagatgctgttacaacattgctgtcattttgcgcaacagtaagctcagctccgtagtatgtgagagcagatgtcgctcctgctgtgagaagctccgtagcatctgccgcctctgtcagaccaagagccacccccgcattgactgttctgttttcctttaatgatgttctggcatctactgtgctgcttgaactcatagatacagcacctataataatagcaaacgctacaacgcctgctgcctgtcctaattttaatttatttttcatatagcctccagttcatgctatccataatcccatgtttacgagtatatcacaaattgttaaaatgtcaatatttctccgtaatatttccgtaatatttgtcattttttcgttattttgggtaattttgcaaaaaaacagccacactagaatgtgtgactgcctgcataattgattgtataattgatatctgcactcatctggctctttaacgcttctattgaatcaaacttcatctcaggtcttacgaacttatgaagctctaccatgatatcctgtccgtaaacatcctgcccaaaatctatgatatatgtctctgcaccgattggatttttgccctctatagtaggcttgcatcctatattggttacaccaaggtaccagttgtccctgacaagaactcttgacatatacactccctttggtggaagcagcttatcatgcggcactgaaaggttgaccgtcggaatgccaatagtcctgcccagtgctctgccatgcactactcttccttttatgaaaaagggatatcccagcagttcattcgcctttttaatatgtcctgccgcaatctcctcgcggatataggtactgcttatatccctgtctccatcctttatcttgtccaccacaataagatcgtatccaagctctcctgccatcgcagaaagcagcttgtggtctcctgccctgttgtgcccgaaacggaaatcatctccgacaatgatacacttgacattaagacttttaactatccatctgacaaacgcatccgcctccatcgtcatcacctgtggcacaaacggacactctatcagatagtcaatacctgatttttcaaacacatactctttttcatcgtttgtgattataacctttgactcaacgccaagtacctccgatttgggaggaatgtcaaacgtaaatatgatgcgcttgtagccatgcagattgctctgttcaatttgcttttccatcagaaattcatgtcctcggtgaagcccgtcaaactttccaaacgagatgacggacggctccttgacatgaaaatccagagttttgcttatatattccataatatctgtatactattctattccataaaaatcttaaccggcttaaactcaccggtctcatcaagatacgaatacacaccgacaaatataccctcatgattgtatactctgtatcttatatcagagtcagcactgtgttttaaataatccgtaagcactgccggaattttatttccatttctgacaagcttatcagcatctgaagcagtatgcactgccggcagattttcgaatactccgtcaacaggcataaccatatcaaagcagccttcatccacctttgactgaatctgtgaaagtgtaagtgcatgctctaagtcaaagcctgctacccttactctaagcagtgacttcatgcagccatggcagcccagcctctctccgatgtcattgcacagcgtcctgatatatgtgccctttgaacagtgcaccgtcatcgtaacctcaggcaaatcaatgctttcaaccttgatatcaaacacctcgatatccctggcttttctctctataaccttgccctccctggcaagctcatagagctttttcccattgacctttagagccgaatacattggcggcacctgcttttgtctgccaataaactgtgatattgcatcatacaccgcctgcttggtcacattgaccttagcctgatttaagatctgccctgaaatatcctgtgtatctgtctcctgtcctaaaagcagcaccgctttatagaccttgtccttatctgtcaaaaggtcacacactctggttgcctttccaaggcagacaggaaggacaccctctgcatcaggatcaagtgtacctgtatgaccaatcttcttctggtggaatatgcctcgaagctttgccacaacgtcaaagcttgtatagcccttttccttgtatacattgattattccattaaccatctgcccaagaatctctccctaaatattatccttaattgccgtaaggatgcggtctgttgccacctcaagcggtccttcaattgtaaatccggcggcctttacatgtccaccgccgccaaataccgacgcaacctttgccacatcgtaatcaccgtttacgcgcaggctgcccttgtaggtaccatcctcattttcgtagagaaatacagcaacctttatatcctttgtcacgcgcagctgatttacaatgccgtcgagatgcttaggaagtacctcgtacttttccatttcagcgcgcgatactgcagacaatataacatcaccattcagatacaaagcagcattcaaaagcgcctgccccataatcttgttctgagcaaatgtctttgtataaaatgtatcatcgattattcttgaataatcaatacccatctccatcagggagcctgctatatccatagtcttttttgaagtgcatgaatactggaacacgcctgtatcatgcaccatgcctgtgtaaatacactctgctatctgtattgtgatgcgctcctttggcagaagctcgaacaccagctcacaggtcgagctagcatccggaaagatgtaatttgcgtctgcaaaggccccgtttgtaacatgatgatctatgcaaagtgtcctttttgcagactcaaaatacttagccgcatttcccagtctgcctgtgtcactgcagtcacatgctatgaacagatcgtatacggtatcatctgcatagctgctgtcaatctcatctgctctttgcataaacttaaaaatgttcgggcttggctctaaataaagccttgcatttatatcaggataataatcctttatgtagttgtataccgcaagcgttgagccgacacagtcgccatccggtctcacatgaccggaaacggcaactgattgtgcatcctttaaaatagaatcaatctctgtcataatcaatcctcttgttaatcctctttgagattttttgttacttcatcaatctttttagacatctcaacaccatactctatagactggtctatgataaatgtaatagccggtgtgtttctcaaattgatgttctttgcgagagttctgcgtatatatccctccgctgacttaagtcctgcaagtgtatcagcctgtgatttcttgtcaccaagcacactgatataagcctttgctgtctttaaatcaggtgccacctcgacagcaactacacttgtcatgggattgatacgcggatcctttatctcaccgcgtatgatatttgacagttcacgcattacctcttcgttgatacgaatattttttatgctgttctttctcatataatcccgctttctttttatattaaaccgcaactatccgaatagccgcattaattcaagataaccaatatatgattatcttggaacctctaccatcttgtaggcttctacgatatccaattcctgaatatcattaaatccgtcaaatacaagaccacactcgtagcctgtcttgacctccttgacgtcatccttgaatctcttgagtgaagcaaggtctccctcgaatatctgctcaccctctctgcttattctgacacggcagcctctctccataaatccgtcaagcacatatgaacctgcaatatttccaacgcctgaagccttgaaaatctgtctgatttccgcatgtccgataaccttctcctcaaatacaggatcaagcatacccttcatggcagcggatacgtcctcgattgcattgtagataaccttgtaaagtctgatatctacgccctcacggtctgctgtagccttggcaacaggatccggtctgacgttaaagccaatgatgattgcatttgatgctgatgcaaggataacatctgactcgttgatggcaccaacaccgccatggatgaccttgaccacaacctcctcatttgaaagcttgacaagactctgcttaacagcctcaactgaaccctgtacatctgcctttacgatgatatcaagctccttcatattgccggactgaatctgtgagaacagatcatcaagtgacatctttgcctttgtatcctcgatgagcttattcttctcctctgaaatatatgtgtcagagaatgcctttgcctccttctctgaatcacatgccacaaatgtctcacctgctgatggcacactgttgagtccaagtatctctacaggtgtagaaggcttagcctcctttactctgcggcccttgtcatcaatcatggctcttaccttaccatagctgcttccgcatgcgataggatctccgacatggagtgttcctttttgtacaagcactgtggcaaccgcaccacggcccttgtcaagctgcgcctcaattacgagacctcttgcatttctgtcaggattagctttgagctcgagcacctctgctgtgagaagaatcatctcaaggagattgtcgataccctccttagtatgtgcagatacaggacagaatattgtgcttccgccccaatcctcaggaataagctcatactctgagagctcctgcttaaccttgtcgatattggcacttggcttatctatcttgttgactgcaacgataatctctacaccggctgccttcgcatggtttattgcctcaacagtctgtggcattacaccatcatctgcagcaacaacaaggattgcgatatctgtagagtttgcaccacgcatacgcattgctgtaaacgcctcatgtcccggtgtatcaaggaatgtgatgttctggtcattgattgatacaacagatgcaccgatgtgctgtgtgataccacctgcctcacggtctgtaacacgtgtctgtctgatggcatcaagcagtgatgtcttaccatgatctacatgacccattacacagactacaggtggacgaggaaccatcttgctctcatcctcttcatcctccttgagaagctctgcaatcacatcgaccttctcctcttcctcacagatgaaattaaactctaacgcaatctcctcggcagctgcaaaatcaacttcagagttaactgttaccatctcgcccttcatgaaaagcttctttacgatggctgaaggctgaaccttcatcttgtcagctaaatccctgattgtaatcttctccggaagagaaattgtcttaatctcgttctcatcctcttttggctgtgccttaggctgctgtggctttttcttgccgccgtgcttctcaagattgatgtaattctcctgcttctttccgagcttatcctgcttctggctctgattgtgattatgcttattctttctatcgttgcctctgtcgcggctctcctttcctcttacatcatcaggagctgccactgcaacggtttcttttctgaaacggtttctatcatcgcttctgccgcctgctctctcgttatttctgtcattgcttctgcttctgtcattatttctgtcaaagcttctgccaccctcagcaggacgtctcgagtcatttctgaaacctctgttattgtctctgttattgtctctattgttgtctctgctgttatcgcggttattgtcgcgattgtttggtcttctatcgctgtttcggtcagtatttctgcttctatcggcatttctatcggtatttctgtcagtatttctgttgttggttctatcgccattatcctgacgtctgtcgcctcttctatcagcatcagcctgacgtgccggacgtgaattggctgtcttcatatctgcatacggatccgctgtacgctcacttataggacgcatagctctctctccgacaggtcttggcttaataatgctgtgctgctcaggacgtgatgactgattatcgcgtctgccattgccatttcttcgctgcgaaccattatttccattatttccgctgccgtttccaccatttggttttcttccctgcttactgtactgggcattgaaaactgctgtgatgcttgcctttttctttggtctgtcggctgccttagcctcatcctttttaggttcttccttcttaggtgcatctttttttacttctgtttttgcgtacttctttcgtacaatttgctgtgcctcatcctcaagaccgctctgcacatttttgacagcaaactgtgtgccgtttaatgtgtctatgacttcctgcgactttatatttaattcttttgcaagttcatgaactctcatttttgccatatatctattttcctccattattcagttttattcgactgcagcttttttatcactgcatttgcaaggttttcatccgttaccgcaagggaagcgcgaaactctttgcctattgcattccctaaccccaccttgtcactataaaaataaatcggaacctcatagaaagcagtcatatccgaaaaatgcttctttgtgttgtctgatgaatcatctgcaactatcactaaaaatgcctttcctgtctttacagctttctctgtcgaaaactctccgctaaccacattgcctgactttgctgctaatcccagcatagaaagtactctatctgtcaatttggttcatctccttttcaagctcctcatatacctgttctgatacactaacaccaagggaacgctcaagtgcctttgtctttttagcctttttaaagcattcaagactcttacatatataagctcccctgccgtttttcttgccggtgtcatcgagaattatgttgccctccgcagtccttaccgcgcgaataagcgacttcttttccttcatctcctgacagcctacgcatttgcgcattggaatctttttatttgccattactgctcatcaccactatctgccacatcatctgtctcatcgaaatctaaagcatctgcattaccggctgctgcatcattttctgcatctgcctgttcttcctcggctaatctctcgttctcagcaagctcatcatctgaataatcataatcgtcatcataatcatcctcttcatagtcattctcataatccatgaagtctcctgactctctggcctgtgtctcgctcttgatatcaatcttaaagcctgtaagtcttgctgcaagtcttgcattctgtccttccttgccgattgcaagtgaaagctgataatccggaacaacaacctttgctgatttctcatctgcatctgcgataacagagataacctttgcagggctaagtgcgttctggataagtattgccggattctcatcccatgtgatgatatcgattttctcaccgcgaagctcatttacgatagcatttactctggcaccattcatacctacacatgctcctacagggtctacgtttggatcatttgaccatactgcaatctttgttctgcttccggcctcacgtgaaatagcctttatctcaactatgccctctttaacctctgtaacctctgactcgaaaagtctcttcacaagctcaggatgtgttcttgaaacaagaatctttggtccctttgatgtggacttaacctcaaggatatataccttgatgcgctctgtaggcttgaaaacctcgccctttatctgctcactctcagtcagaagtgcatctgccttacctaagttgatgctgacattctttccgatgtatctttgaacaacacctgtcacaacatccttttccttgctgttgtactcgtcaaatattacctttctctcctcctcgcggattttctgaaggataacattctttgcgttctgtgtagcaatacgtccgaattccttagacttaacctcaactctcacgatatctccaagctgatagttaccgtttaccttgtgcgcatctgctaaggaaatctcctcaaccggatcctcaaccgtatctacaaccgtcttctcctggtagcatgagaaagcacatgtctcaggatctatttctacctttacattgtctgatttaccaaaatggttcttgcaggcagtcacaagagagttctcaattgcctcaagtaaagtttctttactgatgtttttctcctgctctaatatatttaacgcttctaataactcattgctcattattttttcctcctatttgtgttatcgtgcgctttaattaaaaatccaatgcctgacgtataagcgcaatgtcactcttattgaatgtagtctcattgccgtcttcatcggttattgtcactgtatccttatcataggctttaagcagaccataaaattcctttgatttgttgatagccttatatgtgcgaatctctatctccttattcatattgcgcacatagtccttttccttcttgagaggtcttccaagccccggcgagctgacctcgaaggtgtacgaatcaggaatatagtcctctctgtcgagaatctcattcatctgccttgcaaccacttcacagtcatcaatggttatgccaccatctttatcgatatatgctctcaggtagttcatgccgccttccttaacatactcgacatcaacaagctcaaaattcatgctgtcaagaattggtttaataaaactctctgtctttgcctcatatatacttgcctttgacattttatcacctctctttgattattgatgtttataaacgtgaattgagagaggacttttgccctctctcaatctagtcaacgttgttatcataggtataatagcactatcagaaaaaaaaatcaagtttttttaaaaaagtacttgctttttttgaaactccatgatagtataatacacggttcgttggtcaagcggttaagacgccgccctctcacggcggaaacacgggttcgattcccgtacggactgctcactgatatttatttaattaaatacagcccaacccgaaagcatcgcatttatgcgatgtttttttattgttgttgacaccggacgcacccgcagcagtaaaatacaccttgcatgcgctaacgctacgctgtcaagatactgtacgaattatgctttttaggctcactttgcttgttctacagtatctaaa

SEQ ID NO: 1444 - DNA, 60880 bp, Unknown
  gut microbiota DNA sequence
gggtgcgtcttaagtctatccacgaagtgaaaaatatttctgccttaaataaaatgccttggagcacattctgtttaccacagaatgctccaaggcataaataatttaagtataagcctgaattaacaattaatcatcgtatccgttaggattgttcttctgccatctccatgagtcggcacacatctccttgataccatactgtgcttcccagccgagctctctctttgcctttgatgggtcacagtagcatgtagcaatatcgccaggtcttctaggctttattgtataaggaatcttaacacctgttgcagcctcgaaattctttacgatatcaagcacgctgtagccgtgtcctgttccaagattgtagatgcaaagacctgcattctcctcgattttctttaaagcctttacatgtccaaccgcaaggtcaactacatggatgtaatctctcacacctgttccgtcaggagtatcatagtcatcaccgaatactccaagctctttgagcttgcctactgccacctgtgtgatgtaaggcatgaggttgtttgggataccgtttggattctcacccattgttccgctcttatgagctccgattggattaaagtaacgaagcaggatgacattccactcattatctgccttatagatgtccataagtatctgctcaagcatagactttgtccagccatatgggtttgtacactgtccctttggacactcctctgtgataggaatctgtgctggatctccgtatactgtagctgatgaagagaaaatgatgctcttgcagccattctgtctcatcacatcaacaagtgtaagtgttcctgcaatattattgttatagtactcccaaggctttgccacagactctcctactgctttgagtcctgcaaagtgaatacagctatctatcttttcttccttaaaaatcttatttaagatgtctctgtcaaggatatctcccttatagaactttacttccttgcctgtaagagccttaactctgtcaagtgacttctcagaagaatttgaaagattgtcaagtactaccacatcgtagcctgcatcaagaagctccacgcatgtgtggcttccaatatatccggctccaccagtaactaaaattgccataataaatatctcctttttcattttttgttaaatttattgtagcgcatttgcccatttttgtatagaataaaatgtagaagaaatatgtaaaaatgttgtaaaggtaggcaatatgaacaataaatataaaaactcctatatcgtaaaagaaaaagagcttgtatctctgtccgtatataatgtaggcttccagagctgtgatagcctgtatcaatggggacccggtatcagggatcattatctgattcactatatcataagcggtaaaggccgttacaccgtaaacggcgaggttcatatgttaaccccgggcgatgcatttctcgtatatccaaataccgaagtaatttatcaggctgatgaaaaagatccttgggaatatacatgggtgggctttaccggcagcgatgccgcaaccattttaagagccactgatttcacaaaggcacatccatacatacacagtgtatcaaacggaaacgaaattaaaaggcagctcatgcatatatacgacgccagaggcaccgaatttgaaaatgcactcgaaatgaccgggcgactctacaccaccctcgctctttttgtcagcgccgccacatcaaagccaccgcaaaacagtgcaaactcctatgtacaaaagggcatcgaatacatctccgccaactattcataccctatcaccgttgaggatattgcatcatatataggcttaagccgaagtcacctgttccgttccttccagagcatcctaggtgtatcgccaaaggaatatctgaccgatttcagaatcaaacaggcatgctatctgcttaaacactcctcattgtccatcacagcaattgcaggctctatagggtttgataacagcctttatttttcaaagacctttcataagataaaaggcctttcgcctaaggagtatcgcagtaaatacaaaaaagctcaagaataaaaaagctgccgggcttcatgtgaagcctggcagcttttttcatctctctctttatgctaaactaagcaagcttagatttagcaacctctactaatttagcaaatcctgctgcatctgtaacagccatatcagctaataccttacggttaaggtcaacgtttgctaactttaagccgtgcatgaactggctgtatgaaagtccgttgagacgagctgctgcgttgatacgagcaatccataactgacggaactgtctctttctctctttacgtccagcgtatgagcttgtaagtgctctcataactgactgctttgctactctatactgcttagatctagcgcctctataaccctttgctaactttaatgttctgttatgtcttttcttagcgcctaaaccgcctttaactcttgccatttgttgattcctccttaactaatactaccgattacatgtatggtaaaatcttcttcatattcttaacatttgtctcatctgtcattgttgcttttctgagatttctctttgtctttgttgttttcttagttaagatatgtctcttgtaggctttatttctttttaactttcctgttcctgtaactttgaaacgttttgcagctgctctgcttgttttcatttttggcattgtgtgttcctccttaaattgttatctcttttctgccagcaccataccgatgcttcttccttcaacctttggtgctttctccactaccgctacatctgaaagattctccgctatatcatcaaggatatgtttgcttgcattcatatgagccatctcacgtcctctgaatctgagtgtgatctttaccttatttccttttgcaagaaatttctttgcagcattcatcttggtattcaagtcgttagcctcaatgttaggtgagagacgaatctctttcaattcaacggtcttctgctttttctttgcatccttttccttacgggcctgctcataacgatacttaccataatcaatcaccttacatacaggtggctttgcatttggtgctatctttactaaatcaagtcctgcctcgtctgcaatcttttgagcttctcttgaagaaacaattcctaactgctctccatccgctccaatcagtcgaacttctctgtctctgatctgttcattaatcattaattcgctaatggtcttgtacctccataaaaaatagtggataggcagactatccactatacaatcttcaacacaaatgtttgaaaatattaacgctaagtcgcgccattgcgcttaggtgagagtggatactctactttgttttcatacaactactagaatatagcacagacaatttctgttgtcaacactttcatctaaatttctataatttctataatctaatatgtaccaagaatcttaagggcaattgcctcttcccttatgcctcttagtgcattctgcaccgctgtatccgtaaagcgcccttcaaaatcgacaaagaatctgtattcccatgcctcatccggtatcggacgagactgaatatttaacatattgattccattgtatataaagtgggcaagcatatgatacagcgcaccactcttatgaggtgtctcaaagcatatgcttatcctgtccgcatctctgcggcatacccttttagccgacacaattataaaccttgttgcattgtttttattgttctgtatgcggctctcaagcacctgaagcccgtatatatcagccgagatatggctagctatgccagcctgtgtgatatctccgtcatcctttaccttttttgctgaaaaagctgtattcctgacagctacctgattgatatccttatgctcatcaaaaaaatcagagcactgcataagagcctgtggatgagaatacaccgttctgatatcagaaagctttgctcccggaagccccatcagactgtgatcaacgcgaataacctgctccccgactatgtaattatcgtactcaacaagcaaatcatagttttccgatacgataccggccgaggaattttctataggaagcaccgcataatcagcctttccgcacttgatatcctccatggcatccttccacgtatccacattgtagccattgcagttctcgccaaagtatgtcttcatggcaagctgtgagtatgcgccctcaactccctgaaacacaatccttgcattggaaaaatccaggctgtctacctcagtaaagttttccttctccactatgccatgctcagtcataagctgatactgcttctttctactggtcgacataatctgttcaaaaagctcaactataccgtgcttcaaaaactcatcatctgcaagagacgataatttctcaagcttttcatcctctctcgtcttgtcaaagacctttttgccggtggttatcttatactcggcaacgtgctttgagatatccattctttccttatataatctgactatttcactgtctatctcatcgatagacgctctcaatttcattaaatcttccattattgtctcctaaaaaagatataataaaatattattacaaaatttatagaaaggcaagtaatccttgaaagatttatcatatatagatataattaagttaatatctaagcataaatctcatataccctcgggagaattacatgaaaaaatatctaaaaataattattccactaattttaatatgcatcacaggccttgttatatatcattttgtatcaaaggtaaagcttaattcatcctatgtaaatggtaatactgcaggtaatctgtacaatgccgggctcttctgtgaaagtgacggtgaagtatttttctcaaatacaaacgacaacggcaggctgtatgccatgaacttagacggcagcaatatacataagctgagcaatgacaccgccatgtacataaacgcagataaaaactatgtctattacgtaagaaacaacaatcagaaaatcacaagtcagaccttcttttcatatgacaggaacagtctctgccgtataaaaagaaatggccacggctccaccgtactggatcctgacccatgcatctatgcatccctgataggcaattatatatactatctgcactatgacacacaaaccgctacctctctataccgtatcagaatagatggagaagaaaaaaagaaaataaaaagtcactatctgttcacctgcaacacatcagaccggtatttttattataataatccaaaaaacggacagctatacagatatgacactgcttcacagagtgaagccttattctacgactgcaactgctacaagccggttgtgctggatgacacaaatgtgtactacatggatgtaaatcgtgacaatgcaattgtccatgtgaatatcaacaatcccaatcctgtagttttaacggaagccaatattgagcattacaatgtatatggcagtctgatattctatcagcgcggcggtgataatccggcactgtgtgttgtaaaaaatgacggcaccggctttaaagagcttgcaaagggtgagttttgcaacataaacgtaacatcacagtatgtgtatttcacagattttgtctcgaacaaagagtactgtacatccacacagaatccggatacaataaaggctttacagccataacaaataatttcattaaaaagaacacgcatgattaatcaactcatgcgtgttttttattaattcatataaaattcaaatcttgatctgtatatatcactgcactttccggtattctggtctatcgcaataacagaaagcacattatttccctcaggaacaggtattggagctgtatactctgttgatgcagcactcggatctgacgaatcccaggtatagtataccttgcaattttcaggtactgtgattgtaatgtctgtctgtgcaccaaacgtacctccgtcagggtctatctccggtgcatccggtacctcaaactcgatttcatacttggcagatgccacctcgcttttgattcctctgtcatcaaccgcaacagctgttatctcatatgtgccttccttgtccagggtgatcgggctataatatctttctcctctggtcaaaggattatccgaatcatatgaatagtatattttggtatcgctgtctgcatctatagaaagctcaatagtctctccatacttgccactgctcttgctaaactgcggtttagatacagtataatccgcaaaaagctttaaaacagatgcatccttagcactctcacgcagcgcagcaattgcatcataatccttttttgattcataaatcgagataagcttcttataagcctctttgctctttggatcaatattgataatttcctgatacagcacaagagcggcatcataatccttcttcgacatatatatatcagccaaagcaaatctgacatctgtattatccgaatcaatcgacaaagccttctcataataagaaaccgcggaatttatatttcccgccgaataagctgcctttgcctgcttcacctgataatcaaatgaattgtcatgtgatctgcttacattacgtgtaatagctgcaataagtattacaattgctacagcgcacactacagctgatataataattatcttcttctgctgcgctctctttgccctctgtccgtcagactgcggcttctcacacggttgtttcgtctgagactgctgctcacctgtctgagcctgtctcacctgctgctttacagactgtgacattctgtccggtttttgtccgttccgctgaccggcactatgaagctgttccctcaccggctcatcaaacctgattgtcatatcagacacaggctttgcagtcttttgtccatcagttcgcctttcatcatttccaaccagattatcaagataatcatcaaattcgttgtaatcaggcactatctgaaccggatgcccacagacatcacagtacagactgcccgccttcaattcattaccacaattggcacatctcatacatctaatcctcttacttattgtctaattgtctaattatctcttcatagcctcaacacaattgctcatgagcatcgcaattgtcataggacctacaccgcccggtacaggtgtgatatgtgacgctttagacacaacagaatcaaaatccacatcaccacacagcttattttcagcatttctgtggattccaacatcaattacaaccgcaccatccttcacatatgaagcatctataaacttaggctttcctattgccactataagtatatcagcatttttacatacatcttttaaatcctttgtatgtgaatggcataccgtaacagttgcattctccctaagcatgagaagtgacataggcttgccgactatattgcttctgccaaccacaacacagcttttaccatcaatatctatattgcttctctttaaaagctgaatgataccggccggagtacacggtaaaaagcccggctttcctataaccatcgctccaacactctgtggactgaagccgtcaacatccttctttggatcaatagcatcaataaccgcatcctcatctatatgctttggcagcggaagctgacagagaataccatttacagaaacatcagcattgagtttttcgataagctctaatatttcctcctgtgtagtctcctctgcaagctcgtatgaaagcgattttattccgacatactcacatgcctttttcttgttgcgcacatacactgatgatgcagggtcatttccgacctgaatcaccgcaaggcagccatcgataccttttttcttaagttctgccacttcttccttaagctcatccttaatctgtgttgaaattaattttccgtctattagattagccatatttcctcctagaataatcctgtgatcacaccattatcatccacatcaatgccgtatgcagccggcttctttgaaagtcccggcatagtcataatagaaccgtttactgctaccacaaagcctgcacctgctgacgcataaacctcacgtacgttgattttaaagccgctcggtctgccaagcttctttgcatcatcagaaagcgaatactgtgtctttgccatacatactggaaaatcgcccattccaaggtctgtaatcctcttaagctctctctctgctgccggagaatatgtaacaccatctgctccatatatttcttttgcaacagtttcaatcttttccttaagtgacaggctatcatcatagagcaccttaaaattgctttccttgtgctcgattgtttcaagtaccttgttggcaaggtcaattccgccttcgccacccttctcccatacctctgagagtgcaaattcacagcctctttctttacagaactgctctacaaaatcagtctcagcctttgtatctgtgacaaatgaatttaatgtgacaactacaggcactccaaacttgtgaagattctcaatatgcttctcaagatttacgattccagccttaagtgcatcaagattctctgatgaaagctcatccttcggcacaccgccattatattttaatgctctgattgttgcaacaagtacaaccgcatccggcttaagccctgccatacggcacttgatatcaaagaacttctctgcgccaaggtctgcgccaaagcctgcctcagtgataacatagtctgcaagctttaatgctgtctttgtggcacggacactgttacagccatgtgctatattggcaaaaggtccaccgtgaactattgccggtgtatgctcaagtgtctggataaggttcggctttaaggcatcctttaagagagctgccatagagcctgtagcctgaagatcatcggctgtgacaggctttccgtcaaaggtgtatgccacgataattctgccaaggcgcttctttaaatctgccatatcatcggccagacagagtattgccataatttcagatgctacagtgatgacaaaatgatcttctctgaccattccgtccatcttgcttccaagaccaacaacgatatttctaaggacacggtcattcatatccatacatctcttccatacaatctggcgcgggtcgataccaagctcgttgccctgctggatatgattgtcaagaagtgccgcaagcagattgttcgcagatgtaattgcatgaaaatctcctgtaaaatgaagatttaaatcctccattgggacaacctgtgcatatccgccaccggctgctcctcccttgataccaaagcaaggtccaagtgacggctcacgaagtgcgataagtgctttctttcccaggcgtccaaatgcctctccaagaccgacgcttgtggttgtctttccctcccctgcaggagtcgggtttatagctgtaacaagtatgagctttccgtcaggatttttctttgtgcgattgatgagctcatcagaaatctttgccttatactttccataaagctctaagtcatcctcttcaatccctatagctgctgctacatccttgattggaagcattgtagcttcctgtgcgatctgaatatctgttttcatttttctttgctcctttgtgttaattattctctaatatagtatctaattcctctttagtcaccagaaccttgcggggctttgtcccctcctcaggtcccactacaccggcctcttcgagctgatccatgatgcgggccgccctgttgaagccaattttaaggtatctttgaagcattccgattgaagcccgttccttatctgtgataattgacgctgcctccgcaaagtaagagtccctgccatcatccgtgttttccacatctgaaatggtaacggttgtatttgtcgtatcgttcgacaggctctccatcttttgtgccacatcattactgtactgtgcattctcattattttcaataataaatttcacaatatcggaaacttctttatctgaaacgaatgcgccctgtactcgaaggggcttcggaacaccctgtgggtcaaataacatatctccctttccaaggagcttttccgcaccattcatatcaagtatggtacgactgtcaacaccgcttgtaaccgcaaatgcgatacggcttggcatattcgccttgatgagacctgtaataacattaacagaaggcctctgtgtagctataatcagatgtataccggctgctctcgcaagctgtgccagcctgcatattgcctcctccacatcctttgatgcaaccatcataaggtctgcaagctcgtccactataatgactatctgaggcatcttcggcggcttttctgtgtccttgccatccatcgtgtcaatcatggcattgtaaccgtttatttccctgacaccgctgtttgcaaacttctcatatcgatcagtcatctctgaaaccgcccagtttaatgctccggccgcttttttgggatccgtaacaaccggaatcatcagatgcggtatgccattgtatacactaagctcaaccaccttcgggtcaatcataatcagcttaacctcatccggctttgccttgtacaatatactcatgataatagtattgatacaaactgatttacctgagcctgtagcaccggcaattaaaagatgcggcatctttgcgatatccgtaaccttaaccttgcctgcaatatcctttcccactgcgaaggtaatctttgatttggcatttttaaactcctcagactccacaagctccctgaaggaaacagcaacactctgactgtttggcacctcgatacctacagcggcttttcccggaatcggagcctcgattcgtatatctgctgcagccagattaagctttatatcatctgcaagattcacaatctttgataccttcactccaagctccggtgtaatttcaaacctcgtaaccgcaggaccgcagcttatgttattcacctttgcattcacaccaaacacattgagcgtctgctccagctttgcagccgtctcacgcagatgtgcctgcgaatcaccggttttccccctgtcaggagccttaagcagatcaaccgttggaaatacatacggcttctgctggattgcattttctgcatcatttgctgctatctgctcgctgactttttcaacctctttggcgagctcatccttgtctgatttgacatttttcttacctggctctgctgcaggtggttttgtcattaccgcatctgcagccggagctgataattttgattgcagctcattatctttttgtatgccaaaatcatcagatatatcaggctccacgcagcccgatataggtatctgcgacacatggctttcagctgctgcacctaagtcatccggtttcatgccattaatctgctgcaaggtccttcttccaagctcatctgcattgtcgctaccggctgtgccacccaaaaccgaaactggctccgatgccacaccaaagtcaggtgtctgcactatctcacctgcatcccctgatgtaaggcttgtcgtctttttctcctttattgcaggtgaactcgggtaattctctatagttatctcaccaagcgcatctgtagcagctgcaccttgtccaaatatccccacatgcgctgtatcactacctgccatgcctgaatccagcgcgttttcactgccatcaatttttgtatcaagtgacacgcctgttatcttattgtccatccttcggccggcacgcttactccttctgccaccttttgcagcctcctttatgtcactgtctgtatcatctgaagctaaaccctctcttgtctgacgctctcttgacttatactgccgatactcctgatatctctcattattctcacgcgctgactcgtatacctttcggccgccgtttctcatgcccttcataaatgatttaccggtaatgagcacaagacagataatcattacaactattgtcaccacgtatgcacctataattcctaccgccggaaccaaaatgcagcctatgaggccgcctataaatccaccacctgaatgcctttcaacactgtcaatatatgactgcaccggcgaaaccgcgaattcaccatacactgccaggtacataaacacacatataaaccatatgagaactatggtcataacaagcttcatgatagcatatgaattgcccttattggacacagcaaaaaagctgcccaccagaagcacaagcggaaaaatatatgccaccattccaaatacaccaaaaaggaaaccgcttactgcgtttcccaaatgaccgcctattccaaaattgcttataaataaaaggattgaaacagctactactatccagagaaatatttcctttttaaatgcctgctgcctctctatctgagccattctctccttttttgtctgtctttttgctgaggatttcttcctcgttgccatgtaactaacctccgtattttgatttacagagtatataataacatatttcttctgttctgtgtaaattttctaaagtaatttttcgattttgtgattaaagggtcaaaatgtatcatgcacctaatatataaaaaatgccccgccgtaaaaggcggggcaaaatgttatgcaaaaaccacaatttcaccaaaatattttattcaccaataaggtaattgtataatccctcatatttgaatttcgaagcattccaagagaaatcattggccatgcccctgtccacaatctggttccactcacgtttcttatcgaagaagatgtgcttagaataattgatgactgcaagcatctcatcggcattgtagtttgagaacgagaagccatctcctgaattttcatactcattgtaaggcttaaccgtatccttgagacctcctgtctcacgaacaatcggaactgtaccatagcggaatgaaataagctgtgtcagaccgcaaggctcaaacctggacggcatcaaaaatgcatcagcagccgcatatagtttgtgtgccagatcatcagagtaacatatatttgccgaaaccctgtcagggtatttccatgcatagtgtctgaacatattctcatactgaggatctccggtaccgataacaacaagctgtgtgaaatcatccacgataccctcaatcacatgattgatgaggtcaagccccttctggtctgtaagtcttgaaatgagacctatcatatacttcttcttgtcaaccgcaaggccaagatcctgctgaagctttgtcttgttgttgaacttcttctttctgaaatcggaagcattgtaattgcaatagattctgccatcagtctgtgggtcataggcattataatcaataccgtttacgataccctgcatgtcaaaatgtctggcacttaagagcccgtttaatccctcaccatagtactctgtctgaatctcgtttgcatatgtatcactgacagttgtgatatagtcagcatatacaagaccacccttaagcatatttgcgtccttcttgaactcaagcttgtccggtgtgaacagattgtctgtaagacctgaaacaccctgtacccactccctgtcccatattccctggaacttgagattgtggatagtgatgatagtcttgataccccagaagaatggatttgcggtaaactcattctttaagtatacaggcagaagtcctgtctgccagtcatggcaatgtataatatccggcttaaaatcaataagcgggagcattgagagtacagccttgtcaaaaaatgtatacttctcaatctcaaacttagtgtcagaagtatatggagaaaatcctgtaaagaactcctgattgtcgataaagtaatatgtaacgccgtcctgctcatatttgagtactccgacatacttgtcctgcacgtaaggacctgagctcatataaaaatgggtaacatactcaaaattattgcgatactgctccggtatacagctataatcaggtattacaacccttacatcccaatagttcttgtcaaactctttaggaagtgcaccgcacacatctgcaagacctcctgtttttataaatggtacacactctgaagctacaaatagaatctttttcatattctcctcccgctaaaacccgtgatatataatatttagtttactcttcccaattgtggtatacttcctggacgtcgtcatcatcgtcaagaaggtctaagatacggccgatgtttgtgatgtcagcttcatctgtcagtgtaacatatgtctgtggaatcattgtaacctctgctgaagccattgtgatgcctgcctcctcaagagcagccctgactgcatcaaagtcagcaggtgcagttgtgatctcgtagctgtcatcctcatcggcaaaatcctcagcgcctgcatcgagtgcctgcatcataaggtcatctgcatccatatcacactcttccttgtcaatgataatctggcctttttcgtcaaacatgtaagatacacagccctgtgtaccgatgcttccctgtccctttgtaaaggcattgcggacattggccgctgtacggttcttattgtctgtaagacactttacgataatagctgtacccgatggtccatagccctcatatgtagctgtctcatagtttacactgttgccgtctcctgctgccttcttgatacctctttcgattgtatcgtttggcatattgttggcctttgccttggcaactacctgtgcaagcttgaagttattggcaggatccggtcctccctctttaactgcaactgcgagctctctaccaatcattgtaaagattttaccctttgcagcatcatttttctctttcttatgcttgatattcgcaaatttagaatgtcctgacataatttgtatcctcttttctacttttaaaaataatccataccttataatatcattttttctcttccggcgcaagtttcttaatcattacctgcttaatcaccttatcctcgacgctcataacagaaaatctgtagccatatgcgctaatcacagtcttatccccctcctccggaatcttatccgaaagcgatatgataaaaccgttaagcgtctcgtaggcatcatcatcaacaggcagtgacagcgcctccttcacatcggaaaactcagtcatgccgtccatgataaatgtctcgtcatcactctttctgatgtagtgttcctcctcatcgtgctcatcctcgatatttccgacaagctcctcgagtatatcctccatcgcgataagccctgatatctgtccgtactcatccaccaccatcgcaagatgactctttttagactgcatctttttaaacagatcattgatgtttaccgtctcgggtataaagtccaccggtctgataagcccgtctatgtccttgatactgcttcggtaaacctcatttttttcaaaaaacgtaaaagcatccttgatatgtaagactccgatgatactgtcaacatcgttttcatagaccggaaaccgtgatttgcctgtatctataataaattcgattgcatcaataaaggacatattgccatcgaggctgacaatattcttgcggtgagtcatgatatcctttacttccttatcatcaaactcaaacacattgtgtatcatctctgcctcagacgcaaggattgtgccctgctcgtgtccctctctgaccatggaaataatttcttcctctgtgacatcatcgtttccaagtattccatcgagagtctttttgttgtttttcattccataaagcaatactccaatacacaaaagaagtatcactacaagtattgataaaattataattgcatataacataatgtttttattatcctatgtaataagttctaagctgatttcaagtgctctatctattttaagcagtgtatcctcatcaagatggcacaccttatccttaagtctttttttgtcgattgtgcgaagctgctctaaaagcacaaccgaatcctttgcaagcgcatactccttgcaggcaagctccacatgggtgggcagctttgctttatgcatctgcgaggttatggccgcacagattactgtcgggctgtgtctgtttccgacatcattttgtattataaggacaggtcttatcccaccctgctctgagcctacaacaggccttaaatcagcgtaataaatatctcctctttgaataatcatacacgaatacactccatattatggtatacaaaaagtatctccagatttttcgagtgtattcttaaaagttacacttttttagtttttgtggtagattcttggaacacgcggtgttataagacacgcaaactcatagttgaatctgcctgacagctcacctaactgctccattgtgattgtctcatctccgtctttaccgagtagagtaaccgcatcgcctattttcacatcaggtatgtctgtcacgtccaccataaactgatccatacagactctgccacatataggcgctttttttccttttatgagaacccagcccttgtttgaaagtcctcttgaatatccatcaccataacccaccggaactgttgctatcctcataggatgctctaccgtgaatgtgccaccgtagcttatgtgcctgcccggctcaagctcctttacataagcaaccctgctgtgcagcgacataacaggctttagggagattttactcttgtctacctcctctgacggccacagaccatagagtgtgatgcctgctcttaccatatccatattgcactccggaatttcaactattcccgcactgtttgagcagtgcttaatcgggatctcgactcctcttgcctcaacaagagctatcattctcttaaaaatatcaaactgctcaaaggcaggctcctttgacagctcatctgcccttgcaaagtgagtgaatattccctctatcataatattcggcagcttagcaatctgtgcaataatatctgcactttcctctgtcacctgaaaacctatacgacacatgccggtatctatcttgatatgtatcttacaggttttattcttagcggcagcgatacgcgatagttccttagcggtctcgtaggtacataccgccggtcgcacatcattgtccactatctcctcaaactgctccgggaagctgagtcctaaaataagtatcggcttttttctgcctgccgcaataagctgcattgcctcgttgcttgtagcaacggcatagccccacagatacggaagcggctccagtacctctgaaacagcctcagcgccgtgaccgtaaccatcagcctttacgactgctgccatcattgtccccggctttagcttattgtgcatcgactccatattatataaaattgcatccagatctatatctgctctgattctgttaattgccatttttttccaccttaatccaaactttgtctaatccatcaataatatcacttgctatcataccataagagccggtattgtcaaataccatatcgccggcaagtccatgaataaatgcaccgtatgccgcggcctttttcgtgtcacgccactgtaccagaagacctcccacgataccgcttagcacatctccgcttccggctgttgccataccgcagttgccggacagattgataaacttttcgccatcagccgctgcgataatcgtacgaaaatccttaagtacacaagtcacattgtacaagcctgcaaactctcctgccacaccgatgatatcttcctgtatattagcaatgctctttttcataagtctggacatctcgcccaggtgcggagtcacgatgacaggtattttatgctcattaagtaaagtcatgttgtctgatatgatattaagcgcatccgcatcaatcacaagaggtatctctgctgtttttagtactgtttcaactaacattttggcattatcagactttgaaagaccgggacctatcaccactgcatctgcccactcaagctctgtctcaagtgctttagctgacgcgatatcagtacaaagcagtgcttccggcaaagcacattggattattgagcggttgcactccggcgttataattttcacaagccctgctccgcttttgtatgcagcctttgccgaaagcaccgccgcaccggccatattgcggcttcctgctataactaacagttttccgaaagttcccttgttggagtgtgccggtctgttatcaagcttctttaaatcagactcatcaagagcccttactgatggcggattaccacaaaaactgtggtcatctatgcctataggcaccaccttaaccagaccgcaataatcacagcccggccacaggataaggcctgtcttcttataagaaaaagtatatgtgaaatctgctttaaaagtgcatcccatcacatgtcctttatccgaatccactcccgacggcacgtcgaccgccaccctgtaagcatctgccttgttaacggctgaaatcacatctgctaaagagccttctatggctcgcttaagccctgtgccaaacagtgcatctattattacgtcacttttacacacacactcaatatcagataccaccttaaagccataccttgcgtatatatttttctgcagctcaaagagctcgcttcctgcctcatctgtgccaaaagcatagtacaccatgcatctgtatccggcctgatttaaaagtcttgctatcgcgataccgtctcctgcattattgcctctgccacatatcacggcaaactcctttgatttatcaaaacatgcaacaagctcccggacaacaccggccgcagcctgctccatcagcaccaccgaaggaaccaaaaagacctgtgatgttgtatcgtccagaagcttcatttcattacctgtaacaatatattccaatatcaattccccttattctcattgtttgcattatcagtatttgcattattggcattgaaaaccataggatcgtcatattcaatatcaaaaagatctaaaacctcagcgccaaaaatatcatgaagatacgaataaatctccctgttgttaatatctctgttctgttttctgattacatttttcttaagttcaactcttatatttgcaatccagtcgtcaatttcttttgattccagtttatttttctcgatcttttcactgaaataatccatcgataaaagcatcagcctgtcatttacagcttttatattcttctggatttcaataagctctccctcaatgttgtcagctttctcatttatctcatctataagctgcttatccttgtcacgattttcatcgccgtcatctcccatgttggcaacaatattagacataattttcgacttaagcttttttaaattcttaagctcattgttgtactttccctgcagctttaacagctcatccagttctttttccgtggctgatatttcgtcagtcttaccatgaatggcaaaaagtctgtgccacttctggtctaaaaccagtaaaggcacctttttcccttttaatgcagcctcaaaatcttttttatcattcataagactcaccttctatttatttttggagtttttaacaatattatagctgagctgcataaggctgtcagacagatgaacactctccacaaccacatctttatttggaatttcaagatccacatgtgcaaaattccatatagcccttattcctaaatccacaagctttgacgcaatagagtcagcctttgactttggcatggtgagcgccgcaatatccaccctgtgtgttctgcaatactcatccagctcacttaacataaggatcggaatacctcgcacactctttcctgaaagctcaggatttacgtcaaaaagcgctgttatgacaaagccaagcttttcaaactttacataattggcgagtgcctgacccagattgcctgcaccgatgataattattttatgctctgtgttaagtcccattatctttccgatttcctcgtagagaaactgaacattgtatccgtatccctgctgtccaaagccaccgaaattattgagatcctgtctgatttgtgaagctgtcactttcattctgtgactcagatcatttgatgaaatacgctccactccctcatccaaaagctctccgagatatctatagtatcgtggcagtcttctgataaccgcctgtgatatttctttactcaagtcttattcctccaatcatcaggatatcatttctcttttaaagacaaaaacccaagattaattataattttttgaaggtcatctgtcaatgtgttaagaatttaacattcaaaaaattcataattatccccgggttatatcttattctaaggctaaaaaccaaatttcagattaaattgtcttctcaagctcctctctgattgccttgatgaagccttcgctgtttaaaacagtaggattttcaattgttgtgatgagtgcgagatcctttgtcatctttccgctctcaatagtctttatgcaagctgcctcaagcttgtctgcaaactcagaaagtgccggaatcttgtcaagctctcctctttttctgagtgctcctgtccatgcaaaaatagtagctacagagtttgttgaggtctcctcaccctttaaatgcttgtaatagtgtctctgaactgttccatgtgctgcctcatactcatagtatccgtgaggggatacaagcactgatgtcatcatggcaagtgaaccgaatgcagatgagatcatatcactcattacatctccgtcgtagttcttgcatgcccagataaatccaccctcagatttcattactctggctactgcatcgtcaataagagtgtagaaatatgtaattccagccttctcaaaagcatccttatactgtgcatcaaagatttcctggaagatatccttgaaggtgtggtcatatttctttgagatagtatcctttgtagcaaaccataaatcctgctttgtatcaagtgcatacttaaagcagctatgtgcaaagctctcgattgaatcgtctaagttatgctgtccctgaataactcctgcgcccttaaactcatgtattaattccctggtctcagttccgtcttctgctgtaaatacaagctcagcctttccgggaccggctaccttcatctctgttgccttgtacacatcaccatatgcatgacgagcgattgtgattggtttaacccatgtctttacgtttggctctatgccctttacaacgattggtgctctgaacactgttccgtcaagcatagctcttattgtgccgttagggctcttccacatctcctttaaattgtactctgtcattctggctgcgtttggtgtgattgtcgcacattttactgcgacaccgtatttcatggttgcctttgctgattcaacggtcacctgatcatctgtacgatttcgctcctctaatcccagatcataatactctgtctttaaatcgataaaaggtattaaaagctcatcctttatcatctgccagagaattctggtcatctcgtctccgtccatctctacaaggggtgttgtcatcgtaatcttgctcattcttaaatctcctttacttaataaggttttcccaaccaaggtgttccatattttcctttgaattgtttatatgctctctggcgcatttttctgccagcagtgcgtcatgattcttaattgcctcgcatatctgtttatgctcgtgagtggagtttttggctctttttgtctcgccgagtgtcacctttctcactctgccgacatactcatgatagtcctttaataccctcataagctccttgcttccgccggcctcatacagcagctcatgaaacctattgtccagctcaagaagcttctttgcattgccctttttctcgtgaaactccgtgagataaatattctcctccatggccgccatgagctcatccgatatcctcgttgcagcccatctggcacaaagtccctcaagcagagctcttatctcgtatatatccctgatatcgtccgtggaaacaccctccacgaacgctcccttattggggatgatagacacaagtccctcaagctcaagctgacgcagtgcttccctcacaggagtcctgctcactccaagctcatcaccgatattcttttccttaagctcatcgccctttgcaaatgttcctgcaagtataccatccctgatatgattgtataccttggcactcaggctgtaattatcatgtgacatgtactaatccacctcactataatactatattaagctttttacagcaatcagtaatttgaactacaagctcattatctgtgattgtggtcacacggccctcgtcgtactgctcatctacccatttctttatcatggtcacaagctttgagttcttatctacttttctgtcatccggcagacggtagtaagtgtttatccacagcgctattcctgcaagtcccgatgtattggacacagctacaagaggtggtctgtttaagaatttacctgtatcgaatatgttgtaaatttcctcatttttgagaagtccgtcagcatggattccggctcttgtcacattgaagtttctgccgacaaaaggtgtacggctcggctgcacatatccaagctccttctcaaagtactctgacaactctgtgataaccgttgtatccattccatcgagtgtgcctttaagctgtgcatactcaaataccatagcctcaagtggtgtgtttccggttctctctccgataccaaacagtgaacagttgacaccgcttgctccgtagagccatgccgtagtcgaattgtttactgccttgtaaaagtcattgtgtccatgccactcaatctgtgatgaaggcacacctgcatgtgtgttaagtccgtatatgatacccggaacgcttcgaggtataactgctcccgggaagtttactccatatcccattgtatcacaggcacgcaccttaatcggaatcttgtactcctcctgcagcttcatgagctcaacacagaatggaataacaaagccatatatatcagaacgtgtgatatcctccagatgacacctagggcttattcctgtctcaagacactccctgatgactgacagatacatattcattacctcgcgtctggtcatcttcatcttatagaaaatatgataatccgaacagcttacaagtataccggtttccttgagtcctatatcctttacaagctcaaagtcctttttgctggcacgaatccacgatgtaacctccgggaacttatatcctctctcgagacacttgtaaacagcatccctgtcctttttgctgtagaggaaaaactcgctctgtctgattattcccttagggccaccaagcttatgtaaataatcataaatggtaacaatctgctctgtcgtgtacggtgctcgcgactgctggccatctctgaaggtggtatctgtaatccaaatgtcctcaggcatattgtgaggcactattctgtcattgaatgctatcttaggaacttctgaataaggaaagagatttctaaaagtattcggctcatctacatccacgagctggtaaaaatgctcttcaagctgcagtaaatttgttttttcgttcatcaaaacttctctcatcttcacatctcctgtgcttagttttatcttttgaataattgtatacaattatactttttgtgtcaataaaaaaatttaaatcttagtgtaacactttgttatgtctatcataacctagagtgtaaataaattttattggaggtcacttatgagtgatttagcagcaacaaactgttcatgcagcaatacagataacggatgcggatgttcttcgattttatggattatcctgttactgtgctgctgttgtggaaatggtaacggaggctctttcttcggaggaaacgactgtggaagtggcaataacagctgtatctgggctatcatcttacttttctgctgtggtggctttggctgtggcggcagcagcaataacggctgcggatgtggctgcggctgctgatttacatttttactgcgggtcttttcggcccgcagctttttacgatttttcagtattctttttttgcctgcactgctctttttctttgagcttttcaaggactttacattcgcccttcactctgtgctttttgatgcattcttcatctatctcgtatacgtcgtgaccatctatgataagcatatatctttttttaataatatatgctgtaaacatgcataatgtgaatcatgtgacatattatatagaaatatattttaaaggatttttatggacgagaacagcctgtttacaccattcgatgaaataacccagacaagggagcttcagatgcttaaaaccataatcccatatatgccgcatgactcacaaaagcagatgactcttatggttcactacatatcacttatgaattcaatgagaatgatagactcagcacctgcactgtctgttgcggagactgaaagtatgtcagacagaagactatccatgctcaatgccttaaagaaatactgcagcaaaagtgaacaggatacgatagacaatctattaaatattttttcagttttggacaatagggagatttatgacaaagcaggaatttttaaataattttgtacaaaaggaaaaaccaaaggacacaacaagtgccatgccgtttctcatggaaagtattaaggaggcaaagcgtaacggcatcgaatttaccaaagaagaggtctattccatgtgcaccgagctaagcaaaaacctgcctgagaaaaaccgcaggcaggttgaaaagcttttaaaaatgctataattaatttttaaacgaatctgtatttattcgaagtatcttgtctatcggtgcaggcgagtttcccttgccatccgtgccctcaaggtacttctcccccgcagattcaaaaatgacatacaatcttttatccacactgtcaagctcctctgagcccggcggcatctctattgtgatgtcggggctgtttggccttgacgacagagctatgagtgatttgtagcacttgatatacgatgactcattcctgccataggaggtgctcagatatacctttcctgaggcatcaaatgtaacgccctgcactctggcaggtatcgtatatgtgctcagacttgtgagcctgtcgtcctttttgtcataataatatgctaccatctttgacttaaaaaggatattatgagtggctatccacagcctgcctccatagtatgtgatgcacgacggcttgtttcccacatcaaacacatctaccacacctgtcgcatcgatgacctgcttggaattcgcagtggccattagagagataaaatcatacgagatgcgctccacagttgtgtcgtaggaattgcacacccatacattttccccgtcaaaggcaattcctcccaggtgactgtttgcatccatgccaagtgtcacaaggtactctccgtcctccctgtcaaataccataagctccccgagtgagcccttgtcatcagaatagctcgtgataagcacgtattcgtccgtgatacaaattccctgaggacactgtgcctcactgaaaatataattattgagaaaatcattttccttcgtctccggcatgcccggaatatctatttcatctataaaatcgtaatcgcaatccttaagcgccagtgtatgcgcttttttattactcctgtaattgtaatgctctacgctgtattcattgttaatcgtcctgacccatttggcatataccacatatccatttgctttttcgtaggtcagaacatccgccttttttgaaaaatgctcatccagataccagccatcaaatttataaccgtatttgtgtggttctcttagtcccatgaatttctgctttggtgtgatgtatccacaattattgatattgtttgccgcaccgcccagattatagtaaatatatgaaacaccatcactttctgacatattgtcaaccagtgtatttagtgatggcccggaagcaaaagaggcagcttctgcctcttttatctccgatgcaaacacatgagtattggtaaaaatcaatgtaagtaatataattaatgctattctactcttcaacttcaacaagcttgcttgccctttcttctatctgttttgcagccacatcatccggtgcctgctcatatctggcaaactcatatgagaatgtgccgcttccactagtcattgagcgaagtgtggcattgtatccataaagctccagataaggaatatccgcaactatctcctgatatccattgtctgtcgggttcatgcccatcactcgcgcacgtctcttgttaagctcacccatcacatcacctgtatagccctcaggcaccactaccttaagagtggcaatcggctcaagaagcacaggctttgcctccataatgccctttttaaatgcctgctgtgttgccaccttaaaggccatctcagatgaatcaaccggatgataagagccgtcatacagcacagcctttatacccgtcacaggataggctgcaagaggtccctttttcacggactctgcaatacccttttcaacagccgggaaaaagttcttcggtacagctcctcctacgaccgtctgctcaaatacatatggcgtatccatatcacctgacggctcaaaggtcatcttgacatgtccgtactgtccgtgtccgccggactgcttcttgtacttatactctacgtcagattttttcctgatagtctccttgaaggctacctttgggcgcataagctctatctccaccttgtacttttcaaggagctcacttgccactacctcaagctgcatatctccgataccatatagtacagtctgtccattttcactgtcatttacactgtttaaagtcagatcctccattaacagtttctgtaaagactgggaaatcttgtcctcatcgccctttttctttgccttgtagcgcattgccacatacggctttgatatgcttgttctaagatatgtaaccggcatatttctggtggaaagtgaatctgtcgtaagagtctttgcaagctttgcaagcgctccgatatcacctgcatgaagctccttcacttcctccaccttactgcctctcatcacatagagctttccgattttctcatcgcagtccctgtgataattgtaaagtacatcatctgtctttagtacgcccgaattaaccttgatcagtgaatacttaccgatgtatgggtcaactatcgacttgaacacataagcgctctttgattttgcaaaatcataatcagcattatacacctcatttgtcttggtgttaataccggtacagcttctcttctcaggacttggcaggtatttcacaatatcagccataagtgtatacatgcctcttgcgagaatatttgagcccatgagcaccggtacaatagagccctcaagcacgtttgcacgaagtgcagccctgatttcatcatcagaaaactcctctccgccgaaatatctgtccatgaactcctcacttgtctcagctacagcttcaactaaagcctcacgacatattcccaggttctcctttgagtactcaggcacatcaaacttatccacgcctccgctttcattccatctctttgccctctgctggatgacattgacatagcccacaaacttctcattctctctgattggcagatggaatggagctattttcttgccgtaaagctcctgcagctttaataccacatccttgaagcttgcattgtcgatatccatgtccgtcacgaaaatcatcctcggcagcttgtatttctcgcatatctcccatgctctttttgtgcctgtctgtatgcctgccttgcctgaaaccacgatgattgcagcatctgcagccgatacagcttcttcaacctctcccacaaaatcaaaaaaaccaggagtatcgagaatatttattttgacattatcccactcaatcggtacaaccgatgtatgtatagagaactgacgctttatctcttctttgtcaaaatcgctgatagtgctgccatccgctacagtgcccattctggtggtctgtcctgccagatatgccatagcttccacgagtgatgtcttgccacagccgctatggcctaaaagcacgacgtttcgaatcttctcagtagtgtaaacattcatttcaagtacctccctgacattattatagtatgtaaacattgtactaatattttatataatttacaacacttttatgcaatctgacgattattttttattattatatttgaataaatatgccaataatttattgctttatagtgttaaattggatataatatattgtaaatattcaaaaccactatagtgcgattttgagaatgtgcgtgtggtgattctgaatagttacaataaagaattaggagatacacataaatgcattttgataaagttggctttatagggctcggtctgattggcggctcgatagccagaaaaatgaaagaaaataatccaaaggtctcaattatcgcaacagccgggcatcaacagaccatagaggatgcctttgggcttggcctgatagataataatgagcttttagagcttaactcttttaaagactgcgacgtaatctttctgtgtgcaccggtaaacaaaaatatcgaatacctcacacagcttaaggatatcataaaggatgactgtatcatcacagatgtaggcagcaccaaaacccagattcacgaaaaggttatagagcttggccttgagcgcaattttatcggcggtcatcctatgaccggctctgaaaaaacaggcatactcaattcagacaagcagcttttggagaacgcctactatattatcactcctactgcagcaactactgaagaaaatcagaatgatttcaaacagtttgtactttcactgggctcgatagctctcattttagactacagggagcacgatcatgctaccgcagccatcagccacctgccacatatgattgcatactctcttgtcaatctgattgagcatattgattccgaaaaagagaccatgaaaactatcgctgccggaggcttccgcgatgtgacacgtatcgctgcaagctcccctgtcatgtgggaaaatatatgtgagtccaacaaaaatcagctgctctcactcatggaccagtatgaagccaatttccataagcttcgcgaaataattgcagacggcagttctcaaaagatgctcgattattttcaggactcaaagaattacagagattcactcacactgcccggtgccaaaatccgcaaggatttccacgaggtatttgtcgatattgctgacgaggcaggcggtattgcagtgcttgcaagccttttagccttcaacagcatcagcatcaagaatatcggcatcataaacaaccgtgagtttgaggagggtgtactgcgcatagagttctatgacgaagatgctcttgaatcggctatcagcgtacttaaagaaagaaactatactattcaccgcagatgatttatcctgttatatggctttaatccaaaaacaaagagccgtaaagcgaagtaatttcgttttacagctcttttggtattaatatacgctctcctcaagtacctcatagaaattctcaaaggtcttgcggcagcaataagggtctattatctcaacgccctctgccttaagccccggcaaagtaaatgacatggctacgcggtgatcgtcatacgtcttaattttacagggcttaatacgctctgccggataaattcttaagccattttcagtttcttcaaccctcacacctaattccgtcaggttttcctcgatggcgtttatcctgtcacactcctgcagacgaatatgcgaaatgccttctatccctacaggtgcatttacaaacggtgcaatcgccgcaagtgtcagcgcctggtctgagaatgttgacaaatcccagcttccgccatgtatatgagcattctttggtggcatacacactatgccgtctgcctcgtcggaaattgtgcagcccatatccgcaagcacatcaagaaatgccacatctccctgcaagctgttctggtgcaccccaatcacctttgacttaacatgtaaaagcgggctcattgcataaaaatagcatgcagccgacacatccggctctatatcatagtctaagctttcatacgccgctttcttagggataataaagctgttattctttttgtcctgcataacatcaagcccaaactgcttcatcataagacgcgtcatctcaacatatgccataccatgcgttcctgtgacattaatcgtaaagttcttctccatcactatagccgagataagaagggcactcaaaaactggctgctcttgtctacgtttatatcaacagtatcagcatactcccctgtatttccgatggtaaaaggaaaatgatattcgttctcatcatactcaatatgggcacccagcttttcaagcgatacaagcagatccttcataggacgcttcttcatctgctcagaggacactatatggtatctgccctttgacagtccaagaagagctgtaagaaaacgcgcagcggtacctgcacttcccacatctatctcagcttcattctttggtatcctgcctccaaagcctgttattgttatttttcttttatcctcatccaccaaaaccggaaatcccagacgaatcagtgcatctataaaatgtctcgaatcatcactaaaaagacacccttttaaaacgctgcgcccgcttgcgagtgcagcgattaaaagggccctgtttgtgatactctttgagccaggtacactggttactatatcatgtggatgatttactttttttactttataaatcattgaaaatctgataaatatcaatcttgagtgcatcagtgtctgtcataccgataaacacggcaccatagtgatatactccttcttcactgtctgttcttcgtacaatctcgacaactgcatccacaacctccttggtccaaatctggatcctggtgtcataatatgtatgtatatcaagaggtacctttgcattaaatccgataccgcttctggaaatatctgtgacatccacatgacaatacttaagtgttgtcactccgtcctcatccagccgctctaactgtaccgatacatcaatgtcaagtcttttatgtcttctcttttcttccattcactttaccccatctattatattattgactaagggaacaaattaccctcaaacaacatattagtatatatgactgatttttacaagtaaaatttattcagctgcctcatcgtccatatgcatatcgtttgtgataaacatagcatcaccaaagctgaaaaacctgtatctttcctctacagcctctttgtatgcattgaggacatgctctctgcctgctaatgctgacacaagcatgacaagtgtagactgtggcagatggaaatttgtaatcagacagtcaatcaccttaaagctgtatcccggataaataaagatatccgtccatccgctgcactcttttagcatgccgttttcatcggatgctgcctctaaggtacgagtgcttgtagtgccgacagatattattctgccgccatttttctttgcattattaatcttgtctgctgcctcctgtgacaccatgtaaaactcagaatgcatatggtgatcaagcacattatccacctttaccggtctaaacgtgccaagccccacatgtaaagtcacctctgcaatatccactcccttatcctttacctgctgtaaaagctcctttgtgaaatgcagtcctgcagtaggcgcagcggctgagccgtcatactttgcatatactgtctggtagcggttcttgtcctttagctgatgtgtgatgtatggcggcagcggcatctgtccgagcttatcaagtatctcctcaaaaataccctcatagctgaactgaatcagcctgtttccatcatcaaccacatctattacttcaccggttaaaagtccgtcaccaaatataatctttgtgcccggctttgcctttttaccgggctttacaagagtctcccatacgtcattttgtctgcgctttagaagaagtatctctatctttgccatagttccttccttcacgccaaaaagacgtgcaggaattacctttgtattattgagcacaaggcagtcgcccggtcttaaatatttaacaatctccttgaacacatgatggctgacttctcctgtcttcttgtcaagcaccatgagtcttgaactggagcggtcctccagaggatcctgtgctattagctcctccggaagatcataatcaaaatcttttacgtccataattttcccattcctaacactatactaacgtctaaccacgaagtgtgatacctgtagtctctttaagatgagcaagtatatcctttacaaagccctcgaccttcttagtcttaagctcctcatcctttggtgtaaatactacactgtacgccatgctcttcttattcggaggaagctgtacaccctcgtaaacatcaaacaatgtaacatctgagacataatcacaggcttccctgataccgttttcaatctgctcacatgtgatatccttgtccacaacaaaagcaaaatctctcttctcatcatcaaattttgagattggagtaaatactctgtcctttccataccactgtgaaagaactcttaagtcaagctccatcacatatgccggtactctcatatcaagctcatcgcatatctcatatcttacctgaccgagatatccgaccttttgaccgtcacagaatacctctgcggtctgatacggatgaaggaatggcttttgagccggcttgtatgtaaacttcacatcaagcgcatccgctacagtctcagccagtccctttatagtaaagaacgattcatcctcaccgaatacgcctgcgcaaagtgtctctctctcatccggatactctgtaagcggaagctcctttgctataaagatatttcccagctcaaagattcttccctccaggatacccttcttctggtttcttgctatggcataaagcatctcagaagcaagtgttgttctcataagcgagaggtcaacattgattgggtttataagcctgatagcatgtctttcaggtgcatcctccgggaatctgagcaaatcaagatcagcaggtgagaagaaagagtaatgtattccctcatacgcgcctgctgcacagagcacctcttttatcttgcgctctgtctgctgtctaaggttgagtcctccgagtgtaacctgtgctgtaggcatgaatgcaggaatgacatggtcatagccatacatacggataacctcctcagccacatccggataatcctccatatcctcacggtatgcaggaatcatgagtgtcagctcatcaccgcttacaaccggtgcaaagcctaaatttgtgagtattctcacaatatcctctgtaggtacctctattccaagcacaccattaacctttgcaatagaaaccttcatctcttttggctcaagcgaatttcctgtagtcacctcaacgtgagttgaagaaaccttaccacagccaagctcctccatcaggtgaagcgctctcttcatggccatggctgttgtgtactcgtttacgccctttgagtaaagtgcactcgaatcagatgactgtcccaacgcacgtgagctctttctgatattgtctcttgcaaattttgcagactcaaacatcacctctgttgtaccgtcgttaatctcagagtttaagccgcccatgataccggcaagcgcaactggcttctttccatcacagataaccaggttattgctgtttaactcaaattccttctcatcgagtgtgacaattttctctccatcgtttgcacgtcttactacaatctcatctccctcaaggtatgagtaatcaaaagcatgcattggctgtccgagctcttttaaaataaagttagttatatctactacatttgagatagagcctattccgacaagcgcaagacgctttctcatccatgccggtgactcggagatttttacatcatgcacatagtgagctgtgtagcgagggcagatgtcctgtgccaggacagataccttgaaattttccttcttcacatcatcagcagtatagtcaagtgcaggctccttaagctcttttcccaaaacagcagcaacctctcttgccatgccatatatacactggcagtcaggtctgtttgctgtgattgcaatatcaaaaatccagtcatcaaggccgaggataggttttacatcatctcccgccttagcatcctcaggtaaaaccaaaagtccgttgtagcctgcacccggatagaggtcctcatttaagccaagctctacgcctgaacataacattccatatgaatcatatccacgcagcttgccctgctttatctccatcacgccctctattgtaacgtgatcctttgctgtggcatatactgtggcaccgataagtgcgagaggatatttgccccctgcctttacattgtctgctccacagcagatttgtaatgtgccatgtgctccggcatttacctgacacaggcttaggtgtgtctccggaatcggctcacatttttctacaaggccgactactacgtttgagatatcctttcccacctcatatgattcctcaacctcgaaaccacatgagaataatttttcctctaactcctttggtgttacatctatatctacataatcttttaaccagctaagtggtgttaacataatttttgcctcctgttatatattcaagaaaaatgaatctagttgtcatcaatctggtctaataccctaaggtctgactcgaataaaagcttgatgttgttaattccgtatttgagcattgcaatacgctcaagaccaataccaaatgcaaaaccactatactcatttgtgtctatgccacagccctcaagcacctttttatttactacgcctgcaccaagcacctcaatccagcctgtgcccttgcataaagagcagcccttgccgtggcactggaaacagcttacatcaacctctacagatggctctgtaaaaggaaagtatgaaggacgaagacgtgttgtgacattctttccgaacatcttctttacaagctggtcaagcataccctttaaatcgcagagtgtgatgcccttatctaccacaagtccctccatctgtgtgaacataggagaatgtgtcgcatcatcatccgaacggaaaaccttacccggtgaaacgaccttgataggcggcttctttgcttccataacatgaatctgtcctgctgaggtctgtgtacgaagtaagaactcaggtgataagtagaatgtatcctgcatatcacgcgccggatgatcctttggagtatttaaagctgtaaaattatagtaatcattctcgatttctgttccctcgtaaacctcaaagcccatagatgtgaaaatatccgagagctggtcctttacctgtgttacaggatgaagattaccctttttgcttctctttgcaggcatagtgacatctattttctcactctcatacttgcgcttaagtgcctctgcctcaaatttcttaaccttctcatcaagaagcttctcaactgcctcacgtgtctcattgacccactggcctacctttggtctgtcctcaggagcaacatccttcatgccctttaagactgctgtgagctcacccttctttccaagaattgcagcacgcacatcatttaatttttcaaggccgtcagccttatcaatttcagcaagtgctttttctctgatctgttgaattttgtctctcatcgaatttcacctcataatatttttcttaatttgcataaactcgtaatttcaagcttgaattcgccgtttatgcgataaaaaacgcccctgcatggctattaaaccatgcagggacgaaaattccgcgataccaccctgatttccattgaagaaatatccaatggactctcattgatatgtgtaacgtacataacacgtcatgaactactgtgcttcatccatgcagcttcagtgtgaacttcaatcaatagcctttttgtaagactgctttcagccggtgacaatctctctctggtcaaagtactataatctactatgcaccttcattgcttttattatatatagctgcgacatatatatcgcaaatgcttatttcttaataacacataagtcattttagcacaatctctatattttgcaagtagaaaattttatatttgatttatattttatttctaagccccttaggataatggtttttaacctgtgtgccattcaccttgccccagccggccgtgtatccgtccacacatacaagtgcccagccctttttacattcagccgcctgctcatcagataacataactgactgaccattgaaaaagccgatagtctgcggattgtcacatgtaagctttactacgtttttagcatcatttagcttaagtgcaagtgccagcgaatgcgacggctcaaagcgctgttttttaaactctcctatatgaagccctgctcgctgcaccttaagtcctttaatatctacttccatatcaggcagcctgtagagctgctccccaaacatgacaagccttgagttttttatccatgctgccatatcctctgatatggtctcatcaagaaactctgagagaagcttcatattttcttttgtgagagccggctttgtttcatttttcctgttcttactatttttgttctttttggttttcctgtcagctttaaggcctgtgtccacactgcctcttctcacaagctttgccacaaaatgcccttctccgtccaccttatgcggccagaagcgctccatttcttcaagtgtaaaatcaggatgtctctccagaaaatactcaattacatcctcattttcttccttcgagaaggtgcaggtgctgtacactatcgtacctcccggcttaagcatcaccgcagcattatccagtatttccttctgccttgccgcacagattgccacattttccatgctccactgctctattgcttcaggcagctttcgaaacattccctctcctgagcaaggtgcatccacctgtatagcattaaaaaagcctgggaaatgtgaagcaagcacaaagctgtcctcatttgtcacaatcgcatttttgattcccatacgctctatattctgcgacaaaatccggcttctttgtgtgttaatctcatttgataccaaaagtccgctgtctcctaaatatgtggcaagctgtgtgctctttccaccgggtgccgcacacaggtcaagcactctcatacccggctttggggctaaaagagcagccgccgacatggcacttggctcctgtatatagtaaagtcccatctcgtgataaggatgctttcccggacgcacattctcatcaaagtaatatgcctcatttgcccacgaaacccttttatctgaagaaattccaagtaccttcaatatccgcattctttcttccgggctttgaacctttaatgtattgaatctgagcgcctgaaatctgttattgtcatagctgtataagaaatcatcccactcattgcccagaaatgccttcatcttgttttcaaactctatcggtaaattcattgtcaaatcctcttgttttcttacgaaataattacaatgtatcttactatcacacacatagtcatgtatctaagcacttcgatattaccacatttctactatccatgctatcaattttttgtaggcatatcactactcactgcgcacactgcttatatccaccactgtcacatccttataataatatccgattatatccttatagctgcttcctgcctttgccagcttgtctgccccatactggctgaagcctattccatggccgaagcctcctccggacagtgtatagtgaccatttgcaccagcactcacactaaagcaggcgcttggtatcatcgacatattctccctcacagagccatcgtttaatgtaacttttttctgataatgtcctaaagcctttcttatatcattctccgccgtaaaggtctgcgatttgtttccataatttattgtgagcgaaagtacataaccagaatccgacgtcttatcgacagaaatacctgttgccgcaccatactgcggatcattgtatgccgataattcaagctcagatgtccatctgtagtatggcgaattgtcgtccaccgactccaccttgtgtatgaaatccggtgtactcgaagaccatacctccatatcctcggtttttccggcagacgtagaaaaataatagcatgttattaagcttcctccacatgagacaacctgtcctgctgtagcttttacagcctcatcggtcgactgctttgtttctgaagcgttatagacctgaaaagccgtggtattgtcaatatttgctccgtatagcgcatactgtgtatttttcatctgtgaatatacaaaggttctcgcacaaacagcctgagccttaagcgcctctgcatcaaatgtagacggcatctccgacggcagcacatagcgcacatatgtctccacatcgactgtattcaccgccacaatgccttcctctgtcccgataaactcaaatgagcccggatagctcttaccgtttatgctgacataattgtccgctgagctcacctttatccggcttttttgtgcatttgccatatatgcacccacatcatcaatagcattgctgccacagtcggcatcatccacataaaggttagacgctgcacctgccacaattgtgggaaatgcatcctttccatcgttttttataagcacccttatgtatgtaaggtcaggtgcctgtcttctgacgatggcacatatcctgccggaatcaagtatgtaagaaagtgtttcacttccgattatcaggtcagaaaccgctatttccttaggcgctgctcctgtctcatcatacaccggcagcttgtctgactgcattggaatgtcaccctgccctgcaatctgcatggtaccttctccgtacgacagcatcacacctgatatatcatccggctttatctgtatctttttgaccttagagccactgatttcaatatcacagacacctgtaaagttctcttccatggtaccctttgccctgtatagatctccatcacatatgaaaatcagccttccatcgtcatttgacacaatatatgcattctcatacaccatatccttcgtcactgccttcgcctgttttacaagtgcccccttttccttttgcgccataacaattgcaaaaacaatgaccacgcataccatggttatcgcaagcattatccagaccatctgattcggtttttgccgtcttcgtcttctatttgccaaatttctgttctccttaacacccaaatagtggttactgctcaaaaaatgggagctgcaaaaacagctccctttatcatctgtacctaagaatcctttgtgctttaaaaatcttttgtatctcataaatcttttgtgcgtccggagttcttttgtacattattattcttttgtaagaacccaaaatgccggtcctgtaatttagactcctagcgctcttgctaggtgggtaaccgcagtctgccttctgccttccgctgcataatgacggcctgacatccaacagctcatataggaatcccgtttaaagtaaatgtaggttctaaatacacagggttgtcgaacatctcaggtatctttgtaaattcattatactttattatgtctcatgttgcaatgcaaaattcatgttagaatttaacaaatttttctctggcatttcgtaacatatttgaaaaccagataattactgcgacgaatataatcatctccacatatgaccagtacggtatctttttgaggcaatccgaaactatcgcaactatactgataacaaaaattacaatgccgaatacaagtgactttggataaatataagctatatatccggccgtatcctttatctttttcatctcatcctcagccacaaaggtactttcaattttgccgcttttcttcattcgtagtgacacaaatattatgtaaattcccagtatcagcgtgaccgcatctattataataaaatagttcatgcttctttctcctgtatttttatttattattcctaaatagttatcacggatcttatatatacaaaaaatatgtaaaatcaccaaaatcagtataacctcatgtaaggaaaaaataaatggtaaataagtcccaactattccttgaatttttattattaatgtagtaaaatgtatttatattttcaaggggaaggagtttttaaaatgcaacttgacgatttaaaaatacttatatgcgatgattcgattctcgcaagaaaacagatgaaggatataatcaattccattggttcaccgactatcattgaggcggcaaacggacagctcgccattgatatgtacaaggagcataagccaaatctcacatttatagacattgtaatgccggtaaaggacggaaatgccgctatctcagaaattatggagtatgacagcagtgctaccatcttcgttgcgtcatctgtcggcacacagtccgagcttaaaaaggctcttgccgccggagcatgtgacttcattcagaaaccaatcgacaaggatcaggtcataagtctgattaagaagcacataggaggaaattaatatgtatactcaattttttggcaattttctcctatcaaaggggtatatcactaatgagcagctttttgatgctctcaaagaaaaagcacaaaagcacgcaaagctcggtactcttgccatccactcagggcttatgacagctgccgaggttgattcagtaatagtcgagcagacccatcaggacaagaagtttggtgagcttacaatagaaatgggctatctgacagacgagcaggtaaaggagctcttaagtatccaaagccctgactttcttcttttaggacagattcttttagacaaaggcataattgacaataccactctcgaaaagagtatacatgattaccgcagtgagaatgctatttccgatcttgacatggtactcgaggataaggacagtataaatcatctgataggtcatttttttgccaatacaggcatagatccctctgccattgacattatgtatcttgagcttttgtttaacagctttattcgatttgtcggtgatgactacactccgctctctgccgagatatgtgacagctttagtgcggactgcatggtacgtcaggacatcgagggcagctatgccatatctacatacataggcatgagtcagacaacagccatcaattttgcatcacgctatgtaaaggaatcattttcagtatacgacgagtatgtacaggcatctctcgatgatttcctgaacctgaacaatggactgtttctggtcaactgttcaaatgatcaggctcttgagcttactctcactgcacctgagcattttgatggacagacacgcagcttcaataaagcctgcaagctcaagctgttataccctttcggagccattcactttattattgaattctaatatctctgcaaggcagtttcagtaatctgataattatttactctataattagagcacaaaaagaacatctgcaatcagcagatgttcttttatgttgcactatatataattatatatcaatcaaattacaattatatgattaaatgggtcaaaggtaacattatattattactgcacaccgagcattttcttaacagtgttttccatctgatccacatcacagactgtgttatgaagaatctttgcatccctgatttcctcgatggcatttggtaccttaacgttaccaagctttgaaagctcatcgacaagttcaaagtctgtcattgaatcgtacttaggatcaattgcatccatcacacttcttgtgaatttgaatggacttgctgtagatgcgataacagtctttgtggctgtatcgcctgtagcatccttatacttgctatatacacctgctgcaactgctgtatgagtatcaataatgtatcctgtatcctcgtaaagctttttgataacctcagcggtttccttctcacttgtgtaatttccatagaagtcagaaagcttttccttcatctcaggtgttacagtgtatttgccatccttagcaagcgaagccataagctgagcattcttatttgcatcatttcctgcgatacggtaaatgagtctctcaaggtttgaagagatgagaatatccatggatggtgaatttgtgaggataaactctctgtttttatcatactctcctgttgtgaagaaatcgtaaagtaccttgttctcgtttgaagcgcagataagctttgcaacgggaagtcccatgttctttgcataaaacgctgcaagtatatttccaaagtttcccgtaggaacaacgatatttatcttctcatcctttgcgacagctttctgtgcaaaaagctttgagtaagcatatacatagtacacaatctgtggtacaaggcgacctatattgattgagttagcggatgagaactgatagcctgcggcatccatcgtctctgcaagagtcttatcattgaacatagcctttaccgctgactgtgcctggtcaaagttgccgtgaatacccactacatgagtattggcacccttttgtgtaagcatctgcttctcctgaatcgggctgacaccattctttggatagaaaacgataatctgtgtcccctcaacatcagcaaagcctgccatagctgcctttcctgtgtctcctgatgtggctgttaaaatgacaatctcgtttttaacattgtttttctttgcagatgtgataagtaaatgaggcagaatggataatgccatatccttgaaggctattgtagagccatggaacagctcaaggtagtaagccccgtcagcaaacttaagcggtgcaatctcagtagtatcaaacttgctgtcgtatgccctgttgatacaatttttaagctcttcctctgtgaaatccgtaaggaaaagcttcataacctcatatgctacctgctggtatgacatcttagaaagctcctcaatagaaacatcaagtgccggaatgctctcaggtacaaataatcctccgtcatcggcaaggcccttaaggatagcctgtgaagctgttattttcttttcactgtttcttgtgcttgaatataataaatccattttttacctcatttctctttttatcttatctaaatccatattgctgcatctatatgcagacaattattatcctttatagtataataaatttcatatatcaaatcaataacaaaaatgctacaataatatatatatgattaaaaatatatgtgaaaggaacacaaattatatctatgctccagggagtttacagcgctgtcagaaaagacggcaccatttactacaggtccaacatcacctacaaaagcaaacacatcagtctcggaagctttgacagtgagctttctgcaagccgcgcctatgccactgcatcgacaattttattaaaagaaacaaacagcatagaggactcttactttcacacccatgcacttgcattcgataaaattgtaactcttattaactaccgggacaacggcatgtacataaagacgcccatatatctgcacaaaaactatttcagctatttcatggatatatcgtgcgaactcaaatttaatatagatgacctgttctactactcagggcaccgcatactaaggcggcagggacatctgtacgtcaacgactacggcatgcaggtcaccctgcttagccgctatggcatacagcctcatgctgtttgcggacgggactatgtatttgtaaacaacgattcaaccgacatgcgctacgaaaacatcaagctgttaaatccataccatggtgtagagattgtcaaaactgcagggctcgacaaatataaagcacgcatacacataaacggcaattttgtcataggaacctacaacacaatcgaaaaggccgctattgcctacaataaagctgtcgatatggctcatgcacatggcatagaaaaaaactatccggaaaactatatcgaaagtatatcaggcaaggaatacgcggatatttacacttctgtgacagtttccgataaatatgtgcagtatctgcagcaatttgatttatagaacgcatatcccacagtttgcatattaccattacttttaatattgtactaaaaactcccgcggttatataacctcgggaatttttataattacttctgatttatatagtttacaagtccctcgcagtcgataatcttctgcatgaacggcgggaaggcctgtcccttaaacttctctcctgttgtctcatctgtgatgataccggaatcaaagtccactgtcacctcatcaccggcgtttattgcctttgctgcctcagggcactcaataataggaagacctatattgattgcatttctgtagaaaattcttgcaaatgtctctgcgataacacagcttacgccggcagccttgatggcaatcggtgcatgctctctcgatgaaccacagccgaagttcttgttggctaccatgatatctccggcctttacattatttacaaaatccttgtcgatatcctccatgcagtgtgttgcaagctccttaggatcagaagaattcagatatcttgcaggaatgattacatctgtatcgacattgtctccatatttaaatacacgaccgtgtgctgctttcattgtgcttcctccaatctttacataacatcctttggtcctgaaatcttacctgtaatggcacttgcagctgcaacagcagggcttgccagataaacctcagaatccacatgacccatacgtccgacaaagttacggtttgtggtagatacgcatctctcgccctcagcgagcactcccatgtatccgccaagacatggtccgcaggtaggtgtgctcacgatggcacctgcctcgataaatgtcttaagaagcccctcttccatagcctggagataaatcttttgtgttgcaggaatcacgataaccctgataccatccgcaacctttttaccctcaagaatctttgctgcaatacgcagatcatccatacggccattggtacatgagccgattactacctgatcaatctttacatcacccacctcatcgatggtacgtgtattgtcaggcagatgcgggaatgaaactgtagacttaagtgtgccaaggtcgattgtatactcctcatcatactctgcatcactatcagcctcatactctgtgaacggacgctttgaatgctccttcatgtactctcttgtgagatcatctacagggaagataccattcttgccgcctgcctcgattgccatattggcgatagtaaatctgtcgtccatagaaagatatttaagtccctctccgacaaactccattgacttataaagtgcgccgtccacaccaatcataccgatgatatgaaggatgacatccttaccgctgatccactcagccggttttccgacgatattgaacctgatggcagaaggcaccttaaaccatgccttgcctgtagccattcctgctgccatatcagtgcttcccacacctgtagagaatgctcctaaagctccgtatgtacatgtatgtgaatcggctcctataatcacatcacctgccacagtcagtccctgctcaggtaaaagtgcatgctcaatgcccatttttcctacatcaaagtaatttgtaatctcgtttttgcaggcaaactcgcgaacacatttacagtgctctgcggacttgatgtccttgtttggtgcaaagtgatccataacgagtgcgattttatctttattaaacactccctctaccttcatcttgtcgatctcatgaatcgctaccggtgaggtaatgtcgtttccaagcacaaggtctaaatcagcctcaatgagctgtcctgcactgacagagtcaagacctgcgtgtgctgcaagaatcttctgcgtcattgtcattcccatgcttatattcctcctagcatataaaatattgtattatgattgtatctgaatcaagtttactaaagacatcataacatatgatttaccataataaaaatacataataaacatatttaccataactaaatctcatggtataataaacacagatttgttgatgttcacacctttttgtgacaagcaacgattacagcccattaaaagtacaaaacacaggaggtacaaatgaaccagaatctctcatcttactggattttctatactgtcgccaatgccggcaatatatcaaaggcagccaaggagctctatatcagccagccagccatcagcaagtccatccaaaagctcgaggacggactggaatgcaagcttttttccagaagctccagaggtgtcgtcttgaccgatgagggcaggcttctttatgatcatgtaagcgaggcctttgaggcattaaatgagggtgaggaaaagctgaagcgctcaatagagctcggtgtcggccagcttaagattggtgtcagctcaacgctctgcaaatacatgcttttgccatatctcaaggaattcatacacagaaatcctcatataagcatttccatcgaatgtcagtccaccaatgagaccttaaagctcctcgatgaggacaagatcgatataggcctgatcggaaaaccggcgtcccttaagacctttaatttctattatctggacaacatcgaagatatatttgtcactacaaaggactatctgcgcaacttaagcgcccgtggtgtcaaaaagagcgagattttgcaaaactctactctcatgcttctcgataaaggcaatatgacacgtaaatatattgatgattatctgcaggagaaccagatacacgtaaaggactctatagatatatcaaatatggacctgctcatcgactttgccaaaataggcgtaggtgtggcctgcgtcataaaaagcatagtttcaaaggagcttgctgacggtaccctgattgaaattcctctcggcataccaatccacaagcgtgaggttggctttgcttacaaggagtcttcaaagctttccacctctttacagacctttatcaagttttatgagagctacacaccagaggatttttaaataacaaaatatgaccccggaggtattaccttgaaagaacaaatacacactatccccatatcagatgcctttgacaatgccggcgaatgtcccttctgctatatagaaaaacgcactgaggatcacgtcatggattttgtacttggtcatggtgcctcttacatggaggctgatatacgcgacatgaccgataaggaaggcttctgccgggcacatttcaagaagatgtttgactatggcaattcactcggaaatgcctggatactaaaaaccatgtacatgcgccatattgaggagatggacagggaatttaagagctttaagcctgattcagtgcaaaagggcggccttttcaaaaaagcaaacgcatcctccaattccatcgtagactggattaacaaacgtgaatcaacctgctttatatgtgacagcgtaaacaaaacctttaatgcgtacatgaagaccttcttcactatgtacgaaaaggaccctgagataaaagaaaagctaaaaaacacaaagggcttctgtcttgaccacctgaaggtggtgcttgagggcgctgatacatatttaaagggtgaaaagagaaaagaattttatgacatagtgcttccaatgatgcaggaaaacatgaagcgtatctatgatgatgtagcatggtttatagaaaaatacgattataaaaataaagatgctgactggaaaaattccaaagatgctatccagcgcagcatgcagaagcttcgtggaagcgatccatcgcttccgccacatgtgctcaaaaaataaaatcacccggtattctgccggccatttaatggctgtgcaaaataccgggtgattttttatttcattacgatgtttacaatacgtcccggaacataaatctcttttacgatatttcctgtaagcttatctgcaataacatcctttgcctttgcgataacctcatccttaggatcctgttttcctatttcaagagtgcccttagtctttccgttgatctgtacagcaatctctactgtatcctcaacagtctttgcctcatcgtataccggccatggctcaaatgcgattgtatcgtcatgtcccattctctgccatatttcctcaccaacgtgtggacatacacatgaaagcatcttgataagtccctctgcaaactctctaggacatctgcctgccttgtatacttcattgacaaaaatcatcatctggctgatagctgtattgtagccaagtgcctcgaagtcatttgtgaccttctttactgtctgatgatagattcttgtaagctttccgtcatcctcttcgataatattctcaggctctgtaaagaaattccatacacgtgtgatgaatctcttagctccctgtacattgttgtcgttccaaggctttgaaacctcaagtggtcccatgaacatctcgtagagacgcagtgtatcggcgccgtactcctcgactacatcactaggattgactacgaactcagggaatctcttgcccatcttgataccgtttgatccaaggatcattccctgatgtacgagcttcttaaaaggctcctttacaggagataagccctgatcaaagaggaatctgttccagattcttgaatacatgaggtgtcctaccgcatgctccggtccaccaacatagagatctacaggcatccagtgctttaagagctcctgatttgcaaattccttatcattgtgtggatctatatatctcatataataccatgaggatcctgccgagccaggcatggtggatgtctcacgagtgccctttacgccgtttctgtcatactgcttccactctgtagcgttctcaagaggtgccttgccattcttgcccttgtaatcctcaagctcaggaaggacaagtggaagctcatcatcaggaaggaaatagattgaaccatcctccttgtatacacatggaacaggctctccccagtatctctgacgtgcaaaaatccactcacggaacttgtagtttacagttctctttgccacgcccatcttctcaagcttggctgtgatagcttccttagcatcctcgactaccattccggtaaactcctctgagttgatgagcttgcagccctttccaaggtaatcatgcttctcaaatgcatgctctgatacatctgcaccatcaattacctgaatcatctcaatatcatgagcctgtgcatactcgaaatctcgctgatcatgggtaggaactgccataacagcacctgtaccatagcttgccaatacgaaatcaccgatgaacatgcgcacttccctgccgtttacagggttgatacaatgaagtcccttaagctcacagcctgactttgtcttgttaagctcagttctgtccatatcgctcttctttacagtctcatctatgtaagcctgaacctcttctttgttctcgactctgtccatgagaccctttactatatctccgtccggagcaagcaccataaatgtgataccatatattgtctcgatacatgtagtaaaaatagagaactctccaccacctacaatctggaatttgacctcgacacctgtgctcttgccaatccagtttctctgcatttccttggtagactcaggccagtctatctcatcaagcccctcaaggagcttttctgcaaatgccggctggtcaataacccactgtttcatgttcttgcggactacaggatagccgccacgctctgacttgccatctataacctcatcgtttgagagaactgttccaagctcctcacaccagtttacaggcatatcaatatgctttgcatatccggcctcataaagcttcttgaaaatccactgtgtccacttgtaaaactcagggtcacttgtagaaatcatctttgaccagtcataatcaaaaccaagctctcttaactgctttgagaaggtctctatattcttctgagtgaaaccgtttggatgatgacctgtgtttacagcatactgctctgccggtaaaccgaatgaatcatatcccatcggatgaagtacattgtagccctgcattctcttcatacgcgacatgatatctgtagctgtatagccctccggatgtccagcgtgaaggcctactcctgaagggtaagggaacatatcaagtgcatagtatttaggctttgaaaaatcccaaacatctgtcttgaatgtctcgtgttctttccagtattcctgccattttttctctatggccttgtgattgtatggttctgacatacttgcctccttatatcaaaaacgctccgcctctcaaagagacgaaggcgtatttttaatccgtctgattaacattcataattttacacatcacactatattttgtcaagttttgctatgtaaaaaacccggtgcatcactgccccgggtcttattatcatatatatctgacagattagttgttgatgagcttgtcgctctcatcattccagctgtaaagcttacggatttcctcgccaaccttctctgaaggatgctcagaagcaagctttctcatagccttgaagtgtacctgacgtcctgctggtgacatatcaagtaagaactccttagcaaatgtaccatcctggatgtctgaaagaatctgcttcatagccttctttgtctcagctgtaacaatcttaggtcctgttacataatcaccatactcagctgtgttagagatagagtatctcattcctgcgaagcctgactggtagataaggtctacgatgagcttcatctcatggatacactcgaagtatgcgtttcttggatcataaccagcctcgcaaagtgtttcgaaaccagcctgcataagtgcacaaacaccaccacaaagaactgcctgctcaccaaagaggtctgtctctgtctctgtacggaatgttgtctcaagaagtccggctcttgctccgccgattccaagaccatatgcaagtgcaagatcccaagcctttcctgtagcatcctgctctacagcgataagacaaggtgttccttttcctgcctggtactctgaacgtactgtatgtcccggagccttaggtgcgatcatagctacatctacatcctttggtggcttaatgcatccaaagtggatgttgaagccgtgagcgaacataagcatgttgcccggctcaaggtttggctcgatgtccttcttgtacatatctgcctgtaactcatcatttataagaatcatgatgatatcagcctgctttgcagcctctgcagcaacatataccttgaatccctgctcttctgctttcttccatgacttgctgccctcataaagaccgatgatgacattgcatcctgaatcctttaagttaagtgcatgtgcatgtccctggctgccgtaaccgataatggcaattgtcttgccctctaataatgaaaggttacaatcatcctgataaaataatcttggttctgccattttgttttcctcctgttaatttaagtaaactatttatatgtaaggattgtcctgtgactaatccaacataactacatcatcggaacctctggtaagtcctgtgattcctgttcttgcaagctctaatatctcatagccgctaagtaagtctatgaaattatcaagcttgtcctgtgtacctatgagctcaataatcatagagtcatgagtgacatcaactatcttgccgtggaagatctcagtcacattcataactgcctgtctttgtgtatcgagtgctcttatctttatcataataagctccctgcacactgagagtcccggctcaagcttcttgatatcaagtacatcctcaagcttcgccaactgcttctctatctgctcaagcacctgctcatcaccgcttgcaacaattgtgatacgtgtgtagcgcggatctgctgtaacccctgaggagaaactatcaatattaaatcccctgcgactgaacagtcctgaaatacgactggtcactccgggattgttctcaactaaaagagataatgcctgtcttctcatcgaaaaaccttcctaacaatttttattatttctgttcacatgatgataatattactataatctgtatttgtcaagcaatatcgttaatataactttaattcatattatcaataacaatatttatacatccataacttcgataaatgcctgttttatagtgttttgcaatgtatatgccaaagcctgactctccggtttacagtatcttcaaaaaaagccgggcgacatacaccgcccggctttagaattatctaatataattctgttgtaatatattataactgtggtcctgctgcaacaagtgccttaccagcctcatttgttgtgtacttaacaaagttcttgttgaatctctctgcaagatccttagcctttgcctcccactcagaagcatcagcatatgtgtcacgaggatcaaggattcctgaatcaactcccggaagctctgtaggaacctcgaaatcgaacatagggatcttctttgttggagcattaaggatatcaccagaaagaatagcgtcgatgattcctcttgtatccttgattgtgattctctttcctgttccgttccatcctgtgtttacaaggtatgccttagcgcctgacttctccatcttcttaacgagctctgcagcgtattttgtaggatgaagctcaaggaatgcctgtccgaagcaagctgagaatgtaggtgttggctcagtaattccacgctctgttcctgcaagctttgcagtaaatcctgaaaggaagtagtactgtgtctgctcaggtgtaagaatagatactggtggaagtactccgaatgcatctgctgaaaggaagattacgttctttgcagctggtgctgaagatactggcttaacaatatttgtgatgtggttgattgggtaagatacacgtgtattctctgttacactcttgtcctcgaaatcaatctttccatcatcagcaactgtaacgttctcaagaagagcatctcttctgattgcgttgtagatatcaggctcagactctttgtcaagaccgataaccttagcgtagcatccaccctcgaagttgaatacgccgttgtcatcccagccgtgctcgtcatctccgataagaagacgcttaggatctgtagaaagtgttgtcttacctgttcctgaaagaccgaagaagattgctgtgttctctccgttcatgtcagcgtttgctgagcagtgcattgaagcgatgcccttaagtgggaggaagtagttcatcatagagaacatacccttcttcatctctccgccgtaccatgtattgatgataacctgctcttttgatgtgatattgaatgcaacacatgtctctgagttaagacccaactccttgtagttctcaaccttagcctttgaagcattgtatactacgaaatcaggctcgaagctctcaagctcctctgctgatggctggataaacatgtttgttacaaaatgagcctgccaagcaacctcaacgatgaaacgaactgccatacgtgtatccttgtttgctccacagaatgcatctactacgaaaagcttcttgttgcagagctctttcttagcaagctccttaactgttgcccaaacatcctctttcattggatggttgtcgtttggatactcaggtgtattccaccatactgtgtccttggaattctcgtccataacgatatatttatctttaggagaacgtccagtgtagatacctgtcttaacgttaactgcaccaagctctgtctccttaccaacctcgtaaccctcaaggccggcttttgtctcttcctcgaataatgtctcgtaagaaggattgtgaacgatctctgttgttccggtaatgccatactttgttaaatcaacatttgccatttgaataaacctcttttctataaattatggatttacatccatttcttttgttagtatatatgtttgttaaaaaaaaatcaatatctacttttcaatttacacttatttcacactttttcgacatgtataatatattctcacacatcagccgttcgcatatctggtaaggaactgcctggtacgctcctccctaggatggtcaatcacctcatgcgggtctccctgctcaacaatcacaccaccgtccatgaagatcacctggtctgcaacatcacgagcaaaagccatctcatgtgtgacaataatcattgtggtattctgctgcgcaagtgaacggatgaccttaagcacctctccggtaagctccgggtcaagagccgatgtaggctcatcaaagcagagtatatcaggcttaagtgccagtgcccttgctatagcaacacgctgctgctgtccacctgagagctgatgcggataatggttcatcctctcagcaagccccattctgtcaagaagctcctttccatgctcatcaatacgcgcaaggattgcttttttatcctttttaaactcaggtgtctcttgtgccagaaggcgctctgccaaagtgacattctcaagtgctgtgtactgtggaaaaagattaaactgctgaaacaccataccaaaatgcagcctctttttgcgaagctctgcgtccttatccttgccctctttagaagcatcaaagagagtctcaccatttacaataatctgaccactgtcaggtctctcaaggaaattgagacaccgtaacagcgtagtctttcctgagcccgatgagccgattatggcaagagcattgccctcctccatggaaaaactgacatccttaagtacattagtccttccaaagtgtttttctatatttctaacctctaaaattgccatgtcttcctcctacctgaaataatccagctttttctcgatataattaaataaaagtgtaaggattccgacaaatacgagataaaatacacctgtataaaacagcggccatgtaagtccgtcagatttcataaacgccgctcccgcaaaggtaagctcgtatgccgcaataattctggcaagagaagtatcctttacaagagtgattatctcatttgacataggcggaacaacacgcttgatcatctgaagcagagtgattttaaagaaaatctgctgctttgtcatgcctaacacctgtcctgcctctctctgaccggccggaacaccctctatgccacctctgaatataacagagaaataacatgcatagttgatgacaaacgctacaaccgtcgctgtaatacgtccggtctcatcaccactccatatagcctgatgaagccacaagcccggtccgtagaatataatgataagctgaagcataagcggtgtgccgcggataacccatacaaacacattcataacagccttgacaggcttaaacctgctcaaaagcccaaatgcaaatataagccccagtggcagtgaaaatataagtgtcagtataaatatttcaaaggtggtccacagaccactcattagtgcttgtgtaacattccagaacattttatttctcccgctcaacaactacctgtgcattgttacagtatgcatttgtgcattccatagactttgtaacctcatctgtgagtgtcatgccattccatacaacgtcaatcttctttgaatcaagctccataaccttgttgtcccagtcgataactacaaattcaacatccacgccgagcttctcaccgacaagtctagccatatctgcatcaaagccaatccatttgtcatccttatccttgtaatccataggctcaaactctgtgataccgacaatcatcttgccctgtgacttgatataatccacatcactgtcgctgtcagactgcttgaactcgcaaggctcctgctcaagaagtgaatcctgtactccgtatttctttgcaatctcctgcgcgctgccgtcagcatatgattctgcgaatacactgttgatatatgaagcaagatcagaacccttacggcatccgacaccatacttctctgatgtaagctctgttgtatgtactaaatcagggtagcttgtgccctctccaatcatggctcctgccattaaaaggtctatgattgccgcatcagatgtacctgatttaacctccataagcgcatcagcctgtgatgaaaccgaattgtaattaaagcccttttcctttgccacagcctctcctgctgagcctgcctcaactgcgtaggtcatgccgtcgcccttttcgcttttttgtgttcctgcacccttgctgccaccacaggcagtcattgaaagtgctaaagttgctgtcaaaagaagtgctaatcctcttctcatgctcatttcctccatatgttaaataatcattgtaattattcaaaatcatccaataactacaaccttttaacatattagcaaattatcacgctaaagtaaagaggaattatccaccaaatcaacagttatgttcttccattttatacaagccccagacttttaattatataaagccagagtgtcagcgtaaacgcactgagcagtgtcgtgagcattatcgtggtcgatgagataacgccctcatgccccatatttcttgccatgacaaagcagcttactgtagtagctgagccaagcatcacaagaattgcaataagctcactgtccctgaacccgaaggctaccgcaataggaagaaatactgccacaaagcctacaagcttgataaatgtggctgcaaatgcaggcttcgcctttgctgatgcttttttcaaatcaaaggtggcacccatggccataagtcccataggcgttgccatattgccaatgcttgtcactgcctttgccggtattcccgcaaacggcagaccaatagctgaccacagaagtcctgcaacaattcctaaaataataggattggtcactattcccttaaatgtctttttgagcactgccctgtctatgccgttttgccccggcttaaaaaatgaaagcactataacagccatcacgttgtaaagcggtacgcttcctataatcatgacaggtgccatgcctgcgtttccataaatattctggataaaggcaattccaagcagtgccgcactgcttctgtatgaggcctgtataaactcgccccgtatggatttatccctccacagacatgatatgagcgttgagattgtgatgcttatcaacgtaaccacaaagcagaatactataaatttaatgttccaaacccttgaaaaatcaactgacgcaagatcactaaacagtaaaaaaggtaaaggtatcttaaacacaaacttattcatcctgtttgcaaagtcttcgtccaaaatccccaccttgcgaagaaaaagtccaaacaccatcatcagaaaaataggtcctgtggcatttagacaaaacattaaattttccatctcaaattaagcctccgtcatatcagtaatctatagtttataattatactattttgtatattccagctaccacaataagctttgaactgagatatgtcaaccttttattgcactgtagattattttaaaaaattatggtacacttatcacatattttatttaggaaggaattaaacggtttgaaaattcttattttatcctgtgacaccggcgagggacacaacagtgccggtaaagctataaaagaagcggcagagcataaaggacattctgtgacaatgatagatatgtttctcttatcgggtaaaggaacatcgcacgcagtatcaggagcatatataggcattgtaaagcatattccgtttttcttcggactactctataaggttggcatgctgatatcgagtgataaacgtaaatcccctgtctattttgccaatgccctgctttgtaaaaagctatcagcatacattgaatcaaacggctttgatgctgtcgtcacacctcatctgtaccctgctgagaccctgagctgcatgaagcgaaaaaatctgcttcatatccctgccgtcgctgtgggaaccgactacacatgtatcccattctgggaagagacaaatatggattattatgttattccacacgatgatctgaccgatgaatttgcaaaacgtggtattcctgaaaacaagctgctgccattaggcatcccggtacgacaggccttctgtacaaggactgctaaagcggctgcaagaacaagattacatctgccatccgatgtgcctatctttcttgtgatgagtggcagcatgggttttggcaagcttgctgtctttgccgcagagcttgcaataagatgccataataatgagcatattgtaatcatttgcggcaacaatactaaaataaaacgcatactgcaaaatgagtttaagttcaacaaacgtgtacacgtaataggctacaccaatcaggtttcacttttcatggatgcctgtgatgtaatctatacaaagcccggcggcctcacatcaactgaggcactggtaaaaaatataccgattgtacacactgctccaatccccggatgcgaggcagcaaatgttgcatttttcaaaaaacgtcatctgtctgtctcatcaaatcgtctgtcaaagcagattgagcttgggaaaataatgatagaaaataaagagctaaatgcagaaatgatacgtgcacagcgccgtgagcgaaagccctatgctgccatacagattgttggtctgcttgaagaactgactcacactgatacaactgactgactataaaaccatgtaactataaaactataaggaaattatcatgctatattttttatttacactcttaggcttcgtactcggaagcactctctttgcttactggataccaaaactattaaaaaacattgatatctgcacacttcccgatgaccacaatccgggtgtgagcaacgcatttatgtatggtggctttttatgcggaatactctcactcatatgtgagcttgcaaaaggatttatcccggtgtatcttggtcagaaatgcttagatataaactcacttctgtttgtacctgttttagttgcacctgtctttggacatgcatttccttttctacaaaaagaaaaaggcggcaaagctattaccgcctccttcggagtccttttgggcctgtttccggaattgcatccggctgtctatttggcatttttctttatatttttttcagttgtaataataataaatccacattcgctcagatctattctgacatttggtttttttgcattcaatgtccttttgactataaaaacagcctcaatccagattggctgcttcataatcgcagggattgtgatatacagacacctgataaagcacaataacggaccggtaaggataagtatactgcatcagcggtaattatggtatctgcttttactcattgattttgcttcttacataactgtttattttcatacatataagaatcagcactatcaaataatatttgtaatgtactctccttataatcctccgatatcgcccatccgcaagcgtaatcaatttgcagttcatttccggtgttgtttaatttatctttttccagacataagcatttcaggatttcatcaacctccgctttatctgtgtcataaatgactaccataaattcatcgccgccatatcttcccacaaaatctttttcaggaaatactctgcgcaaaagtccggcaaactttactatcagccggtctcctgccgaatgccccattgtatcattaataaacttcaaattatttaagtcaaaaataatgcatgccgtaggtgaactgattatctcattattgttcagaatttctttacaggcacttctattaggcaatcctgtacgtgcatcagtatatgctctttgctctaacagtttattttaccttgccatcttcattgccattatggtctgtacaataatcaatatcacaagacacagcatatcaagtgctgacaaaagctctatcgtgcggatctttgtagcaatcttttctgaataattttccgctgcagacacagtatcatcagcaagcttaaaataagtctcactcatattgacaatatctgtattttcatatccgctgcttcttacagcttcaatttctttttttattttattccagtaatcaatctggacctgcaatttatcctgatattccttgtcctgaagctttatcagatcataatttccatcctgatattttaatccgcttaaaatatcatccaaatatttaatcaactcatcattttgggatcctgtaatctccaattttacttcacgctgtgttgctccacgtaccagacctgcgtaatttattacccttgccgttccttgcagccggttaatctgtatcatcataaaaataacaagaataaccaatgcaaagatgagacagctttgtataatacctattatatttctgctttttttattctttaacttcattttccgatttatccttatgaggtttttttatcaaaaattatatagtgt

SEQ ID NO: 1445 - DNA, 42131 bp, Unknown
  gut microbiota DNA sequence
gagctgactgttactaataggtcgagggcttaatctggttaataacggagaaaaacaaatcggatttgtatgaagttttgaaggtacattgaaaataagacgtaattcctattgcgtcctttttctatatttgatataataattaaatataggggattggtcaaatggtatgacagaagtctccaaaacttttagcgggagttcgattctctcatcccctgttattaaaccttgaagcgatatagttgtttcaaggttttttatgtttaataataaaaagatatgtattacaatgggaataaagtgtttattggtaattataatgaaataaatttgtatttcaaaatggattacaaatgtaaggaggatttttaatgaaggaaaagcttaagattaatgttacaaagccacaatatgtgcagatatctgatattacatatgcgcaggtggattcgtggtatgatcactgtcgcagagatttaaaactcgatttaatatatccggaggataagtttgacaagcgttatccctgtattgtatggatatgcggtggtgcatggatgaggatggataagtcagcacatctatcgtatcttagcatgcttgcacatcaaggctttgttgtttgcagtgtggaatatcgcacatcaaatgagggtagttatcctatacagatagaggatgtaaaggctgcaatcaggtatttgaaggcacatgcagatagatacagaattgacaaggagcattttggtgcgatgggagaatcagcaggaggatttttgacgtgtatggcagcattggatcatgataaggctcatgatgttggagactatcttgaggagtcaagcagcattcaggcagcctgcccgtggtatccaccgactaaccttagcacatttaagtataaagatgccgaggagagtgcagcatctatggagtcgcttttactcggatataatattatgagaaatataaaggatgcatacaatagttctcctgtttccaaggtgacaaaagatgctcctccatttttgattattcacggtataaatgatcagacagttccatttgagcagagcgaggagctttatgataagcttattgaaaatggctgtgacgcggatttgattgcattggaagatgctgaccatgctgatctgcagtttttccaggatgagctgtgggataaaataatcgagtttttcaagactaaattagggtaaattatgtcaaattgcagcttttaaaaatgttatttcaagtgggaataaagtatgttgataaaggctgttacatattttagcaactgaataattatggacaatcataaaaccatagtatcttaatgtttttaagatatctatggtttttatttttgaaatcaatggaaatattaagtattgccgaaagtattttgatatttttggcagcttaaattagaaacaaattcctgttatggcttatcctaatattgtctccagaaaataccacttgattttctcgaacatatgttatataatacaaacgaatgttcgagagatggcgggaggcattatgttaacgttaatcagtgctgatattatggaaaaacttaagattttgtcggatgcggcgaagtttgatgttgcatgtacttccagtggtacatcccgtttgggcaatggaaaggatatggggagcacatttgccagtggaatatgtcattcgtttacagctgatggcaggtgtatatcacttctcaagatactttttacaaatgaatgtatttatgattgcaggtactgtatcaacagatgcactaatgatgttgaaagagtcacatttacacctgaggaggtatgtaagctcaccattgagttttacagacgcaattatatagagggacttttcttaagctccggtatcatagaatcgcctgagcataccatgcggcttttgtatactacactttttcttcttagaaataaatatcatttcaatgggtatatacacatcaagggtataccgggagcttcctctgagattcttgagatgataggatatctttgtgacaggatgagcgttaatcttgagctgcccaccgcggaagggcttagggcagttgctccgaataaggtgcgtaaaaacattcttacacctatgagatttattcaaaatggtataaaggacagccgaatgtatcatggcaatagaagtatgaaaaaccgtatgtatatagatgagcaggcatattatgagcagatggccgaaataaaagatagtactgccagattgtcagagtatcacagaagtcttagtgttgcttcagattgtgagaaggcagataggcttgctgagaaaagctggggattgggagcgctgctaaaccctggagttgtctgtgagacaacagacgcttcttatggaaatagcgcttatattaataaaacgggcttaagcatcaaaagaccggacagatattacgtgccggctgggcagagtacccagatgatagtgggagcaaccggagagagtgattatcagattatatctgtagcagaagcaatgtacaacaggtttgatatgaagagagtattttactcggcttttgtgaatgtcaatatggatgagtcattgccgggtatcgggcaaccaccacagctaatgagggagcacaggctttatcaggcagatttccttatgagattttatggctttaaggctggcgaacttttgtcagaggataatcagagctttaatgcttatattgatccaaagtgtcagtgggctgtagaacatctggagtgttttccggttgagattatgactgcagattattatacacttctcagggtcccgggaataggcactaacagtgtcaggcgtattataaaagccagaaagcatgcaaagctttcgtttacagatttaaagaaaatgggtgtcgtgctcaaaagagcactgtactttattacctgtgatggtcgtatgatgtacaatacaaagcttgacgaaagctatattacaaggcaccttatatataatgaaagaccggataccatgcttttagctgacaatagatcatgtacatatgagcagatgagtatatttgattttatatccgaataattactgatatttttgtaaactttagaggagaagtatgcgtggataatataatattgagatgtgacaataatataaatgggatttttactgcgatatatgatgcttttgtatataaaaatcaaatgcaaaaagaaaatcacgaaatataccgggacaatatttcaattgagacaggcactggcgggaactatacacttttttcaaggacaatagatatcgttacagatgagccaaaggtacaaaaaacaatattagctattcaaaagaagcttggttttaagatatatgagacagtatttgatgctttatgccattattctgataatagagcaacaatagtgcttggatttcttgtcagggcatttaaggttggacaaaggattatggagcatatgaccgataaatatgttatggaggtatttgagctttcaagaaaggtaaataaagaagctgacaagataagaggttttattcgtttcagtgataatggaaactatctgctggctcagtttgagccgaaatgcgatatgatacctattgttatgtggcattttgttgacaggtatcccggggagaattttgtaatctatgatgagagaagaaggtatgcagtggttcacccgaggcttaaggagtgcttttatatcaatgaaagtgattttaaacagcttgagaaaagtgtgccggggaagacagatgattttgaacaattatggaaggtatattttgagtacactgatataaaggaacgattcaatccacgatgtcagcgcaatctttgtccaaagtggtataggaaaaatatggtggaatttacctgatttttgaaagcctgtaactgttgctggtcgtagtatggtttgaacagtaatatagtgacagaaataccaataaatgatacaatttataaatatatacttaatcattaatgaggggcaaaatacctttgaaccctcatatcatattatatcaggttatatcagggtgatgctatgcagatatctaatttggtaagtcaatataacaattcagtggcaaatggtgagcctatgacaggagcaaagggtgttgagaagctggtatcttctttaaatgaaatgtcaaaagggatgatatttgagggaacagtaagcagtgtccgcggaaatcaggtgaagcttgccttgtcaaatggtcagcagattttagcaaggttagcagggaagttttcatttgaacaggggcagtctgtgttttttcaggtgaaaaataatgatggaggcactatagaaataaaaccatatactgttgatggagagggagtcaacctcacacttatggacgcactaaaggccgcaggactgccggtagatggcaccaatttgtcgatggtgaataagatgatggaggagcagatgccgattgataagataagccttaatcagatgtatcagcttgtgcaggataataaggggattaatgtgactacactggttgagttaaagaggcttggaattgaaattaatcaggtaaacgcagctcagtttgaaaattatgctaatgacaaacaggctattacaattgccatggatagtttgatagaggaactgccgaaggctctttcagccgaagatttatcaatgtataagcttgtaagtcaggcaagggatattttaaatattgttacagatgggttgccggaagatgcatttatttcaaatgaagacgcagatatgtctcagtatgaagccataatgcgtgataatcaatctgcacctgtagtaaaaaagcactttaatattgctgaattattcgaatcactaaacagtgtttccggtgaatcacaggatattcagacaacacaaaaaataaataattcctcagtaatagataatatatttttacaggggaatgaagcaaaatcaaatactattggatttattttatcagataagcagatagaggagtttaatgaacaggtcaggaagctgcttcctgatttacaggaaaataatatttctttgtattcagaggatagcagtgttgttggaatacttaatgatataaatagtatgttggaaaacacaccggcaaatgccgatgcactgagacatttgttttcaggagaagcctttaagcttatgttaaaggagacattagaacagcaatggatgataaaaccgggagatttagaaaagaatcctaagaagattgatggcttgtacgataaaattgaaaaacagataattaatatggaaaatattttaaaaacatctggagtggtgaatcctaaagcagaggcgttggcagataatatccgtggaaatatagaatttatgaatcagataaatgaagcatatacatacatgcaggttccattgaggatgaacgaaggaaatgccagcggacagttgtatgtttacacaaataagaaaagtatatcggaccctgacaaagaattatcagcatttttacatttggatttagagtatcttggtgggacagatgtgtcaattaaaatgcttcataggaaggtgacaactaatttctatttggatagtgatgagtcatatgcaatggtaaagcaatttctgccagtgttggaaaaaagattgcaggataagggctataattgtgaattgactgtaaatagtgattcgaaacagatgaattttgtcgctggatttcttaaaaaagatttgccacctacaggtcaggtacatagatattcctttgacatgagagcatagcggtgtataagataatttatgaatagttacataattaaagcttactttagaaagacaggtgagttgtatgcatggcgaaaagaataatcgcaacaataatggaatagacacaggcaaaacagccatagctatagaatatgtgccgggagaagcagcacccaaaatactagctacaggcaagggcattgtagctgacaggattattgagagggcaaaggaaagcaatgtgcctacatataaggatgataagcttgctgatactctgtctaagcttaaaataggtgatatgattccaccggagttgtatgaggttgttgcggagatacttgtttttgttaatgatctggataagcttaaggcaaaaattgatcaacggtaatgtgaaggtttacagtatttgaggcagttatgaataaaagaagtgttggaagtatatacgagcagcttgcagctgagcagttaataaatatgggatacagggtacttattcgcaattacagaaatcgctatggagagatagatataatagccagggatggggatacaatatgtttttgcgaggtgaaatatcgtagggataatggttgtggaagcgctcttgaagcagtggggtatagcaaacagaaaagaatcatatcagttgctcgctattatcttatgacacatggtctgagtgaatggacaccatgcagattcgatgtgatagcagtggatgatgacgaggttacggtgttgaagaatgcatttgagggcagtcaataactattatctcggcagtgatggacaggtattactggaccgttaatttataaacgtttggacagactatttcataaaaacagataaggagcaggcaattataagaagtaacataactacaaatagtaattataagcagcaatagttatcggaaatatataattgcatagatataaatatgaagacagagattgataagaatataaagattgataagaatatacaggctgaaaacatacacaaaggtgttgatgaaattactataaatgattttgtggcaaagaatgataaagatgttctggaattaaaaaagcacgttctttcaagcggaagtgttgttcctttgttacattttaagaagctaaatgagctttctatgatagagcattgctttacaacacgtcttggcggcctcagtacaggaatgtttgatagcttaaatctaagctttacacgtggagatgacaagaaaagtgtcttagaaaactataaaagagtggcggaggcaatcggagcggaggcagggcagattgttacgacagaccagacacatactaccaatgttttgagagttggaaaaaagcagtgtggcatcggggtgacaagaaagagaccatatacagatgtggacggacttatcacgaatgaaccaaatgttgtgcttgccacattttatgcggattgtgtacctctttattttgttgatccggtacatagggcaatagggcttagccattcgggctggagaggtactgtaaatcgtatgggaaaacagacgcttattgctatgaatagggagtttggtactgaggcacatgatgttatagctgcgataggaccttcaatatgtcaggactgctatgagataagtcaggatgttgcagagcattttgtggatgagtttgcgacaacggacgatcctcatgcgagtgatattctgcgctataagggagctggcaaatatcagctagacctttgggaatgtaacaggagagtacttgtggaagcaggagtgcaggaagccaatattgccataaccaatatatgtacctgttgtaatcccactcttttattttcgcatagagcaagtcatggaaagaggggaaatcttggagcttttatgtttcttaagtaattttcgcacaatctattaaggaaataataagaaacgcctaaagctatatatgttaaaataggtgtaacacgttggatagtacactgtgcgggaactgatgcggtcagacagtttgatacttttttgagttaatattaaaagctacagcggtactgccatatatgaaccagggagaacgatatgcagttaaattatcgagattcaaagcctatttatgaacaaattaaggaaggcatcagacgaatgattgttatgaatgttttcaaacaggacgaaaagcttccgtctgtccgggtgcttgcctgcaagtatgcaatcaatcctaacactattgcaaaggcctacagagagcttgaggaggaaggatttatttacactcaaagtggtaaaggaacctttgttgcagatgctaacaatgcaaggcggagcagggcaaaacatttgaagctgctttttgaccaggtggtgacagagttatttgtgcttgatacaccggtagaggaattgatgaccaggatggatggtgcgaaggcgcatttagatattgaagatgatgcatccggatttgtaatacaacagatacgggcagaagctgcggtgacagagggtaatgatgatacagataaataatttagtgaaaaaatttgatgattttacagcactcaacggcgtgaatatgaacgtggaaaagggtgctgtctatgggcttgttggtccaaacggagccggaaagtctacacttatcaggcatattacaggcgtaatgagacaggatgcaggggaagtgtttattgatggtgagccggtatatgaaaatgcaaggattaaagggcagatggcttatataccggatgatatgttttattttttgcagtctgatacgattaatatgatgcattactataagggaatgtatccgggctttgatgagaagcagttttacaggatgcaggagttttttccatctatagatgttaaaaggaatatcagaaagctctctaagggcatgcagaagcaggttgccttctggcttgcgctgtgctgtaaaccaaagcttattgtactcgatgagcctgttgatgggcttgatcctgtcatgagaagacagatatggtctatcatgcttgatgatgtggctgcaaataatactacagtggttgtatcgtctcataacctgcgcgagctggaggatgtgtgtgatcatgtaggtattctcaataagggaaaaattatgatagagcgctctcttacagagctgcagggtaatatttcaaagattcagattgcatgtccatatggcatgcctaagataccgcaggattttaaagttcttcatatgtcaaatataggaagagtatacacagttattgtgcgtggagagcctgaggctgttgtaaaggctattacagatggcaaggacagtccgcaggtagtggatgtactgcctcttactctggaggaaatatttatctatgagatgggaggagaggactatgaagtcaaagacatcatttattaataaaacaatgctgcaaaagaatgtaaagctttactggccaatctggacactgtatacaatagtgctattatttaacggccctttttctatgtggagcagatttaagagtgcatattttatttatggcacgaactggcataagtatatgcttgatataatgtccccggctatcagcatggaggcagatatgatttttatttttgttatggcattggttacaggcatggcaatgttcagttacctgtacaattcgagagcatgtaatatgattcacgctatgcctgtgacaagacgtcagcttttttcgactaatgtgttgacaggcctgctgtttatgtggattccgcagatagttaagtacattatgtcgtttgttatatgtatatcatatggcaatacgaaggtggtacatattggaatcaatctgcttgctacaatgggaatatctttttttatgtacagcctggtgtgtctgtgcgcaatgattacaggacagcttgtttctgtagcagtaatgtatgcgcttgtcaatctgctgtatggaggagcagttattgctattgccaatgtgctcacatatgtatcgtacgggctttcatatatggaatttgtaaggaaaataagtgctacgtggtttgcacccatgctacagcttctcaatcgggtaggctttcatccgaccatgaagaatgcaggggatgattattactgcattaaatataccttcagaggcacaaatactatcgtagtctatgtcatcgcggctgcagttatatactttatttcttataagatttataagcatagagatttggaaaatgcaggaagttttatagctattccaaagcttaagccggttttcagatgggggcttggcagtttgggaggattgattttatctattgttgcagcgtcgcttttgcttggacttagaatcagcattggtgttcctgcaattatgatgctggcagtggtgcttggaatcatagccttcttacttttagagatgattataaggaagaattttaaaattttttctaaagcactatttaaggaaatcattgcttttggtgcttttgttgtagttgtatttggaggcataacagtttacggaaatgtgcaggaaaattatataccgaagcttgcggatattgattctgcctgtatagccatagattttgatatcaatctggagggaaaggatgttgaaaagattttagagactcaaaagatacttatggcgcagaaaaaggattattttaaaaagagatatgatgattccgggtatattacaatctcatatacattaaaaaatggagaaaaggtcaaccgtgtatatcatacaacggatgattttaatccacataagcagtgtaaggcgattatggcggaggaaaataaaccacagaatattattaatgccataatgcagtgtgatacgacagatattacctttatcgatggctcggcagagcagtatgatgataaatatgttgatgtgctgaaggagagctttaacggaaaagttgcagcggatatttttgaggctgtgaagaaggatgttgaggccggtgtgatgcaggaatataatttgcagagaatgcttgacggagtggataaggataacagctatatgtacaatcttatgctgaattttacagtgccaaagggcaacaggattggaaaaagctggaatgtctatggcttcacatggtatgaggagctgttggatatactgggggtaacaaaggagtattctgattttggggatgcccgttccgatggtattgaaacgtattcggtcaacattagttttggcgaaaactgtactaatctgatagctgttcttaaagaaaatggattaatttcatcaaaagaaccacttttgacatatgaatagttgtctctgtaaatggtattgtgatataattactctgttatagatgttttgtttattattttatgattaaatggttaaaagatatcattttataattattctaaatagttacaattattctataggctaatatgaatttagaacaggagagtatatgagcagaccagtagtggccatcgttggccgtccaaatgttggaaaatctactctcttcaatgcgcttgcaggagagaggatatctatagtaaaggacactccgggtgtcacaagagacagaatctatgcagatgtatcatggcttgattacaattttaccatgatcgatacaggtggtattgagccggaatcaggagatgtgatactgtcgcagatgagagagcaggcacagattgccatcgacacagcagatgttattatttttattacagatgtgaagcagggacttgttgattccgattcaaaggtagcggatatgcttcgtcgttcacacaagccggttgtattagttgtcaataaggtggacagctttgaaaagtatatgactgatgtgtatgagttttataacttaggaatcggtgatccacatcctatatctgcagcttcgatgctgggactcggagatatgctcgatgaggttgtgaagcattttccggattcatctaaacaggacgatgaggatgacagaccgagagttgctatagtaggtaagcctaatgtaggtaagtcatcgcttatcaacaagcttgcccgtgaggacagggtaatagtgtcagatatagcaggcaccacaagagatgctatcgatacagccataaaatatgatggtaaggagtatatatttatcgatacagccggccttaggcgcaagaacaagataaaagaggatatagagcgatacagtattatacgtgcagtttctgcagtggaaagagctgatgttgtcatagtagtgatagatgctactgagggtgttacagagcaggatgctaaaattgcgggcattgcccacgaaagaggcaagggaattatcattgctgtcaataaatgggatgccattgaaaaggataataatactgtaaagcagcacacagagaaaatcagacagatattaagctttattccatatgcagagatactgtttatttcggcaaagtcaggtcagagactcaacaagatatttgagctcatcgatgttgttatagaaaataactcaatgcgtgttgcaacaggagtgttaaatgagatagttacggaggcagttgctatgcagcagccacctacagacaagggcaagagactaaagatatactatgtgacacaggtttctgttaagccgcctacctttgtaatctttgtaaatgacaagaatcttatgcatttctcatataccagatacctcgagaacagaatcagggatacatttggtttcaggggaactgcacttaagtttattacgagagaacgaaaggaaaatgagtaagatgatactggctaggattttagcattggtcgtagggtatttctttggaacctttcagaccggatatttttatggtaaggcacatggaatagatgtaagagagcatggaagcggcaattcaggcaccaccaatacgcttcgtacacttggatggaaggccggtgcagttaccttctttggtgatttgttcaaggcaatcatagcagttttgatattttatttcatatatagaaatacatacccacaagctgttaaatgcatagagctttatgcaggctttggagcggtgcttggacacaattttccgttcttccttagttttaagggaggaaagggaatagcatgtacatcaggtgtaatacttgctgtatgtccgatagcggctccgatatgcctggtattgtttattcttgctgtagccataacaagatatgtctcacttggttctatactggttgttatatcgtttctgattcaggcaattgtgtttaaccatatggggctgcttggagtaagtggcaattatgcggtcgagtttgatatacttgctgcttgttttacggcgatggctatctggcgacacagagccaatatcaagagacttttaagcggaactgaaaataaatttggtcagaaggcaaagtaaataatatttttggattacaataaatgaggggcaaaaaaccttttgaccctcatatcattatatagagtatgaggaataaaaaatgagtagagttggtattataggtgcgggaagctggggaacagcattatccctggtgcttgcaaataacggacattctgttgaaatatggtcaatcgtggagaaagagattgatatgcttaaagaaaagcatgagcatattgataagcttcctggagtaaagcttccagacagcattacctttacaacagatattgaggaaacaatcaaaaataacgatatacttgtgcttgcggtaccgtctgtttttaccagaagcacagcaaaagcgatggctccttttgtgaaggatgggcagataattgtctgtgtggcaaagggaattgaagaaaatactctgatgactatatccgatgtggtagagagtgagataccttgcgctgatgtggctgtgatgtgcggaccttcacatgcagaggaggtcggacagctgcttcctacgactgttgttgcaggagcaaggacacagaagaccgctgagatagtacaggatctttttatgaatgaggtatttcgtgtgtataccagtcctgatgtgcttggaatggagcttggaggctccctcaagaatgtcatagcacttgcagcaggcatggcagacggacttggctatggagataatacaaaggcagcgcttattaccagaggaattgcagaaatatctgtgcttgcgattgagatgggagcaaaggctgagacactttttggactgacaggtatcggagaccttattgttacatgtgagagtcgtcacagccgtaatagaaaggccggaatgcttataggccagggatacacaatggatgaagcaacaaaagaagtcaagatggttgtagagggcatctattcagcaaaggctgcacttgcccttgcagaaaaatatgatgtaaggatgccgattatcgaggaagtaaacagagtgctttttgaggataagccggcaaaggaggctgtctcagagcttatgcttcgtgacaggaagattgagcactcaagtctggagtggaaataattagttaacaggttgggtaataaatggctatagacggtcatatataaaattacatcaggggaaattataaaatgaaaataaatataaaaaaattgacaaccacagccaaaatccctacaaggggaagtgaatatgcagcaggctatgatttatatgccgacattactaaggagcttgtcattgagccacatgagacagcaaagataggcacggggctttcgatagagattcctgacggatattttggggcagtttttgccagaagtggtttagctgcaaagcaggcacttcgcccggcaaactgcgtgggtgtgtgtgacagtgattacaggggagagtatattgtagctcttcacaatgatggaacgcaggcacgcactattaatcccggagatcgtatagcgcagcttgtggtcatgccatatctggctgttgagtttaatgaggtgtcagagctttctgatacgaagcgtggtgccggtggattcggttctacaggagctaattaatcacaaatgagttacaattaaaactaatctttacttaaaaagggggacttatcatggaaaatcgtattgtgaaatttaaatcaaaggagagtgcaggtttaaacttacacgctataccgggacatttcgctacaagtcattcgcatattaattattatgtagatgtgacaagcatcaagacccgtgtgtccgaggcaaaggaagctgcaaaggctctttacaccaaggtaccgcatcattcatatatagatacaatcgtatgtatggatggaacagaaatgattggtgcattcttaagccaggagattgagagaaacggacttatgtctgtgaataagcacgagacaatttacgttgtatcgcctgagattaacaacggacagatgcttttcagggataacaataagggtgctatagatggcaagcatgttgtacttcttctggcaactaccacaacaggtgagacaatcagaagagcgatggagtgtatcaactattatggcggtatggtcacatgtattgcgtccatattctcaaccatcgatgaggttaatggagtaaagattgataagctgttcgatgacgatgatgtggtaaactaccagacatatcctgttacagagtgtccattctgcaagaaggggctgccgattgaggctatggtcaatggctttggatattctaagctgtaattagtacgtttattgcagtaattgccttgtaattgtttcgatatcagactgtgtttcgtcataatgacaacaacacgttaaattatttggcggattgactatagccaattgacgatatgttttgtattataaagatacaaagaaacaaggtaacagacagtcaaggaactgaacagttacatatatgtacataatacttaggaggtatttttaaaatggcaagtttatcattaaagaacatttgcaaagtttatccaaacggatttgaggcagttaaggatttcaaccttgaagtagaagataaagagttcatcatcttcgtaggaccttcaggatgtggaaaatcaacaacacttcgtatgatcgcaggtcttgaggagatttcttcaggagagcttatcatcgacggaaaggttatgaatgacgtagagccaaaggatcgtgatatcgcaatggtattccagaactacgctctttacccacatatgacagtatttgacaacatggcatttggacttaagcttagaaaagttccaaaggatgagattaaggcaaaagttgaggaggcagcaagaatccttgaccttgagaaattattagaccgtaagccaaaggctctttcaggtggacagagacagcgagttgccatgggtcgtgcaatcgttcgtaatcctaaggtattccttatggatgagcctttatcaaaccttgatgcaaagcttcgtgtacagatgagatctgagatttcttcattacataacagattaggtgcaacaatcatctacgttacacatgatcagacagaggctatgacacttggaacaagaatcgttgttcttaaagatggtgttatcatgcaggtagacagcccacagaagctttacaatcagccaaacaacctgttcgttgcaggattcatcggatcaccacagatgaactttgtagatgctcagtgtgttgttgagggagcaaaggcattccttaaattcgataaataccaggttgagcttccagaggcaaaggctaagaagcttatcgatggcggttatgcaggaaagaacgtagtattcggtatcagacctgaggatatctacgattcagcagagcatcttaataaatttgctacatgcaagattgattcagatgttacaggatatgagttacttggtgcagaggtattattatacttcacagttgcaggcgcaaatatgtcagcaagagttgattcagatacaccggctcgttacggtgatcacattgagcttgcatttgatccaaacaagattcatgtatttgataaagaaactgaattgacaattactaactagttcgttaaaattaaatagttgtaaattgacagaccgggtgtataatttacacccggttttctttcgcaaatgttagattctgacgcgaatgtatggttctgaatagttaagttatggtgttaaactacagcaggtgtacagagtttacctcatgggggctttttacttgcctgcgtcagaacagtaatgagaggataagaatatgattacgaatcagaaactgaaaaaatcacttgaggaaataaaaaatattacttcgtttgatgcgattttatactcagcaaagggaaagcatctgacaggtacggtggaagagccggaacatagtgacatttttgtgaaggagtttatagtatccgaagaggatgttaaggaaaaaaacgatgcaatcgcatttgcggttgaaattgattcagagcttgagtatgtgctcgtaatgttctgcccgtatacgagtgagaatcttgtaataggcaggatggcagtttgtcagcttcgtacacttgtgctcggtgagtcagagcgatatgacagaaataattttattcagaatattcttcttggcaatatgcttggttctgatataataaaccgtgccaagaaattacatatagagaacagaaaacgagtagtatatgttatagataccggaaagaacagcaatgagatagcagttgagcttgtaaagaatctggcagatatcagaagcggtgattttgtggtggcgatggatgagcataatatagtgctggtaaaggatgttgaggatatagattcaccaaagcttcaggaaaagctttcatctattgcaggaagtctggttgacaatctgcttgcagaggctatgattaaggtacgggtgggctatggcaatccgacggatgttcttccaaagattgcagagtcttatcaggaggcaaaaatggcgcttgaggtcggcaggctgttttacgtggaaaaggaaattatggcatatgacaggctgggcataggaagacttatttatcagcttccaatgagtctgtgtgagatgtttatccgtgaggtttttggtgatgaggtgccacagatacttgatgacgaggaggcaatgtctacaatctccaagttcttcgagaacaatctgaacatttcagagactgcaagacagctttatgtgcatagaaatacgcttgtgtacaggctagagcgtattgagaagtcgataggtcttgatatcagaacctttgatgatgctatgatattcaaaatagctacgatggtgttagcgcatatcaaggatagcaggcagggcagatagtataattattacgcaatttaaagaagtaggagacaagtatggccaagaagcaaacatacgatgagaagagcatagcaattttagaaggacttgaggcagtcagaaaaagaccgggtatgtatataggaagtgtcacaaccaagggactaaaccatctgatatatgagattgtggacaactccgtagatgagcatctggcaggcgcctgtgataccataagggtaactcttgagaaaaacggttcgtgtacggtggaggataacggacgtggaataccagtaggtatgcatgctaagggtgtatctgcggcgcgtgttgtattctcgacactgcacgcaggaggtaaattcgacaattctgtatataagaccagtggaggtctgcacggagttggttcatcggttgtaaatgcattatccacatatatggatgtggaaataagcagagatggctttatccaccatgacagatatgaaaagggtgttcctgttgtggagcttgaaaatggcctgcttcctactataggtaaaacaaaaaaaacaggaacaaagattaatttcctgccggattcggagatttttgagaagacaagattcaaggaagaggatgtaaagaacagactgaaggagactgcatatctcaatccgaagcttaccatcatatacgaggacaaacgaggcgatgagacagagcatattgagtatcatgagcctgagggtattatcggttttgtaaaggatttgaataaaaatatagaaaagctgcatgatgtcatttactttacaggagagagtgagaatataaaggttgaggtggctttccagtatacaagcgagttccatgagaatattctaggtttttgcaacaatatatacaattctgagggtggagcgcatatcacaggctttaagactgcgtttacaggtattatcaattcatatgccagagagcttggtatattaaaggacaaggatgcgaatttcaacggagcagatgtcagaaacggcatgactgctgtagtgtcagtaaagcatcctgaccctagattcgagggtcagacaaagacaaaacttgacaatcaggatgcaaaccgtgctactgccaaggtgacaaatgatgaggtaccgctttattttgacaagaatcttgaggtcttaaagacggtaatatcatgtgctgagaaggccgcaaagattagaaaagctgaggagaaggcaaagaccaatctgctcacaaagcagaagttttcctttgattcaaacggaaagcttgcaaactgtgagagcagggatgcttctaagtgcgagattttcatagtcgagggagattcggccggaggctcggcaaagatggcaagaaaccgtatgtttcaggcaatcatgccgattcgaggcaagattttgaatgttgaaaaggcaagtattgataaggtactggcaaacgctgaaataaagacaatgataaatgcgtttggctgcggattttcggaaggatatggaaatgattttgatataacaaagcttcgctatgacaaaatcatcattatggccgatgccgatgtggacggagctcatatctccacactgcttttgactctgttcttcaggtttatgcctgagcttattttagagggacatgtatatgttgccatgcctccgctttacaaggctattccgtcaaagggcgaggaaaaatatttgtatgacgatgcggagcttgacaagtatagaaagacacatacaggcaagtttacgttgcaaagatataagggtcttggagagatggatgcggatcagctctgggataccacattaaatcccgcaacaaggatgctaaagcgtattgaaatagaggatgggcgcctggcaaatgatgtgacatcactgcttatgggtagtgatgtgccaccgagaaaagagttcatatacgagcatgcgcatgacgcagagcttgatgtgtaagcatgacgcagcagcttttggttctcagtggttctgaatagttacgcagtatttataatcggagaaagacatggatagaaatatagataacaatgtagacaacaatataattcagaccgaatattcggagctgatgcagaaatcatatattgactatgcgatgagtgtaatcatagcaagagccctgccggatgtgcgcgatgggcttaagcctgtacaaaggcgtacactttatgatatgcatgagctgggcatcaggtacgacaagccatatagaaagagtgcgcgtatagtcggtgatacaatgggtaaatatcatccacacggcgattcatcaatctatgatgcgatggttgttttggcacaggatttcaaaaagggcatgccgcttatcgatggacacggtaattttggttcaatcgagggagacggagccgctgccatgcgttatactgaggcaagacttcaaaaaatcacacaggaagcatatcttgctgatcttgacaaaaatgtggttgatttcattccaaactacgacgagacagaaaaagagccagaggtgcttccggtcaaggtgccgaaccttttaataaatggagctgagggtatagcagtcggcatggctacaagcattccgccacacaattttggcgaggtggtggacggtgtgattgcttatatgaaaaatcctgatatcaccacagccgagatgatgcagtatataaagggacctgattttccgacaggaggcattgttgcaaatcaggatgatcttgcagcaatatatgagaccggacagggaaagataaaaatccgtggaagaatcgaaatcgagaagggtaaggcaggaaaggacaagcttgttattacggaaatcccatacacaatgattggtgccaatataggaaaattcttaaatgatgtctattcacttgtcgagtcaaaggcgacaacggatattgtggatataaccaaccagtcatcgaaagagggaataagaattgtcttagagcttaaaaaaggtgctgatattgaggcacttaagaaccttttgtataaaaagacaaagctggaggacactttcggtgtaaatatgctggccgtcgcaaatggaagacctgagacacttggtcttgtacccatcataaggcatcatgtcaatttccagtatgagattgcaaaaagaaagtatgagacacttcttgcaaaggagcaggagaaagaagaaatacagcagggactcataaaggcctgcaacgtgatagatctgattattgaaatattaagaggaagccgtgaccagaaaatggcaaaggcatgtctcataaacggagagacaggggggattaaattcaagtcaaaggcttcagaagccatggcagcccagctttgctttactgagcgtcaggcaactgctatccttgaaatgcgcctgtacaagctgattggactcgaaattgaggctctgattaaggagcacgaggagaccagggcaaagatcgcagagtacagcgatattttagagcatcgctcatccatggcaaaggtcattatgaaggagcttaaagcgttccgcaaggagtatgcaagggacagacgcacggagcttgacaatctcgaggaagctgttgtggtcaaaaaggagcttgaggtatcggatgtagtgctgctcatggaccgcttcggctatgtgaagacagtagatacttcaacctatgatagaaacaaagatacagctgacgcagagaacaagctgatattgaaggtcaaaaatatagataagctgtgcattttcacaaacaaggcaaacatgcatcttgtcaaggtattagacctgccttacggcaaattccgtgacaagggcacacctattgacaatgtaagcaactatgacagcagtaaggaggatatagtatttatagcacctcttatggatgttgaaaagcacaagcttatatttggaacgaagtcagccatgataaagctcgtggatggtgctgagtttgtggtgacacgaaagacctcgcaggccacaaagctcatggatgatgatgagctgttatttgttgacatgctttcagagaatgctacaatggtaatgcgttcaaagaaggaaatgttccttagaatcgaatgtgccactattcctgaaaagaaaaaggcagcagtaggtgtcaggggaatgaggcttgacagagaggatgagcttactgacatttatctgctttatgaccaggaggaaaaagaggtcgaggtaaagggtaagcaggtggcacttcacaggctgcacattgcaaaccgtgacactaagggcgtaaagaaataatatatcgcatgacaatataacgtaaagcataaactgtgtatggttttgagtatgtatggactggaacagttaaaatatctgacatgaaaggaagcgatgagcttgttggacaaattaagagagcttggcatttcagaaaatctgattaaggaaattgaaaagtttcgctcgcagtatccggtggacaaggagtatgagtcaagaatccccgtgcctacacagttttattacggaagcgatgtgtgggagcaggctataaccgctgttttatgtggagaaaatctgcttttagtaggagaaaaggccacaggaaagaatcttttcgcagagaatctggcaggtgtatttaacagaccacgctgggatgtgtcatttcacgtaaatatggatgcagcatcacttatcggaaccgatacgtttagcgccggagaggtaaccttcaggccgggacctgtgtatacagccgcaaaaacaggcggctttgcggtgcttgatgagataaatatggcaaaaagtgaggctatggcagtgcttcatgccacacttgatttcagacgtacaatagatgtgccgggctatgacagactgtcgcttcatccggcaacaagatttattgccacgatgaattacggctatgcaggcacaaaggagctgaatgaggctcttgtatcacgttttgcggtaatccggatgcctatgatttcaaaagagagccttgtgaagctcataaaggaacattatcctgcaatacgtgaagcgggagcaaatgagcttgcggaggtatttcttgaactgcataccaagtgtaaaaatggcgaaatatcatcaaaggcacttgatctgcgtggtctcatcggttcaattggtatgatggaaaagggcttaaatatatatacagccctggatatgggtataacaaacaagagctttgatgagtatgagcagacgcttatccgtgatacaatccgtgcaagaatctcaaggaagatgagcagagagcagctgttttgttgatatgagcttgtgacatatgaaggaatggaacatatggaagaacaggatataaaggaagcaaaaagagcaagaaacttcatatggatggcggcctgtgattatgacatagagccgctttttctggcatttgcacctgatggatccgctgatatttatctgaatctgattattgggcttgaatacaagtggtatgagcatgacaagatagataccttattcaatcagctgacaggaaaaaacgctatgctttatgaaggacttttgtggataggtctggaaaatgtcctgtatgaaaaggagagacaaacgaggcctgccttatatgatttaaggattgagtacgcgaaaaagagccttgcaggagtcaataaaaacagggagtattcgaggattgatataatcagaaatgcacattgcagaaggatacttggaaaaacatcaggtctttgcaaagaggatgaagagatactgcatgctttttgttttacacctgatatgacaacggatgagattatagaaaaaacgagagaaaatctgtggaagtatttctcgtataagccgataaaggtggtaaagccgccgggcatatattttttacagaaggtagcaggagcatttcactcaataggaaaagtcagcacacagtatgtcagagcgaatagcttttatgataaaaatatggcatcggacacagcagctttgtctatggagcattcaaagagatatctgctgcagtttgcactgcagaaagatccaatagaagcgaagcggtatgtgacagcctgttttggaaaaagcatgtattctgacaggcagcaggccgagctggagaaaaagctctgtgtaggaaatcacaaaaactgtcacttgctttttaccagaggtatttcatcggagaaaaagcagtctgtacctgatgagattgacaacaaaagagagcgcagggaaattcttgcatttacaaaagagacagccatgcaatacgacaagaataaagagcattttgaaaaaaacatggcagtgtatcaaaacagtataaggagacttacagaaagccttagaatgcacctggagacagcagatgagacatttatggatgcttcaacacacggccgtataaagcctgcgagagtatggaaagccctgtatctggacaatccgcgtgtttttgagcgaaaagatgaggtggagacgccgggtttttctgtcgacatactgatggatgcgtcttcttccagaaagcagatgcagcagaagatagcagcacaggcatatgtactgtcaaagagcctgacaaattgtggcataccggtgcagatttactcatactgcagcataagaggctacacggtgatgcacatctttaaggaatatgacgattatggcgtggaggatgagctgtttcattatgttgcggcaggaaataacagggatggccttgctctgcgcgcggcatcacatctgatggagctaagtccaaagccaaagaagctacttttcatgttttcggatgcaagtccccaggatgatcagatagcaggggagggagccttttataaggacagggagtacactgatgctcttgctgttaaagacaccgtaaatgaggtgcagaggcttaaaaaccatggaatagacgtaattggcatcttcatgggaagtgcgcatgacagtgagcttgcaacaaagatattcggcagaagtttagtgaagataaagagtattaacgagtttgccgatgctgtcggacgcgtgttaaatgagatactgacctagcattttaattaaaagtacaataaatttaaagcaatggagataacaaatgaaagcaatattatttgatttggacggaacgctgattgactcatcagagggcattacaaagtcggcccaatatgcactttcacactttggcatagatgagcctgacagaaacagtctgtttttctttataggaccgccgctcataaacacatttatggagcattacggatttactaaggagagagcacttgaagcggtcgaaaagtacagagagcgctataacaaaatgggtatatttgaatgttcgctttttccgggagtaaaggaatgcatagaggcgcttaaagcagccggctataggataggacttgcatcatcgaagccggaaaaatcgtgtgagcgtattttggagcattttggaatactggatatgtttgatgaggtggtcggagctacatttgacggcaggatagatacaaaggaagaggtgcttaacgaggtgatgcgccggtggtctgacattccaagggatgagatgtgtttaatcggagatactatgtttgatatcgagggagcaaatcgtgtcaatgtgccaagcatagcggtaagctttggctttggagatgttaacgagatggtgagtgccggtgcaaaagctgtgatagatgatataaggcagcttcctgatgtactttccaggcttttcgattagcttttatgaaaatgcaatgcattgagacctgaggttataaacagtagataggaatgggatttcatgaataagaatttaaaattaagagcgatagtgtgggagataattgtcccgattgtgctttactacattgtttttctgagcgcaatgtactttatttttgcgtttatcggacacacagcttcgacatacatgatagcgcagataatatctgcagcaattacaataccatttatgtattttgcaagctataagccgacacagcagatgtttgttaaaaaaccaaagatggacagggcactttttataaatgtcctctgggtgattgtgattacactttttatttcatttgcgctcaataatatcatcacaatgtcaccgcttatcgggctctcagaaggatatgccagggcgaatgagagcttttatgcaagcactcttgtaattgagctgattggctcggcaattctttctccgattatggaggagctcgttttcagaggcattgtatttggaaatatgcgcaaaataatgaatgtgccacaggctgtatttttatcggcgcttttgtttgggctcattcattttaatatagtgcagtttgtctatgcttttttacttggccttgtgcttgcagcttttatgtataagtcagggcatgtgtatgcggccatgattggacatatcaccgcaaatgcgtttgcagtcataaggacagagaccggtattttgaagtgtactgttgatggcagtgtaatggcatgggtggtatctgtaatgtgccttggtgttggtgctgtgatattttattattatgcgaagcacacagaaggaactgtttagcaggaccaaaacggagtgcagacaaaatatgagtatcgtgcagttttacgaatatgggaagtgcaatttagaatagttattggttgttatggtaatcagctatacaataaaaagtatagctgatttttttatgatataagacatgaaaagctattgtaacacatacacaattcagacacaatttgctgaaacagtgttttatgccttgctttattcaaaaaagttttgggaatttaaaaagtaaattgtgcgtataaccttataaataagataaaaatacaattatagtcagaaaaataactttataatattaagttatcgaataatcagacaatatcaagaaaaaaactgtttacattgagctttcatagttgtaaaatcataaacaggaaatgattcacttcttaataagttatccgttaacaaatttacactaggaaaggaagaacctatgagtaaacaatggaatgaaagcacagccacagccaagggattatatgatcctcgctacgagcatgataactgtggaattggtgcagtagtaaatatcaaaggtatcaaaacacatgagacagtcgagaatgctttaaagattgttgaaaacttaaagcacagagccggaaaagacgctgatggtaagacgggagacggtgtcggcatcctgcttcagatttctcataagttttttaagaaggttacaaagcctcttggaatagagcttggagatgagagagattacggtgtgggaatgtttttcttccctaatgatgagttcaagacgattcaggcaaagaagatgcttgaggttatcgtggagaaggaaggccttgaatttctcggatggagagaagtgcctacagagcctgataagctttctaaaaaagccagagactgtatgccatgcatcatgcagtgctttgtaaaaagacctgaggatgttgagagaggacttgagtttgacagaaagctttatgttgcaagacgtgttttcgagcagtcaaacgacaatacatatgtggtttccttctcaagcagaacaatcgtatataagggaatgttccttgtagagcagctcagacagttcttcatggatttacaggatcctgattatgagtcagcaatcgccacagtacattcaagattctctacaaatacaaacccaagctgggagagatctcatccaaacagatttatcgtacacaatggtgagattaatactattcttggaaactctgacaagatgtcagcacgtgaggagaacatggagtctcctaagcttaaaaaagagttccagaaggttttacctgttatcaatgcagcaggctctgactcggcaatgcttgataacgcacttgagtttttggtgatgagtggtatggagcttccacttgccgttatgataatgattcctgagccatgggcaaacaattcaatcatgactcagaagaagaaggatttctaccagtattacgctacaatgatggagccgtgggatggtccggcttcaatcgtattctcagatggtgatttagtcggagcagtgcttgacagaaacggacttcgtccatcacgttactatgtgacagatgatgattaccttatcctttcatctgaggtcggagtacttgagattgatcctacaaagattgtgaaaaaggatcgtctccgtccgggaaagatgctccttgtggatactgttgcaggaaaaatcatagatgatgatgagctcaaggagagatatgcagacaagcagccttatggtgagtggattgacagatacatggtaaatctcaaggatttaaagattcctaaccagagagtacctgagtatacaaaggaagagcgccagagaatgcagagagccttcggttacacatatgagtcactcaaggattcaatccttcctatggctaaaaatggtgttgagggcacagcggccatgggtactgatacaccgcttgcagctttatcaggtaacagggagccgttattcaactactttaagcagcgcttcgcacaggtaacaaacccgcctatcgattcaatccgtgaggaggttgtcacatcaaccacactctatatcggtgaggccggaaatgtgcttgaggagaagccggaaaactgccgtgtacttaagattaacaacccaatccttacaaacaccgaccttatgaagattaagaatttaaaggcagatggctttaaggtagaggttttacctattatatattacaagaacacaagtcttgagaaagcagtagacagactttatatagaggctgaccgtgcatacagggacggagccaacattattatcctctcagacaggggtgttgatgagaaccacgttgcaattccttcactgcttgcagttgctgcattgcagcagtaccttgtaaagacaaaaaagagaacatcgctttcgctcattcttgagtcaggagagccgagagaggttcatcattttgctacactgcttggctttggtgcaagtgcaatcaacccttatctggcacaggatacagttaagcagcttgttgacgagcatatgcttgacaaggattattatgcagcaatcgatgattacaaccatgcaatcatcacaggtatcgtaaaaattgcagcaaagatgggtatttcaaccatccagtcatatcagggctcaaagatttttgaggcaatcggtattgacaagagtgttattgataagtatttcacaaatacagtaagccgtatcggtggaattacattacaggatatcgagaacgatgtgaatgaacttcactctgcggcctacgatccgctcggacttgagacagatgttacacttgacagcaagggcagacacaagatgagaagcggagctgatgaccatctgtacaatccggctacaatccatcttctccagcagtcgacacagcgcggtgactacaatctgttcaagcagtacacagcacttgtggacgaggaagagaaaaatacaaacatccgtggacttatggatttcaactatcctaagaagggtgtcaagctcgaggaggttgagagcgttgactcaattgtgacacgtttcaagacaggtgctatgtcatacggatctatttccaaggaagcacatgagacacttgcaattgccatgaaccatctgcacggaaaatcaaataccggtgagggtggagaggacaaggatcgtctcacaatcggaaaagacggaaagaaccgctgttcagcaatcaagcaggttgcttcaggacgttttggtgtcacaagcagatacctaacaagcgcacaggagattcagattaagatggcacagggtgctaagccgggtgagggcggacacttacctggaaagaaggtttatccttggatcgcaaagacaagactttcaacaccgggtgttgcactcatctctccaccaccacaccacgatatttattctatcgaggatttggagcagcttatattcgacttaaagaatgcaaacagagatgcaagaatctcagtcaagctcgtttctgaggccggtgtaggaactgttgcggcaggcgttgcaaaggccggagcacaggtagtgcttatctcaggctacgacggaggaacaggagccgcacctagcagctcaatccacaatgcgggacttccatgggagcttggacttgcagagacacaccagactcttcttatgaatggtcttagaaataaagtaagaattgagacagacggtaagctcatgagtggccgtgatgtagcaatagcagcgtgtcttggagcagaggaattcggctttgcgacagctccgcttgtaacaatgggctgcgtaatgatgagggtatgtaacttagatacatgtccggcaggaattgctacacaaaaccctgagcttcgtaagcgctttgcaggaaagccggagtacgttgagaacttcatgcgtttcatcgctgaagagcttcgtgagtatatggcaaagcttggcgtaaagacagtggatgagcttgttggacgtggagatctcttaaagaagcgtgataatctaagcgagagacagtcaaagattaaccttgactgcattcttaataatccgtttgacggcaaaaagcagagtgttatcttcgatcctaagcaggtatatgactttgagctttcaaagacaaaggatatgactgagatcatgacacagcttaagagcgcacttgagagcggacaaaagcgtgcgattgagattgaggtaacaaatacaaacagatctctcggaacaatatttgggtctgagattacaaagaaatatgacgatacgctggatgaagacacatttgttatcaagtgtaacggtgcaggcggacagagctttggagcatttatccctaaggggcttacacttgagcttgtcggagattcaaatgattacttcggaaagggtctttcaggtggaaagctcatcgtatatccacctgcaggagtcaagtttgagaaggatgataatatcatcatcggaaacgtggcactttacggagctacaagcggtaaggccttcataaacggtgttgccggtgagcgtttctgcgtaagaaattccggtgcaacagcagtagttgagggtgtcggcgatcatggctgtgagtacatgacaggtggccgcgtagttatccttggaaagaccggaaaaaactttgcagcaggtatgagcggtggaatagcatatgtgcttgatgaggacaatgacctttacatgagaaccaacaagcagatggtatttactgaggaggtctcaaacaagtacgatgtattagagcttaaggaaatgataaaagagcatgtaacacttacaaactcagaaaagggtaaggaaatccttgatcatttcagtgagtatcttcctaagttcaagaaggttattccttacgattacaaccgtatgcagatggctattgtacagatggaagaaaagggtcttaacgcagagcaggcacagattgaggcattttatgccagcacaagaggctaaggaggacgcagataatgggaaaaccaacaggatttatggaatatgacagatgcgaagcagcgtctgtagagccaaaggagcgtattaagaactttaacgagttccatgtgttcctttcaaaagaaaatcaacagaaacaggctgcccgttgcatggactgcggagttcctttctgccagtcgggaatgacaatagcaggcatgacatcaggctgtcctctgcacaacctggttccggagtggaacgaccttgtatataccggcaactgggagcaggcatataatcgtttgcacaagacaaataatttccctgagtttacatcaagagtatgtccggcattgtgcgagaaggcatgtacatgcggacactggggcagcccggtgtcagtcagggacaatgagcatggtgtaatagagactgcatatgcaaacggatatgcagctccaaagccaccaaaggtcagaaccggcaagaaggtggcaatcattggatcgggtccttcaggacttgcggcagcagaccagcttaaccagagaggccataaggttacagtatatgagagagaggaccgcgtcggtggcctgctcatgtatggtattccaaatatgaagcttgataagagcattattgacagaaaagttaatataatgaaggaagagggcattcattttgtcacaggctgtgatgtcggaaaggatataaagccggcagagctttacaagaagtatgacagggtaatcctttgctgtggtgccaaaaatccaagagacataaaggcagacggaagagatgcaaagggtatttactttgctgttgattaccttacccagaatacaaagagccttttaaattcaaacctgacagatggcaagtttgtatctgcaaagggcaaaaatgtagtcattatcggtggcggtgacacaggaaacgactgtgtcggaactgcaatccgtcagggcgccaaatcagtcacacagcttgagatgatgccttgtccgcctacagagcgtgccgcgaacaatccgtggcctgagtggccaaaggtcttaaagacagactacggccaggaggaagccattgcagtattcggacatgatccacgtatctataagacaaccgtaaaagagttccacaaggacaaaaacggcaacttaaaggagcttacgattgtaagtcttgagagtaaaaaggatgagaagacaggcagattcatgatggttccggtagagggatcagagaaaaagcttccggcagagcttgtgcttatagcagcaggcttccttggaacagaaagctatgtggcaaaggcatttggtgtagagctcaatgccagaacaaacgtaagtacacaggagggacattacgctacaaacgtaaaaaacgtatacgtggcaggtgataaccaccgtggacagtcccttgtagtatgggctatcagagagggacgtgaagctgccagagaggttgatgagagtctcatgggatactcatatctctcagtacagtaacaaattattatagcaattctccttaataaattttatttcatacattttatagcaaaatcccggtgcattgcaccgggatttttgacatacaaaattactgctttctaaaggtgttggtactgtggataaactgattgaaatttgacttataagatgttaagatagcagtgtttgacatgataataataatattaggagcagcaaatgagtaaaacagtattttttgacatagacggaacaatatgggacgatgacatggtaattcctgaaagcaccctagaggctgtggcagatctcaaggcaaacggacatctggcatttatatgtactggacgtgccagagccagtgtgaggtcagagaagctattaaatatgggttttgatggaataattgcggcatgtggcaactatattgaaatggatggcaaagtaatatacgaaaatgacctgagcgcagatatggtacaaaaggtcataagggttctttctgagtgtaaaatgcctgtagtgcttgagggctccacggactactggatagatgacgagggctttgagaatgatccgtatgtggattacctttttgagtcacttggtgagcatgcacatataataagaggatatgacggcgagataagaattaataaattctccgctgacgtgatagatggtactgattatgaacgtgtgaaggcagagtttgccgatgattttctgatactcgagcatgtggaaaatgtagtggagttcgtgccgaagggaacctcaaaggcaaccggcatcaaatggctgtgcaatcatctggatatcccgcttgatgaaacctatgcgataggcgacagtgtaaatgaccttgaaatgcttgagagcgtaggacatggaatcgcgatgggcaactcaatgccaccggttaaagaaattgcggaatatgtcacatcggatatttcagatgatggagtgaaaaatgcgttaaagcattacggattgatatagaaaatgtaaaataagtattaaaatgaaatatcactgttgacattgaaatgcaatagtgatattttatttacagaaagaaattagcactcgaaagaaatgagtgctaacagagataaaaggaggcaatacaatgaaattagttccattatcagacagagtagtattaaagcagttagaagcagaggaaacaacaaaatcgggaatcatccttacaagttcagcacaggagaagccacaggaggctgaggttatcgcagtaggacctggcggaatggttgacggcaaggaagttaagatgcaggtaacagtcggacagaaggttatttattctaaatacgcaggcacagaggttaagctcgacggagaagagtacatcatcgttagacagaatgatattcttgcagtagtagagtaagattaatttacggatagaagctaaagatccggtacgttttacatatccggtcatagctgcttacattttggaattaaatatcaaatatataaataaatagaaaggtcgtataaatcatggcaaaggaaattaaatatggctcagaagccagagcagcacttggagctggagtagataaattagcaaatacagtcagagtaacacttggaccaaaaggaagaaacgtagtacttgataaatcatacggtgcaccacttatcacaaacgatggtgttacaatcgcaaaagaggttgagcttgaggatgctttcgagaacatgggagcacagcttgtcaaggaagttgccacaaagacaaatgatgtagcaggagacggaacaacaacagctacagttcttacacaggcaatggttcaggaaggaatgaagaaccttgaggcaggagcaaacccaatcgtgcttcgtcgtggtatgaagagggcaacagacaaggctgttgaggcacttaaggatatgagccagaaggttaagggcaaagagcagatagctaaggttgcagctatctcagcaggagatgaggaagttggtaatctcgtagcagacgctatggaaaaggttacaaacgatggtgttatcacaattgaagagtcaaagacaatgcagacagagcttgaccttgtagaaggtatgcagttcgacagaggatacctctcagcatatatgtgcacagatatggataagatggaagcagtacttgatgatccgtatatccttattactgacaagaagatttccaacatccaggatattcttccattacttgagaagattgttcaggccggtgcaagacttcttatcatcgctgaggatgttgagggagaggctcttacaacacttatcgttaataagcttcgtggtacattcaatgtagtagctgtaaaggctcccggatatggtgacagaagaaaagcaatgcttgaagatatcgcaatccttacaggtggtcaggtaatcagctcagatcttggacttgagctcaaggatacaacaatcgatatgcttggccgtgctaagtcagttaaggttcagaaggagaacacagtcatcgttgacggtgccggagacaaggatgctatcgcaggcagagtaagccagatccgtggtcagattgatgagacaacatctgagtttgataaagaaaaattacaggagcgtcttgccaagatggcaggcggtgtagcagttatccgtgtaggtgctgcaacagagacagagatgaaagaggctaagcttcgtatggaggatgcccttaacgctacaagagcagcagtagaagagggtatcatcgcaggtggtggatcagcatatatccatgcatcaaagaaggttgcagagtttgttgatacacttgagggagatgagaagacaggtgcaaaggttatccttaaagcactcgaggctccactttactatatcgctgcaaacgcaggacttgaaggtgcagtaatcatcaacaaggtaaaggagtcagctcctggaacaggcttcaacgcagctacagaagagtatgtagatatggttgatagcggaatccttgatcctgtaaaggttacaagaagtgcattacagaatgcaacatcagtagcttcaacactcctcacaacagagtcagcagtagctacaatcaaagaggacactccagcaatgccagccggtgccggcgccggaatgggcatgatgtaatcgtagacaatgaggaaaaaagaaacccgtggtcacactcgtgtgaaccgcgggttttctttttgacgaatgtccggatatgagcaagtagcacgcaagtgcggattgcgaatatacggaggctggagaatccagccgtgtctacgatgtaggtggaataatgccgctgtccatcaaaaacttcttttcaaacaattacacctatggtataatgagcggtgttggaaaaaatacgacaatgaaaatttatatcggagtgagaattaatgagtaaggttatagtagttaccgattcaaacagcggtatcacacctgacgaggcaaagaagcttggagttgaggtgattccaatgcctttttacatcgatgagcagatgtattatgagaatatcgatctgacgcaggagcagttctatgagaagcttacggcaggcggcgatatcaagacatctatgcctttggttggtgatgtaacagataaatgggatgagtttttaaaggaaaatgatgagattgtatacattccaatgtcatcaggtctttcaagctcatgtgagacagcatatatgctctcgcaggattatgacggcaaagtgcaagtagtcaataatcagagaatatcagttacaatgcgccagtcggttatagatgcgaagaacctggcagaagcaggaaaaaatgcagctgagataaagcagatattagaggatgcaaagtttgagtcttccatatatatcatggtagatactcttaactacctcaaaaagggtggtagaatcacgcctgcagcggcagctcttggtacacttttaaagcttaaaccggtgcttcagattcagggtgagaagcttgatgcatttgcaaaggcacgtaccgtaaagcaggcaaagagcatcatgatagatgccatgaagtcggattttgagaagcgcttcaataatccggatggcagccagataaatcttgaaatggcatacacgcatgatattgcagcagctgaggcatttaaggaagaggttcaggcagcatttccaaataacgagatagtcatgaatccgctttcactttcggtctcatgccatataggacccggagcgcttgcaatagcctgctctaagaagatagagtattgtaataaataattattaatagttacaaagcataataaatataccactaaaatcaagcagtaacatggcacaatgtgtcgtgtcagaaaatacaagggaggcatgtaaaatgtcaaaggtagatgtagtaataggatgtttctatggtgatgaaggaaaaggtaaggtaattgattaccttgcagcagacgctgatgtagcagtaagatgcacaggcggagacaatgccggtcacacaatcaaagcaaacggtgttaaatatgcaatgcaccttattccgtcaggacttttatcaggacatacaatcggagtgatcggaaacggagtagttttaaatccgcaggttcttttagaggaaatcaacaacctgaaggagcacggatatgatgtagataaatacttaaaaatcagtgaaaaaacgcatgtcattttcccatatcacagcaagcttgatgtggcgcttgagaaggtgagaaaggcaaagaaaatcggtactacaggaaagggtatcggaccttcatactgcgataagtatgagagaagcggaatcagaatggaggatttatacgcacctgatttcaaggagcgccttaaggagcagacagagcttaagcttgcacttcttaaggtatatgatcctgagactgattatacaaaggagcttgatttcgacaagatgtttgcagagtacagtgactatgcagcacagcttgagccatatgtatgtgatacaatcaccctcttacacaaggcacttgaggatgacaaaaaggtggttgttgagggagcacaggctacactccttgacatcgactttggttcatatccatatgttacatcatcaaatcctacaatcggtggaatccttacaggaacaggtctttctgcttcagatatcggaaatgtatacggtgtcatcaaggcatactcaagccgtgtaggtgagggaccatatgtgacagagcttcttgacgcaaccggagacaaaatccgtgagctcggacatgagtacggcaccacaacaggccgcccgagaagatgtggatggttagaccttgtcaccttaaaatatgccaagcgtcttaacggacttacagcactttctgtaaaccatctcgacacaatcggcaagtttgatacaataaaagtctgcaccggctacgatgtaaacggtgaggtaacagaggactttactacaaatcttaaggttttaaacaacgcaaagcctgtatatgaggagctaaaaggcggctggggagatgaaattgcaagctgtaagactttcgaggagcttcctgagaatgcacagaaatacatcagcttcatagagaaatacatcggagtacctgttaagttcatcggaacaggtgctgacagagaagctatgattgtacgcgcagacaattagtacagctagaatatcatagtattaaaattataaataatgtacaaaagagtgttcagaattcacaaattgaacactctttttttatactctaatatcataacaatttagcaggaggagtattactgtgatagaaattagtaatctcgtaaagaaatatggcgaccatatggccgtcgatcatctttcgctgactgttgagccgggaaagatatacggacttttgggaccaaacggtgccggaaagtcaaccaccatgaatattgttaccggatatatcggtgctgatgatggaacagtaaagataaacggctatgatatatttgcacagcctgaggaggcaaaaaaatgtatcggatatctgccggaaatcccaccgctttatgtggatatgacggtatatgagtatctgaaatttgtggcggagctaaaaaagctcgacaggaaaaagagaaaagaaatgatagcagatgccatggacatgaccggcatcacggaggtgaaaaaccgtctcataaagaatctttccaagggctacagacaaagagtgggcttcgcccaggcagttctgggatatccggaaatcattatactggatgagcctacagttggacttgatccaaagcagataatagagattcgtgagcttattaaaaagcttggagaagaccatacagtgatactgagctcgcatattttaagtgagataagtgcagtgtgtgatcatgtgtttatcatatcaaatggcaagcttgtagcaagtgatgccactgaaaatctgattaatctcatgtcaaagaatcaggaaattaaccttgttctcaaatcagacgagattggtgcaagagaaatgcttgagaagatagtaaatgttgataaggtcatatttgaaaagtctgaggaagagaaaacagtgaaggctatggttatagcaaaagcaaactgcgacatacgtgaggaaatatttgagcttgcaagtgcaatgcatatgccgatccttgagatgcatactgttgtgaagtcactcgaggacgtattccttgagcttacaggggaaggagacgagaaataatgcttgcaatatttaaaagagaattcaaatcatatttccaaaacgttataggatggctgtttgttgcagcacttcttgcagtgtatggcctatatttttatgtatacaatctgaaaaacggttatccgtatatctcatatgatttaaagggaatcgggtttattatgatgattgcagtgccaatcctcacgatgagatcactttctgatgagaaaaagacaaagacagatcagctaatgctgacatcgcctgtatctgtcggaaggattgtagcaggaaaatatttagcgatggcagcagtatacaccatagacatagcgctttttgcactttcaccgctcgtgctgtcaatttacggtaaggtggcattaagtgaagcctatgttgctttgtttggctactggctttacggtttatcatgcatcgccgtgggactttttatatcgtccatatctgagagtgtgataatatctgcaatacttacatttgcggcattattcctctcatacatgatgcagtccatcacagggctcatctcgtcaagtgagaatctgctcacaaaggtacttaattgctttgatttgtacacaccatttgagaattttgtgagtggctgcttcagtgtcacttcagcagcttattatctgacggttattctgcttttatgcttccttacgacgcagtctatccagaagagaagatgggcattttcaaagaggatgataggaacaggagcgttttcggcaggaatgattgtcataatgtgtgcaatctgtgtggttgtaaatcttgtagtgacagcgcttcctgctaagtacacatcaattgactgttcggctacaaagctgtactcgctcacaggcgatacaaaggacagggtaagtaagctcgatgaggatatcacaatctatgttttgaattccaagaaatcaaaggatgcaaagatagatgagacaatcaacagatacaaggatctttcgagtcatataaaggtaaaatatgtagacccggcgacaagcccgaagttttatcaggattacacagacacgacacctaccacaaacagccttatcatcgagagcaaaaaccgttcaaaggtgattgattacaatgatatatatgaatatgacagttcgtcatattattacggatatcagtcgcagtctagcatcaaaggctatgatgccgagggacagattacaagtgctatagagtatgtcacaatggatgcagatgagctcccggtaatttatcagataacaggacacaatgaaacggaaataggaagcaatttccagagtgttgtaagcaaggcaaatgcaaatctgaagagtttagagctctttaacgaggaaaaggtgccggaggatgcaacagccattatcattaattctccgactgttgatttcaacgaggaagacgcacagaaggtgattgattatttaaatggcggtggaaaggcactgattgtcggctgctacgcatataatgacgagcttacaaactttaacaagatacttgcggcttacaatgtcagcttcaagaccggtgtggtagctgaaaatgacagctcaaaatattatcagaatcctctctacctgcttccaacggttgagacgacagattacacctcggatgctacagacggatatgtattcctggcaggaagctgtgcaatcagttatccggaggatacagatgatgtgacatatacaaagctgctttctacatcagacagcgcagttttaaagaaggactggaagaatatcaccacatcgaaggcagaggacgcagatgagaacggaccgtttactacaggtcttgctgtaaacgattcaagcaccggcgcatcggttgtcgtgttgggtacaccttacgtggttgatgattcatacgataatgccgtttcaggcaacaatgcagacctgtttaaggatgttatcacatcaatgaccgggaatgttgagcttgcatcaagtgtgataccggtgaaggattacaccttaagcaatatcactataaatacgctgcaggcggttattacgg

SEQ ID NO: 1446 - DNA, 2666 bp, Unknown
  gut microbiota DNA sequence
gaaccctagcggaacaacaggagtttccggcagtgatatagtagcttatgctatgcagttcaagggaaatccatatgtatggggtggaaacagccttacaaacggtgtagactgttcgggctttgtgcatgaggtatatgaacattttggtatcagcacaccgagatattcacaggcatttaagtctgtgggacaggccgtatccttcgataatatacagccgggagacgtagtggtatatccgggacatgtagctatatatgcaggtggtggtgtgatagtggaggcacagtccacaaaggcaggcatcacagcaaacagaagcgtgcagtgtcatacaatacttgctatacgacgtcttgtataggatggttaggagccgataagtatatttattatacttaccggctcttttttcaggaaacaaacacattgcaataaacgatagcaatttccatccataaggtgtattatagagacagacggcaccaattcgcacaaaacgaactagcaagcctgtaaataaagtaagaaaagcaggaggaacaagccatgcagatggaacaattacaaaaagacatgattgcagcaatgaaagcaagagacaaggtaagaaaggatgctatatcctcacttgtatcggcagccaaaaaggcagcaatagatgagggctgcagagacaatataccggaggagcttgtcaacaaggtcatccttaaggaaatgaagtctgtgaaggagcagattgacacatgccctgcaacaagaacagatctgcttgatgagtacaataccagatatgcaatctttgaggagtacgctcctgcaatgatgtcggcagaagaggtagaaaaggagctcacagagcagttctcagatgtgatcgcaacaggaaacaaaggacagataatgaaggcagtcatgccgcatttcaagggcaaggctgacggaaaggttataaatcaggtggttgcaaagctttgcgcaaaataagaaaacacatcacaacaattatacttgcagtgctggctgtcatagccggcgtgtatgcatataattatcatgatatgaagcagaatattgtatacaatgagcatctggatgatgtggctgttaccgtgaatgggaaagagctgacattgcgcgatatggcattttatgtggcatttgaggagatgaatgtcgagaagcaggcccttgtgtatgattccgataatccaaacaagtattggaatatccacacaaacggtgaatttgtccgtgtcacagcgcgtaaagcagctatgtccatggccattcacgatgagattttttatgagatggccaaaaaagagagcattacacttactgacgacgagaaagcagctttgaaaaattccgagaaggacttctggtatgatttgtctgatatagatggtgcaaagaagcttggggttgaaaaaaaggatatttattcgtccatggaaaagtctgcaatagcccggaaatatcaggaaatatatgcagggcttgacaatgccgatataacggattatgatttctcgggaggcagatatgagaagctgctggagaaaaataactataaaataaaagaaaaagtgtggaaaagagtcgatatgggaaacgttactcttgatcactagaaagaagattttatgtcaacaaaaattggaagaaatgacccttgctggtgtggcagcggaaagaaatataagacctgtcatgcggcatttgatatgaagcttgaaaagcttgcagaggcacatcataagataccgagccattcaatcatcaagacacctgaccagatagcgggaatcaaggagagcgccaagataaatgtcgcagtgctcgactacataggagagcatatccacgagggtatgaacaccgcagagattgataaaatagtctatgatatgaccaccagcatgggcggcatccctgcaccactcaactatgagggttatccttacagcgtatgtacatcagtaaatgagcaggtttgtcatggatttccttcaaaggatgtcatcttaaaggatggtgacatcataaatgtagactgttctacaattttaaacggatatttttcggattcatcaagaatgtactgtatcggaaatgtaagccctgagaagaaaaagctcgttgaagtcacaaaggagtgtgtggagcttggactcaaagaggtaaagccatggggcttcctcggagatatgggacaggcggtgcacgaccatgcatttgcaaacggttacacagtagtgcgcgaaatcggtggacacggagtgggactcgaatttcacgaggatccgtgggtaggctacaacaccaagcgtggcaccgacatggtcatggcacccggcatgatatttaccatcgagccaatggtcaacatgggcaaggccgatatctacgtagatgacaagaacaactgggaagtatacaccgacgacggacttccatcagcccagtgggaaatcatggtactcgtcacagaggatggccatgaggtgctgagctggtaaaccggtaagtattacgagagtgcctttataaaaggatattatttcataggtgataacattataaagggcgtgtgaaaaacgaaggtttttcacacgcccttttgtataatcccatacagaatctagtaagtgaag

SEQ ID NO: 1447 - DNA, 7699 bp, Unknown
  gut microbiota DNA sequence
cttccttaaatgaataagatttttcccttagttctttttccggcactgacatggtgcgacgaaggacatgttcctgctcagcctgatgctgttcaatctgcgtcctgattttctgtatatcattcatagcatccatccgcatgcctccttccgctcacaatataacacgcaagagtcggtgtcataactcttcctacattcagtgtctgtccatacagggtagaaaataacctggttgccctccaggtatccgtcctctctcttatctgcaccgattacctttgcgatggactgcgccaccgaaggtttctcggcaattactaattttatatttttttcactcaaattttgtttccttctttcattttttatttgctttttgatagcataaatgctatcatgtatatagaataaatatttccacttggagaacatatactaatgtacaacattgaattttacgaagattccaatggcagatcagagctttgggaatttcttgaatctcttcgagtcaaagcagctacaaacaaagatgcccgtattcaatacaagcagataagtttgtacatccagctcctcgaagataatggtacacggcttaatgaaaatatcacaaaacaccttgatgatgatatctgggagcttcgcccaggcaataaccgtgttttatatttttatttccaaaatgatacctttgtgcttttgcatcaattccgcaagaaaactcaaaaaactcccaagcgcgaaattgaacgggcaaaggctgaacgtgatgattaccttgcccgaaaggaggctgaatgattatgaaaacctggaatgactataaggaacatgtaagaaccgttgatcctgaaattggaaaagacatcgatgaagttgaaaatatttcctccatcgtaagtgccatggtggaacagcgtacttctcttggacttagccagagagagcttgctgctatgtgtggtattccacaatcatccgtagcacggatcgaatcctgcaaaacaaccccgaatctcggaacactgcttaatatttttcagcatctcggtttacagcttacagtaagacctacaaaacctaccatttaaaatcaaggagaatctctgcgaagaggttctccttatcggaatctcaccgaatcatgcctaacggctcgtgggctataccaccagtagggaatctgaccctgccctgaagatttctattcacttttcttacgtagctgtgttgtagcacaagcattcatgtaatgcaacagacaatttcgttgctgtatggctacataaaatgaattttaaacaataaaaacaagacctcccattacacttttcagtatctgagaggtctgtatttataaaaagtttaatcgactgacagtccaatttcatttaacgccaaaatgttttcttttacacatagaatttttttatttgctgtatattctcgcctcatatggttgcaaccattcggactccgtttcatgataattgcacaatacacatttttgatcaattttttgaaacatcagcttttcatttgtaaaattcacgatcaccaataaacctttgccgtttacttctctttcatatgcaaataatcccggatattcttcgtacatcgggcgaaactccgcctgtctcacaatatctgcatggtcatggtaacactgaatcaaacgcttataataattgtacaatgaatccggatcattcacctcactctgtacattgattgttctataattatcattgcatttaatccatggctttccacacgtgaatcctccattttccgagtcatcccactgcatcggcgttcttgcattatctcttcctaactctgaaaaatatgcaagtacttcctccggatccttgccctgtccgaccgcttcctcataggttcttttcgcccttatatcatccatatcattaatattcttccacttaacattggtcataccaatttcctgtccctgatatataaaaggcgttccatataaaaagaaatagatactcgccagtgccgatgcactatagaaactaatattttctctttccagaaatttgttcaggcatctggactgatcatgattttctaaaaagatagcactccaaccgattccgctattatgcgctacatgtgtaaacatttttttcttccaccgttctaccgcatgaatgcttgatttatcattttccccttccatattttcccatccaaaatcgaaaatcatggaaaagtaaccattctttccggcataccgttcaaaagcagcatcgtcaacccccggtgcttcggcaactgtcatacagttatatttatcaaagcagtgttctttcatctcatcaaggaatgttccgattcccttataatccgtaagattttcaaccggatatcgttccccatcattcgtaggacgactggcaaaacttaagtcttttttgataaaggtaattgcatcgatacgaaaaccggcgattcctttttccaaccaccagtttatcatctcataaattttttgacgcagctctttgcattcccagttcagatccggctgttccttcgcaaacgtatgataataccatctgccatctggtaatctcgaccatacggatccgccaaaattggatcgccagttattcggttctttatcattctccgttgttcggaagtaaaaataagacgcttcctcacaattaggatccttcattgccttctggaaccattcatgctgatccgagcaatgattgaccaccagatccaatatgattttaatctttcttttttgagcctcctctattaaatgctccatatcctcgtttgttccaaagattggatttaccttgtaataatccgatatatcatatccattatccacaagtggagaagcgtacatcgggcatatccataatacatctacgcctagattttggagataatcaagcttctggataattccgttaaaatctccgattccatctccgttgctatccataaaactttgcggataaatctgatacactacggactctttccaccaattgtttttcattcacaaattcctcaccttactttattgccccttctgtaataccttttacaatgtatttttgactaaacaaataaaagataataataggagccatgcacataaccaatccggcagaagccaaatcccaacgttttgcaaattgtccaaagaacagatatgtttttaaaggcaacgtctgtaagccctgtttattaataatcagcgatggtaataagaagtcattccatgttcccataacattaataactgcaaccgtgactataatcgttctcatcaaaggaagcacgattgaaataaacagacgtattgaaccacacccgtcaattgtagcggcttcctccaattcctccggaatattttttatgaacccatgaaacattatgattgccatacttgtttgaaagcccatatacataaagatcaagccaccacgagacagcaaaccgattttgcttgcaaatccaaccaatggaagcatgacacactgaaatggaatcaacatagaacctgcaaatatcaaaaaaataatcttacttgctttggttttataacgtacaagtacccaggccgccatagccgatatcaacagcaccagaaccgctgtcactaccgtgataagcagcgaattcataaaagatcttatgtaatccagttcttgaaacgcattcttatagttttcaagtgtgaatgttcctttcgccggaaatcccaacacatctgtaaaaatccccttggtcgtcttgaacgaattcataatcaaaatataaatcggaaacaaaaaaatgcatccaagaataagtcctgttactccataagcgatttttttcttcattacatttcaacctccttgcgctttgttataaccaactgcgtaactccgattcctgccacaataatcagaaaaacgattgcctttgcctgtgcaaaaccaaattcatttgctccaaaggcagaattgtaaatgtttaacgcaatcatttctgttgatttgtatggtccaccttgtgtcaaagctaaattttgatcaaacattttaaatgaactcgaaatagataagaataatccgattgtaaacgcaggcatcatcaacggaaggatgatatatctcataagctgccatgagtttgctccatcaattcttgctgcctccttaaccgattccggtatctgctgaatctgcgcaatatatacgatcatcatatatcccgacatctgccacacagtcaaaatcaacaatcctataaatccggtttccggattcgacagccatccgctaaaggctgcaattcctgtcttttttgaaaaagcttcaaaaatcgatataaaaataaactgccaagtaaatccaagcaataatccgcctatcatatttggcataaagaaaattccacgtaacagcgttgcgcctctaaatttctgtgtcactaacaacgccagagcaaagccaacaaagtttaccaatacaactgcgcacaccgaaaaaagcgcagtaaataaaaaagcatgtacaaatgagtcatctctcgtaaaaatgtcaataaaattttgaaaacctacaaacttaatgtccgagcctacaattccattccagtttgtaagggaatagaaaaatccaatacatgtaggtatgattacaacaatacaaaatgcaattaatgacggtgccaaaaagccccaaaaccgtaatttactttttctcatacttcttctatccgtcctttccaaacaaaggattttacccttatttgaatttccgggatagaagctctatcccggaaccctctttaactcttactagttgttctgttgttttcttaactcactccactgctcgatacaggtctttgtaacctcatcccaatcagcttctccggcaagatatttctgtacttctacaccagccacctgctgaccccatgtatttggagctccactgtatacccatccgttcatggtatttccggaattatttgcatccataattctctgtgaaagtggatcggatgcttttattccatcaaaattatcatatggaggaataaacttacaatcattcacaacaattttctgtgcttccgaatcggtgaacatccaattgatgaagtcttttgcagcagctttctgcgcatcggttgccttgctatgaattgcccaatatcctgatacacctacaaaatacttgccatctgaatatcccggaacagaatatggtaacatatccaatttttgaaggactgccggatctgttgtctctactgctggagctacccagtttccctgcttgatacatgcaacacgttcaatggcaagtccaccctctaatgatgttgtgtagtctacagaattaagatttgccgtattgttggcattggttgtataactggcctgaaaatcaaccattttcttatagtcttcaaagccggttcccggaagcgaatctgccgcatatgcttcattaggagtcttaaagtcatgtgttaaagcaacattagcgtcatggtctcctgcaatccataactcctttgtcgggtattccataacagcttccagattcggatatttatccttcatctcaccattatcgattttctctttcaaagtatcaaaaccggccttcatgccttcgaaattcatcatagaatctacagaaactccagcatcctcaaacatctgcttattaataacgaatccataaccttccatgtataacggaatggcatatacttttccgtcttttgtaaaagtatccgttgttccttttaatgcgtgctgcataatatccagatcagaaacatcttcaataacatctccgtaatctttcatgtccgaaaaaccacctacagaaaagattgttggtggatccgactgcatctttgctttcattgatgcgccaaaatcatttcctgtgacagcttcaagattaatttctacatttggatgatccttttcatatgctgcaattaatttcttgtatccttcatttgcctcaatcttactctggaaaattgtaatctttacattttttccactgtttgctcctgtcgaggtatctgcagaatttccgcatcccacaaataatcccccaagcattagcactgtcattccaactgctactaacttctttgctttcatatatattcctcctttttgtgaaactgttccatatttgattaaaaaaaatttttcatctatggatgcctcgttttgtgccacggaactgtccacatcatttgtggaactgttccatatctgtaatatacactatgcataactatattgcaacataaaaatgcagtttattcacagattcgttactatatccaaaaatcatcttgattttttattaaaaatcactagaaaaaggagactatgaagaaaagtctgtaaataataatcttctatgataatgattgagctggaagcctcttcttgccataataaaaggcctcctatgatttatattttaccatagaagaccttgctgttattagctatttacagaaaaagtttcacacactcctttgtgccaatgctctccattctacaaagtatcgccctttttatattttacaggaaccaatacttcccttttcttaagcggttgatcgttgatcagtttaataagcatattcacactttcctttgcaaccttcttcgcatcctgtacaattgaatcaatcgaatggtaattgaagtccgtggcataagttccatcataagccaatatttttttgtttttttctgtcttgaggaaggcggctgcacacaagtccaaagccataattccatcaacgtccggatattgatccaacaatgttctggtacgtttcatacacaattgatagtttacaacttcctcccattgaaaagattcaatgataacctccctattatgcttctccatcacatcgataagggctctcgcgctatcggcagaggcaagttccatcctggtcggatcactaaagcacatcacttttttacagcctttttccaaaaacaattcgcccgctaaaattcctccctgatgatgatccgatgtcaccagcgggattcccggtataatccgatccagtgagataattggtttctcaatattcatataatattcatcagaaagaaacgcagatcctacaatcagtccatcgaacagattacgttccaatgtatcaagatattctctttccttgtcctgatttcctctggtattacaaataaccacattatatccgtattgatctaattctgcctcaagataattccaaagagttgagaaatacggatggataatatccggtgtcataacaccgataatacccgttcttttcttatacagatttctgatccactgattaggaatataatctagctcctctaccgccttcttaattttgtttttgcttttctctgatacatatccgctaccatttaacgctctggataccgtgctgggtgctacatgtgccagctttgcaacttctcgaatgcttgccataatctcttctcctcacttgtgtaattgcaaacgaattgcccttatattcccctttatcctcttaattaaatccgacaaccttctgcgacaatcgataagccgcaaccgaaatcttgcggcctcccttacccggaatattcatg

SEQ ID NO: 1448 - DNA, 1922 bp, Unknown
  gut microbiota DNA sequence
gagcaaagaagttcaaaatgtttgcaaaaattaaaatgtagtaaaacgcttgcatctagcaaagatgatgcaagcgttaattaaaatcaagcgttggaatattgagcgcttacgtttaataagtatgttgaaaaggcgtgtggaaagattatcggaattttagtgaagtggattagcataacataaagatgcaattatattttgttggtaattacaaagttttatattcattagaagactaaatatatggaagaggatacattgattgaataaagtttttttggtggggggagactggctatgaaagatttttctttttggaaagaatatgatggagcatcagaaggaagtggaagaagtgaaaaaatttggctgcaaaatccggatacaggacaaattggtttattcaaatttaagaaagatatagatacaacagataatatttctgagtgtattgcatatgatttagcttgtattttggggattccttgtgctaaatttgaagtaggaatgtatgaggggagagaaggctcaatgagctataatatcctgaaaaaaccagaccaaattcttgttgagggaatacattttattatgttaatgtatcctaaatataatccggagctgtttattgatactatgacaagtcatagatattctattgaaatgataaaaaaggcaatagaacgatttgtacctatagacgatttattgaaaatgttgatgtttgattatttaattggtaactccgatagacatcaaaataattgggcaatacttatagaaaacggtaaaatgcaatggtcgccattgtatgataacagctcgtcattatgtgcatatatttctgaaaaaaatatacccaattatatgggaaaggataaaaatagatggaattctctaattgacacaaaatcaaaatcattaattagatgtagggagaatgatgaaaaacgtccaactcatttagaagtattaaaatatttgaaagaaaattattttgaagatacatatatttttgcagaaaatatagtgtcattgctaacggaagaaaatatttatcgtatattggacttgtattcggaagatggattatcagaaaagaagaaaatgttaatactaaaatttctattagacaaaataaaaatgatgaattatatttattttggagaggaggagtaatatggcaatcaaggatggtaaggactacttatatttgatttggaaatgctcttcaaataggcgacaatatattgtaggtcagcttacaaaaaatggacagtatgaatttaaatattgtgaggatatagaaaaagcaatcaaatctggatttgagttgttagtttcgtttgaaaaattagatactgtatataaatcagaaaaattatttccggaatttgctagcaggcttccagatagaaagagaaaagatattggaagaatattagaaaaatatggcttagatgaatatgatgcatatcagctgttaaaaaagagtggtgcaaagctgcctattgataatcttcagtttatagaccctattttggattataattgcagctttgaaaaagagttctacttagctggagtcagacactatttagggtgtggtggggatttatgcaaagattccattcaggttacaagaggagatgaagtatttttgatgcgtgatacttccaatcagtatgatgaaaatgcaatttgtgtagttgataaacaacaaaagttattgggatatattcctagatattatgctaaggcctttgttaaattcattgaagagaaaagaattgaagagtgtcatatttctagcgtgaggaaagatgcagcatgtgacgaatgtattggtgttcaggttagaatcaaggaatgaaatatttttatggaattatagatatgcggtaagaagttattgaata

SEQ ID NO: 1449 - DNA, 21177 bp, Unknown
  gut microbiota DNA sequence
gaactgacattaagtatgatgaaaaggaagaggtggtaaatatgtgtaaggcatgggatgatcataaaaagcttggcattcaggagggcatgcagagaggaatgcagcagggtcgtctttttgaaatttatctttcagtacaggagggagactattctgcaaaaagaggtgccgagaaggctgagatgtcgctcgatgaatttgaaaaagcgatgagcaaggcgggatataaaatacctgagctggtataataatctaaatatatttcacacaaaccggtctatccgtggtacaataagccacagaaagaccggctttttagagtatagctacaataaaagaggatagacaaacagatatgtacaagacgagaatagataatctggatttaaaacagattgctgacagtggtcagtgcttcagatggaagaatacaggaaaaaatgaatacacagtagtggcatttgacagggcgcttcggattaagcaggatgggaatgagtttgagctggactgtgatgaggcagactggaacaatatatggaaaagctatctggatatggatacggattatgcggggattgcaaagcttatagcagacggagatgacgcgcatctgaaggaggcatatgcatatggcagtggtgtgcgcattttaaggcaggatttgtgggagatgattgttacttttatgatttcccagaataataacataaagcgaatcacaaacagtgtggatttactttgcaggcggtgcgggcataaaatagacggcagtgcagagggtgaagaactgtatacatttccaaagcctcttgaggtaccggatgagatatttgatgacaggagcatgggctttggctatagggcaccgtatctgaaggaaatatatgagtatggcgctaataatcctgactggcttgataatctgcgcaaaatgagctatgatgaggcgatggaaagcctgcttacccgcaaaggaattggcaaaaaggtggcgaactgcatatgtctttttggtttacatcatgtggatgcgtttccgatagatacgcatgtaaagcagcttttggacaaatattatagtgacggctttgattttgagcgctacaagggtgtggcgggaattatccagcagtatttgttttattttgaattgtaaatgatatgagaaagagaaaggataaacgatgtacgttatagtaggacttggaaatcctgacaaaaaatatgagcacacaaggcacaatatcggatttgatgtgatagatgcgcttgcggataaatataatataagtgtgacagacaaaaagcacaaggcgctctgtggaagcggagtgattgagggcatgaaggtgctgctcgtgaagccgcagacatacatgaacttaagcggcgagtctgttgctgaggtgatgaatttttataagcttgatccggatgaggaaatgattgttatttttgatgatatttcgcttgagccggggcgtatccgtatccgcaaaaagggcagcgccggcggtcacaacgggattaagagcatcattgcaatgaccggcacacagggcttcagccgtatcaaggtcggtgttggagagaagccgcagggctgggatcttgctgaccatgtgctcgggcgtttcagttctgaggacagggcaaaggtggaggaagctatcggtcatgcgatggatgcagcagttcttatgatgcagggcgagacggataaggctatgaacatatataactagctggaaatcgacaaggtgattttgaacagacagaaatggagaattgaaagtgaaagcatttacagagccactcctttcccttgcgggctttgaggagatgacaaaaacagcagaaaaatcgtccggacttatatctgtcacgggatgcatagatgcgcaaaaatcacagatgatatatgcctttggaggtcacaggaaaaacaagcttattgtgacctttggagagcagaaagcgaaggaactgtacgatgagtacagtttttttgacaaagaggtggtgtattatccatcaaaggatgtgcttttttaccagtcggatatcaggggcaatctcctgacagcggagcgtatcagggctttgaaggctatccgtgagcaggagagtgtgacacttgtgaccacctttgatgcgctgatgaatacaatggcgccgatagaaaagatgtgggaaaacgtgcttacacttgaacagggacagcttttggatttgaaggaaattcaggctgctcttatcagaatgggctatgaaaaagagtatcaggtccagacgatgggacagttttctgtcaggggtggtattcttgacgtttttccattgacggaggagaatcctatccgaatcgagctgtggggagacgagatagacaccatcagatattttgactgcgagagccagaaatctattgaaaatattgactgggtgagcatatatccggcggcagagcttgtactaagtgatgaggaaaaggccgggggaattgaaaagcttaaggcagaggcaaagagggtgtctgacaagcttagaaagcagatgaagacagaggaagcccacagagtgactgtgatggcagacgagcttaccgaggagtggggagagctgtccatgtatgcgggcatggatgcttttttgtcgtacttttttgacgagagagtcgggattttggattattttaatccatcggacagccttatattcttcgatgagctgaccaggtgcgcagagcagggaaagcttaccgagaccgagttttctgagagcatgaagcagagacttacgatgggatatatacttccggggcagatgaacggtctttttacagagaaggagatagtggcaaagcttgggaagtattcgtgtatcgcactcggtgcgctcgataataaagcaaacggactgcaccagctgggaagctatggtattcactgtcagagtgtcagcccatacaataacagctttgagcttttgataaaggatttaaagcgctataagaaaaacggctacagagtcattcttttatccggttcaaggacaagggcaaagcggctttcagaggatatcacagatcagggaatcacatgcttttatactgaaaactacgaccatgagctttttgaggggcagattatggtctgctacggcaaggtgagaagaggctttgagtatcctatcctaaagtttgccgtgattacagagtctgatatttttggggcgcagcagaagaaaaagaagcgtcaccgcacctatgagggtgaaaaaatacagagctttaccgatttgtcggttggggactatgtagtgcatgaaaaccacggactaggtatttaccgcggcattgaaaagcttgaggtggacaaaaaggtaaaggactacatcaagatagagtatcagggtggctccaatctctatattcttgccacccagcttgacatgatacaaaaatatgccggaaaggatgccagaaaaccaaggctcaacaagcttggaggtcaggaatggaccagaacaaagaatagagtcagaggtgcggtaaagcagattgcgggagacctggtgaagctgtacgcacagcgtgagcagcaaaacggatatgccttcggcgaggatacggtatggcagagagagtttgaggagcttttcccttttgatgagactgaggatcagattcttgcaattgaagccacaaagactgatatgcagagccataaaataatggacagactgatttgcggtgacgtgggctacggcaagacggaggttgcaatccgtgcggccttcaaggcggtgcaggacagcaagcaggtggcatatcttgccccgacaaccattctggcacagcagatttatgatacgttttcgcagaggatgaaggattttccggtgaatgtggatttgatgtgtcgtttcagaagtccggcggagcagaaaaagacgatagagaagcttaaaaagggtgaggtcgatatcattatcggaacacaccgcatactctcaaaggatgtgcagtttaaggatctgggacttttggtaatcgatgaggagcagcgcttcggagtgactcacaaggagaagattaagcagatgaaggtcaatgtcgatgtgctcacactgaccgctacaccgattccgaggacactccacatgagtttaatcggcataagggatatgagcgtgcttgaggagccgccgatggaccgtgtaccgattcagacatatgtcatggagtacaatgatgagcttgtcagagaggcgataaacagggagcttgccagaaacggacaggtgtactatgtgtacaataaggtgcgcgacatagcagacataacagcaaggctgcaggagctggtgccggatgcgactgttgcatttgcgcacggacagatgaaggagacggagcttgagcgcatcatgtaccgttttatcaatggtgaaatagatgtgcttgtatccacgaccattatagagacaggacttgatatctcaaacgtcaatacaatgattatacacgatgcggacaacatgggactttcacagctttatcagctccgcggacgagtcggcagatctaaccgtactgcgtatgcatttctcatgtacaggcgcaacaagatgctaaaagaggtggcagaaaagcgtcttgcagcgataaaggagtactcagaccttggcagcggctttaagattgccatgagagaccttgaaatccgcggtgcgggcaatctgctcggcgcggagcagagcggacacatggaggcagtgggctacgatttgtactgcaagatgttgagcgaggctgtaaaagaggcaaagggcatcgaggatatcagtgataaatttgacacgaccgtggatattgttaccgatgcttatattccggcaggttatatcgcaaacgaattccagaagctggatatatacaagcgtattgcaggcatagagacagaggaagagaaggatgagatgctcgaggagctcatagacaggtttggtgaaccgccaaaatcagtgctcagcctgcttcgcgtggcaaggcttaaggcgttggcacatgccgtatatatcactgagataaagcagaccggctcactgataaagcttaccatgtttgagcgggcaaggataaatccggagaagataccggagcttattgcccagtataaatcctcactcaaattcaatatggcagaaaacccatattttacatttgatttaaaaaatggcagcgtggcaaagaagcgggatgtgcttgatgtggtggaggaactgatttcgcaaatgcgtaaggaactgattacggctgaatagttacccgaattttggaatcatgtagcatatagcataggaaacaccacatgctttacgcgaaattgacgataatttacaaagtttagaaaatgcttgccagcaggcccgaaaagctctataatatacgagcgatactataccaattttaaagaggatagatacaatgaaagcgaaaaaagtaatagccatgttattagctgcaacactctcagttacagcttttacaggatgtgcaataaataaaaccgcaacagttgcgacattagataaagaggatatcaagcttgggcttgttaattttatgataaggtaccaggaggccggttatgatgacatgtatatacagtacatgggcgagggctactgggacaagacagtatcaggcaataatactgtgcttgaaacatggaagaaaaatgctatcgaggaggctcatgagctttacacattaaaggcgcatcagtcagattacgatgtagaggtttctgatgatgagaaaaaggaaatcaaaaaagccgcagagaagtttatgaaggcaaattccgatgatgtgatagacgagatgagtgctacagaggagattgtcgaggaatatttagagcttcgcctcataaagagtaagatgtatgctgcaatcatcaaaaatgctgattcaagcgtgacggatgaggaagccaatatggctgcatacaccattgtgaagcttgattacaagggtgcatatgactctaattaccagtatcagacatatacagatgagcagtcagcacagataaaggcacaggcagatgcagtggtagaggcgcttgcaggaggatcatccttagaggatgcagccaaggcagcaggcactacagccacaacaggcacatacgccacatacgttgatccggatgcggagaagacagatgattcagataagaaatcagatgacacagagtctacagagagctcagagtcatcggacagcaagacaaaggacagtgtatacactacaaacaatcttgatcagagcgttgtagatgcactcaattcccttgaggagggacagacctcagacctcatcaccacagacagcacttactatatcgtaaggctcgacaaaaagaccgatgataaagcaacagagtcaaacaggaagactgtaaagggcaataaagaggacaaatattacaatggcatcctttcaggatggcaggacgatgaaaaatggtctgtaaagcagaagcagcttgacaagatcaagattcacaattattttactactaccaagaaggacaaaaaggcagcagacacaagtgctacagagagcacacagcagtcagaaagcaccaatagtacagatacagagaatactgaggcagtagatggaacagaaaactaatatcgtacttataggcatgccgggagttggaaagagtaccataggcgtaatacttgcaaaggtgctgggatacagcttcctggatgcggatttactgatacaggagcaggagggaaagcttctgcgtgagataattgaggaaaagggcacggacggttttatagaggtagagaaccgtgtcaatgcttctatcagggctgatagggccattatagctacaggcggttcggtggtatacggaaaagaggccatggagcatcttaaggagataggcagagttgtgtatctcaaggtttcttatgccattttggaaaaacgacttgcagacataaagggtagaggtgtagtattaaagaaagggcagactttagaaaccctttttgaagagcgctcaaaattgtatgagcagtatgcagacatcgaggtttccgaggatgggcttgatgtggagcagacagtagagaagctggtggaggcacttgaattatagtgcttatttatcgtgatatgattagataatagtagctgctgcgtcatttattaaaagcagcaccggcacaaatggcggcttaaatacgtcgtcataaatgaaatttgtagttggatgtataacaatagtgtaaattgagaatagtatattaggaggaagtatactcctgaattcatagaggtggaatatggaacagtacgtaatcaaaggtggaaatcctttatacggtgaagttgaaattggtggagctaaaaatgctgcacttgctattttggccgctgccataatgacagacgagactgtaacaatagataatttgccaaatgtaagggatatcaatgtcttacttcaggcaatcgaagaaatcggcgcacatgtggagcgcgtggatatacacaaggtaaagataaacggttcatttatcaggggtgtaaatgtcgataatgaattcatcagacgaatcagggcatcatattatttaattggtgcattacttggaaaatacaagcatgcagaggttgcgcttccgggaggctgtgatatcggaagcaggccgattgaccttcatatgaagggcttccgctctatgggagcagacatagacatagctcatggccttgtcatcgccagggcaaaggagcttaagggcacacacatatatatggataaggtttctgtaggtgccacaatcaatattatgatggctgcagccatggcagatggcaagactgttatcgagaatgcggctaaggagcctcatgtcgttgacgtggcaaacttcttaaacagcatgggagcaaatatcaggggcgcaggaaccgatgtcatcagaattgtaggtgtggagagattacatgctacagagtattctgtcattccggatcagattgaggccggtacattcatgtttgcagttgcggcagcaggaggcaacgtgctggtaaagaatgtcattccaaagcatcttgaggccaccacagcaaagctgttggaggtaggctgccaggtagaggagtttgatgactcagtcagagtaatatcagacggacatttaaggcatacacaggtcaccacacttccatatccgggcttcccgacagatatgcagccacagatggcggtgcttttgggtatcgctgagggcaccagtacagtgacagagagcatatttgagaatcgtttcaagtatgttgacgagctcaccagaatgggagctgatataaaggtagagagcaatatagcaatcataaacggcgtgaaaagatacacaggtgccagagtgaatgcacctgacctaagagcaggagctgcactggttatagcaggtcttgcagcagagggcatcacagtggttgatgatatctactatatccagagaggctatgaggcactcgaggagaagcttacaaagattggtgcaaaaattgccagggtagaggatgagaaggagcttcagaagttcatactcaaggtatcgtaatagatatatacgtaaagcatgaaatgtaaacacaatataaatgcaatatataaaataagaaccggcagcatcttaccgtagatgcacggttcttattttgggttattttataattttttgagtaactactccgtaacccttttgattataaatcggcttacatcacagatttgatgaaaaactcgcgttttgtggacaaatcaagtatactgccgtcatcaaaacgtacaatagggcgtgacagttcatgtgggttgagcatcacaatattacagaaccggctgtcgttgagcattacacggttgctctggtatgtggtagcaagctttttcaaaaacaaaagcaggaactttgtattgtactttgtaaaaccttcactctcaaagcttgatatgacagcgaacggacaaagtggcgcgcgatagcgtctggcagcagtcatggcatcatatacatcggcgatggctgttatcatggcaaagtcgtcaatcagtgagctgtcaagctgcgaaggatagccagagccatcacagcgctcatgatgcatgagggctgtgcgctttattctggagtcaatctgcagatccctaatcaaatcaaaaccaaactgtgggtgtttttttatgagcgcaaattcttcatctgtgagcttgtcaggcttgtttagcacatcatcgggaatcttgcatttaccgatatcgtgaagtactcctgcgatagtaagcgtattcacatctgtcttttccatatgaagccatcgtccgatcatccttgtaataagccctacattcagacagtgtgagtacaatgggtctgcaatggtgcgcatgttgtagagcatgtcaaaggtctcgattgtagtgccgcacgatgaggaaaggtcaatgacagcagtaaggagcgcagcctcatcaaaggatttttcaccggcacagattttgccaaaggtatccttgatttgatttatgcatgtgaggtatttgagctggaagcctaggaactcttctgaggcctgaacacgctggatgttggtcaccatctcatgtgcgcgggtttttggtacaggttttaccttgtctcgctttgctgtattttcgccggcttgcggtgctactgcataggatgggttttgaattgagatgctgcctaccttatatagcttcattttgttgatgagctgacgggtgagtggtgtgccgggcagtgcaagtatctgccccagaggggtctttatcggttctgctgccaccataccaatctgcgcatcttttatgctgattttaatcatgagttactccaaaaatttattttgatattgtgtgtttagtactataaatacaaatttaagtataattacaaaaattatgaaagtcaataaaggaagaaagaataattgcataaaatagcttataaataatgaatagggtatcgaaaatggattattgataaatctgtatcgaaaatgatacttgacatatatatcatgtggtagtaatatagctgacagagatttgaaaaattctatattgtaacttctcttattcagagtgatggagatacaaaggatctatgaagtcacggcaaccccgttagaaaacaggaaggtgccaacctgagcgagtaatcgaacaataagaggatttttattatcttaattttaatccacttatttgcagtaagtggtttttttattggaaaaatattggtcacatagtatgaaaggagcaacagataattaatggaaaaattattatttacatcagaatcagtaactgagggacatccggataagctttgcgatgcagtatcagatgccatccttgatgcatgcatacagcaggacccgatgagccgtgtcgcatgtgagacagcaagctgtacaggcttcatccttgtaacaggagagattaccacaaaggcacagcttgatattcctgcaatcgtcagaaaaacagcacttgagatcggatatgatgacggaaagaagggactcgacggaaactcatgtgcagtaatggtttcaatcgacaagcagtctgctgatatcgccatgggagttgacaaggcactagaggcaaaagagggcgacattacagacaacctcgacaccggagccggagatcagggaatgatgtttggatatgctacaaatgagactgaggagtacatgccatacccaatcgcactcgctcacaagcttgcattccagctcacaaaggttagaaaagacggcacacttacataccttcgtccggacggaaagacacaggtttcagtagagtatgatgaggcaggaaagccggtaagacttgaggcagttgtactttcaacacagcacgacgaggatgttacccaggagcagatccatgaggacatcaagaaatatgtatttgatccaattcttccaaaggatatgattgacgatgagacaaagttctttatcaatcctacaggacgtttcgtaataggtggaccacacggagatgcaggtctcaccggtcgtaagattatcgtagacacctacggtggatatgcacgtcacggcggcggagctttctcaggaaaggactgtacaaaggtagaccgttcagcagcatacgcagcacgttacgtagcaaagaaccttgtagcagcaggatttgctgacaggtgtgagattcagctttcatatgctatcggtgttgcacagccaacatctatcatggttgatacattcggcacaggaaagcttgcagatgacagaatcgttgaaatcgtaagggagaatttcgaccttcgtccggccggaatcatcaagatgcttgaccttagaagacctatctaccgccagacagcagcatacggacacttcggacgtacagatatcaagctgccttgggaggcacttgataaggttgaggacctcaagaaatatctctaaacaatatgtggggcttcgcgctttttaggttgtgagcgccggatagtatacattatatttcttagaaaaagttagaaagaatttagagaaaatttagacagaagttatcggatatatgatataattaagtcatgggactgacattgagtcggtttccatggctttttattttcaggaggaacggatatgagcagaattttgatagtagaggacgaggttgcaattgctgatcttgagaaggattacctggagctgagcggctttgaggtagaggtggagaatgatggcacaagcggtctcgcaagggctttggcggaggattttgatctgtttattcttgaccttatgctgcctggcattgatggctttgagatttgcaaacagattcgtgagaaaaagaacacaccgatactcatggtttcagccaagaaggatgatatcgacaagataagaggactcggactcggtgcagatgattatgtcacaaagccgttttctccatcagagcttgttgccagggtaaaggctcatctggccagatatgagcgcttgattggaagcgctacacctgaaaatgatatcgttgagattcgtggtatcaagattgacaaaacagcccgccgtgtgtgggtaaacggagaggaaaagcagtttaccacaaaggaatttgacctgctcacattccttgctgagaatccaaaccatgtatttaccaaggaggagctcttcaaggaaatctggaatatggattcagtaggagatatcgcgacagtcactgtacatatcaagaagattcgtgagaaaatcgagatgaacactgcaaagccacagtatattgagactatttggggcgtgggataccgttttaagctgtagtgatttttaaaaaatatagtagatattgtagtattaataggacatatcaaattcaaatgcgaaaggatatgtccttgttgtatatataaagtgacttattaatttattcaaatggagaatactatgaagataaaaacaaaacttgctatatcattctgcataattatttttgtgcctgttgtgctcaccagtatagtgcttgtgggtttcaataagattcagctaaaggccataaacaagacatatggcatggaggatgcgggcatgctcgcgctcactgacacggtgcagtttctgaacaaggtgacagggcgcacatatgatgagctcgagaagacatcgctcatagaaccatccaggcttcttgatagtgattatctgactaagataaataagaagctggagaagaagtattcatatctcatagtgaaaagtgaaggagagctcattttcaatggtggaattgacaatgatgatattttgagaaagcttccgcgaatatccaataagcagagcagctctgatgtgagcagctatatggacagtgatgacaaggtgctcataaagcagctcaattttcgtgacagtgatggtgacgaggcgagtctttacatagtgacatcaaccgcgtgcgtgatccctgaggtcaggactgttttgatagaaggagcatttgcacttgtattgatacttcttactacggctgccatgcttatagtgtggatatacaggagtatcatcacaccgatagagaggctgcgtattgccgctgaaaatatcaaggatggtaatctggactttgagcttgagacgagtccgagcgacggagagattggcgagctgtgtactgcgtttgagcagatgcgtgcgcgcctcaagaaaaatgccgaggaaaaggtgacgaatgagtctgaaaacagagtgttaatcagtaatatcgcacatgatttaaagactcctattactgcggtaaagggctacgccgagggcatacttgacggagtggcaaacacccctgaaaaggtcgataaatacgtcagaaccatttacaataaggcaaacgatatggataagctcattaatgagctgacactttactcgaagattgatacgaacaggattccatacaattttgcgaagataaatgtcacagattattttaacgactgtgttgaggaaataggactcgatcttgaggcaaaaaatatcaggctttcatatgagaatcatgtggatagcaacgtgcttatcattgctgatccggagcagattcgccgtgtgattaataatatagtcggcaattcggtgaagtatatgaacaagacacaaagctatatagatatcaggataaatgatgttggtgacttcatacaggttgaaatcgaggacaatggacgaggaatcaaccagagagatatgccatatatttttgacagattttacagagcggatgcatcgagaaattcggctaccggaggcagcggcataggactttccatcgtaaagaagattatagaggatcacggcggcaagatatgggctaccagcaaagagggtgatggaactaccatgtttttcgtaatcagaaagtatcaggaaacacaggatatgaaccgacagtaaacaaataaacaggatattgacataaaaagtaaagctataattataacagttagatattagaatttaaaattaagagctcccgattgacaacgcaaatagtgttgtcagtcgggagctttaattattggaaaatagtactgttattatacaatagcttcgatataatagttttcggtgccgtttataataggacgcagatataataaaaattaaaaccaaccacaacgtaaggggcgtaagtcacagagtccgggtgggcatgccacgctctcgcggacgcgaatagcggagcagcttagaagctgtagaattatgcccatgaaacctagaaatgtccagccatggacggctgggcaaggcgttatgcgccatggacggcgcataaaagccggtttcgtcaagcatagaaaaaccccaaggcataattcgtacagaatcttagctgcgaagcgtagcggaagcgagagcgtggcgtgcccacccggactctgtgacttacgccccgccccatggccattatgatacaaaattctgaatcctaaaataagttaaggaaaaacacataaaatatttgaaaaataaagtctgacgtagtagaatagtaacattgcacgaaagaaccatggagaaatcgaaagggggacaaacatgcataaattcagacaaaaatatataggagacaaggcattttataagcgctatctcatgctggccataccaatgataatccagaatgcaatcacaaatctggtaagctttctggacaacattatggtaggacagcttggtacagagcagatgtcaggagtagcaatcgtaaaccagctcatatttgtgtacaatctggctgtatttggggcggtgtcagcggcaagtatattcggagcacagtattttggcaagggaaatcataaggggcatatgtattcctttagattcaagctgtatgcagcgctgcttgttacagcaatagcgatgacactgtttatcacgaacggaacaggtttcatatcactttatctgacagatacggcaggaaacggtgccacggaggtagcactggcatatggaaaggaatatctggaaattgttatgataggtctcataccgtttgcggtgacacaggcctatgcgacaaacataaaggaaacaggacagacttttgtaccgatggttgcaagctttgcagcagttggaagcaatgcggtgcttgattttctgctcatcttcggaataggaccgataccaaagctgggggtggcgggagcagctattgccacggtgatgtcgcgatatattgagacaataatagttgtgctgtgggcacataaaaacagggataagaacagatatctcgagggcgcttacagaggaataggaatgccgtttggtgagtttaagactatattcatcaagggactgccactcatgctcaatgagcttttttgggcagcaggcatgacaacggttacacagtgctattcagtacgtgggctctcggtaatcgcaggtttaaacattgcgacaacgataacaaaccttttcaatatagtgtttatacagcttggcgcatgcatcagcatagttgtggggcagtatcttggagccggtgagcttgaaaaggcaaaggatgcggataacaagatgatagtgttcagtgtgttttgctgttctataatggcggcggtcatgcttctggtaggcggacttttccctcagatatataacacaaccgatgaaatcaaatcactcgcaacaagcttcatagcggtatcagcgataattatgccgttttgtgcatttacacattcgtcgtatttcacactccgctcaggcggcaagacactggtcacatttctgtttgactccgtatttacgtgggtgatagtggtgccggtggcatttgtgctcgccaaatacacagcacttggcatagtagcagtgtacttccttgtgcaggccacagagctgataaaggtagtcatcggatacttcatggtgaaaagcgacgtgtggctcgtgcagatggtataggaatgtaagtcattatcttgcggaaaagtaaaataaaagttatactgtagcaaaagtcagcataacagttctaacccagaatgaaacggagcataaaatgagcgaagaaaaacagcacaagcgccgcgtacattatagcggaaaatatcccaaaaaatttgaggaaaaatacaaggaattaaacccggaaaaatacaaggatacaattgagcatgtcatcagcaagggaaatacccctgcgggcatgcacatatccataatggtaaaagaaatcatagattttctggacataaagccgggacagacaggctttgatgccacactcggatacggtggccacacaagggcaatgcttgaaaagcttgaaggacagggacatatgtttgctacagatgttgacccaatcgagtctgaaaagacaaaaaagcgtctcgctgaagcaggctttggagaggatattctcaccataaagcttcagaacttctgcacaatagatgagattgcaaaggaagtaggaggctttgatttcatacttgccgatctgggagtttcatcaatgcagatagataatcctgagcgtggattttcgtttaaggtggatggaccgctggatctgcgtcttaatccaaatgccggtatcagtgcagcagagcggcttgataatatatcacgtgaggagctttcgggtatgctctatgagaactcagatgagccgtattgcgaggagcttgcaaaggcaatcacagacgagatcaggaagggcaaccgcatagatacgaccacaaagcttcgtcacattatagagcagacactcgattttctccctgaaaaggataagaaggacataatcaaaaagacctgtcagcgcacattccaggcgcttcgcatagacgtaaaccatgagtttgaagtgctatatgagtttatggaaaagctcccgggagcattaaagcctggtggaagagctgccattcttaccttccattcaggagaggacaagctggtcaaaaaggcactcaaggcaggatataaagcaggaatatacagcgactattccaaggatgtgattcgtccatcagcacaggaatgtgctcagaacggacgtgccaggtccacgaagatgcgctgggcggtccgtgcggaatagaaaagaataaaaatagttctaaaacactattgctttattgagaaaaatagtctactatgaacgtgttatatgactgacggataagtggaataaccacatgaaatataacaaataagagccgaccgtctgggcgataaacccggacagttggctctttttgattataaaatcagccatagtcgtataaataaccagggaatgtatctcaaaagaaacaacagggatattgacaaaaatactgtagtaagtatatactaaccacagttaaacgaaactaatcaaacgaagtaacattcatacattttaaggaggatattacaatgatagaaatgaaagagtgggatggatttgaaggacgtctttggaaagaggaaatcaacgtccgtcagtttattcaggacaactacactccatacgacggagatgagagctttttagctgatccgacagatgctacaaacaagctgtgggatgcgcttcagaaattacagaaagaggagcgtgccaagggcggagttcttgacatggagacagaggttgtaacaggaatcacagcttacggccctggatatatagatgagtcattaaaggacctcgagcagattgtaggtcttcagacagataagccgttaaagagagcattcatgccttacggtggaatcaagatggcggtacaggctgctgagacatatggttacaatgtaagcgacaagctcaaggagatttttacaaaatatcataagacacacaacacagcagtattcgatgcatacacacctgagatgatgaaggtccgtcatgcaaagatccttacaggtcttcctgacacatacggccgtggacgtatcgtgggcgattaccgtcgagtagcattatacggacttgattatctcatcgaggagaaaaagaaggataaggcaaactgtggctgtggacagatgacagatgatgttatccgtttaagagaggaaatcgcagagcagattaaatgtcttgaggatatgaagaagcttgcagagatttacggatatgatatctcaagacctgcaacaaacgcaaaagaggcagttcagtggttatacttcggataccttgcagcaatcaagacacagaatggtgcagcaatgtcagtaggacgtgtatctacatttcttgacatttacatcaagagagatatggacaagggcatcctcacagagcaggaagcacaggagctcatcgaccattttacaatgaagcttcgtatggttaaatttgcacgtatcccttcatacaaccagttattctcaggtgatcctgtatgggcaacacttgacgtggcaggaacaggtgtggacggacgttcaatggttacaaagacagacttccgtttcctccatacattagagaacatgggacctgcaccggagccaaacctcacagtattctactcatcaaagcttcctcagaccttcaaggattatgcagcccgcatctcaattgagacaagctcaatccagtatgagaacgatgacgcaatgaagccggtatggggcgatgattatgcaatctgctgctgtgtatctgcaacacagacaggtaaagagatgcagttcttcggagcacgtgcaaaccttgcaaaatgtctcctctacgctatcaacggtggtgttgatgagaaatcaggcgagcaggtaggaccaaactacgcacctatcacagcagagtaccttgactatgacgaggtaatggcgaaatacgacaagatgatggactggttagtagacatctatgtaaatacgttaaaccttatccagtacatgcatgacaaatactactatgaggcagcagagcttgcactcatggatacggacttaaagagaacattcgcaacaggaatcgcaggattctcacacgtaatcgattctctttcagcaatcaaatatgcaaaggttaaagtagtacgtgacgagagcggactggcgaaggatttcgaaattgagggagagttccctaaatacggaaacgatgatgaccgcgcggacgaaatcggtgtatggcttcttaagacattcatggacaagttaaagaagcatcacacataccgtgattcagagcctacaacatcaatccttacaattacatcaaacgtagtatacggaaaagctacaggagcaatgcctgacggacgtaaagccggagagccactctcaccgggagcaaacccatcatacggcgcagagcagaacggacttctcgcatccttaaactcactcacaaagcttccatatgagtgggcacttgatggaatctcaaatacacagaccatcaatccgggagcactcggaaacaacgagggagagagaatcgacaaccttgtaaacgtaatggacggatacttcgatcagggtgcacatcaccttaatgtaaacgtattcggtaaagagaagctcatcgatgcaatggagcatcctgagaaggaggagtacgcaaacttcacaatccgagtatcaggatacgcagttaagttcatcgacctcacaagagagcagcagctcgatgtaatctcacgtacatgccacgagagaatgtaaaaaaaaatatccaacattccagaatgtgcaggccaagtgcctgcatattctgattttctaaataacaccacagcgtaaggaattttcggaaggtgtgtaaaagccggtcgcgtcaagcatagaaaacctaaatcataattcatacagcctcttagcccgaagaacctgagcattgctaagtcccggtcggcgggttgccgaaaattccgtaccataaaataaaagtagtagcaacaacctaggaggagaaaataagtaattgaatatattgttaaatgtgattaaatgtgtttaaatatactcaaaggagtaaattattatgaatacatcaaatatcacaaattataagccaaaagattttgctgaactgttaggtgtgtctgttaagacattgcaacgctgggacagagaaggaactttaaaggcaaatcgaactccaactgataggcgttattatacctatgaccagtaccttcaattcaaaggcataaatattgaaaatgataaacgtcaggtagttatttatgccagagtgtctacaagaaatcaaaaagatgatttacagaatcaagttgcatttttgcgacagttttgtaatgctaaaggtattattatagaccagtgtattgaggattatggaagtggtcttaattacaatcgtaaaaagtggaatgaattattaaatgaagtaatggaacagaaaataaaaaccataatggtaactcataaagatagatttatcagatttggttacgattggtttgaaaaattctgtatgaagtttaatacaagcattgtggtagtgaacaacgaagaactatcaccacaggaagaactcgtacaggatattgtttctatacttcatgtattctcttgcaggttgtatggacttcgtaagtataaaaaacaaatagaaagggatgaggaaattgctaaagagcttcaagacggaaataaatccgacgattgagcaaaaaatcaagattaacaagactattggcacttgtaggtacgtctataacttctatctcggtcacaacaaaactttatatgataacggtgaaaagtttatgactggcaagagtttcagcgtatggcttaataatgagtatattcctaataatcctgataaaatatggattaaagaagcatattcaaaagctgtaaaaaagtctattgaagatggatgtactgcatttacaagattttttaaacatcaaagcgcttttcctaatttcaaaaagaaaggtaaatctgatgtaaaaatgtatttcgtaaagaacaatactaaagactgtagatgtgagagacatagg

SEQ ID NO: 1450 - DNA, 24535 bp, Unknown
  gut microbiota DNA sequence
gtaaaaccgacctttgacatcccttcaataaattactttcttacaaaaatgtaagatacgaggtcgaaatgtaagctgattcgatagcatacattccggcattttgttattataattacatgaagcatcaacaatgtaagttgtgaagccgattatgacgtcatattaaaaataaaggtaacaaaaatagaagtttaaataacattttgaaatcatcgtaaaggagcattgaaacggcaatcttagaagtaagtaacctcaaaaaaatatataccaccagatttggcggcaatcaggtacaggcattgaaaaacatcaatttctctgtagaggaaggtgagtatgtggcaatcatgggagagtccggctcaggaaagacgacacttttaaatattcttgcggcacttgataagccgacagcgggagaggtactcttaaatggaaagaaccttgtctcattgaaggaaaaggagatatctgccttcagacgtgagcatctgggcttcgtatttcaggattttaatctgcttgacaatttttcactgaaggacaatatctttttaccgcttgtgctgtcaggtgtggattatagggatatggaaaaaaggcttgcacctatagcttcgctgcttggaattgaaaaactgcttaataaatatccatacgaggtgtcaggaggacagaagcaaagggcagcagtggcacgtgcgataataacaaatcccgaattaattttggctgatgagccaacgggagcactggattcaaaggcaacagatagtttgcttaggctgttcaacaggataaacgaggaaggacagaccattctcatggtgacacacagcacaaaggctgcaagtcatgccaacagggtgcttttcataaaggacggtcaggtgtttcatcagatttaccgtggcaatcttacaaatgacgagctctatgtgaagattcaggatgcacttatgctgattacgacaggtggtgagaagcatgaataaaatatatagcaggctggcatttacaaatataaaaaataataagacgctctatatgccttacattatatcgggaatggtcatgatagccatgttttatgtgatgatgtttttaaacaactcaaagggacttggcaaggtgccgggtgcggagatattggtggatataatagggcttggatgcggaataatagcgattttttcatatatatttctgttttatacaaacagctttatcatcaaaaggcgcaagaaagaggtaggaatatacaatattcttggcatggaaaaacgtcatatcgcgagagttttgataattgagacacttaccgtagcactcgcagcaatagcatccggaattatagccgggattttattttccaagctgatgattatgtttctttataggattataaatattaaagcacaaattaatttcgctgtatctactagcgctgtcgtaaatacaatacttatttttggagtgctgtattttcttactctcatctataacctgatgcaggtgaagcttgctaatccgatagagctgcttcgcggtggcaatgtcggtgagaaagagccgaagagcaaatggcttatcgctataatcggactaggctgtcttgccgggggatattatattgcgattaccacaaagagccctcttcaggtgctttcactgttctttgtcgcagtgcttcttgtcatcgtcggaacgtatcttttatttatttcaggaagcattgtgatacttaaggcactcaggaaaaacaagaagttttactataataaaaagcattttgcggcggtttcagggatgatttacagaatgaagcagaatgcgggcggactagcaagtatatgcgtactttctacaatggtgctggttgttgtttccacaaccgtgagcatgtatgcgggcatggagggagaacttaagcagagatatccttcggatatcagtgtatatagctggtataaggaagtgccggctgatgtgaatctggatgatgcacttaaagaagctgctgcagattcggataaaataatagctgactctgcttgtaatgttaaagacagcaaaagctacacttattttagctggacagtgtttagagaggggacagagtttaagccggtgttaagtttcgataacgatatttccctgttgtattttgtcacaggagatgaaattgatgagatggagaccggctttaaagagaggctgaataaaaaaatcccacagcttgataccggttcggtggctgtttatggaacagaaaagtttaatggcgatataattaatctgttgggaaaagaatttaaagtagctgcggcagaaaaaactgctgtaagtaaagacagctatatgtcctctatgtatagtggtgtgtactatgtagtggtagacagcaaggcaacacttgcagagatatttaacctgaacagctcgctgggaggggatagtgtgccgactatgctcaacaatgaaattgattataatctgtatggcagcagtgaggataagcttgctgtggcaaaggctctggataagcattttgaggaaaatagtgtaaaatcagatgtgtcaggcttctatgaggaaagccgtgatgcaaacagagaacagatttatgtattgtatggtggcctgttctttatcggaatattccttggaacgatgtttcttatggttactgtgatgattattttctataagcagatttcagagggctatgatgacaaagcacgctatgagattatggagaaggtgggcatgagcaatgacgaggtgaagaaatccattacttcacaggtgcgcatggtatttttcctgccgattatccttgcagcgtgtcatcttgcagcagcatttcctctgcttcgcagactgcttgtcatgttcaatcttacggatattaagttaattgcaatctgcatgtctgctacgtttttggtgtttgtggctatatactatattgttttcaagattacttcgagagcatactacaggattgtgggaaaccagatttaggggtttcatatgaattatgaatgcgctataataggacatagcaatgatgcataagaatatagagcgagaggaacaagcagtatgagtatgacagaaacaattaaactatacgacagggatgcatatgccatagaatttgaggcagatattatatcctgcgagccgaacaaagcggatgataagcagtttgatataatattaaatcagactttatttttcccggaggaaggcggacagagcccggacatgggaatacttggaggctacagggtcgttgatgtgcagattaagaatggagtcattactcatacggtggatatttccgcagatgattgctgcataatgggcaaagaagaggctcagacagaaaagaagactgatggacagattacaggtatggagtgcgcttatgagaaagctgagcttgcagcaggcgtccacgtacatggcaaaatagactggcagcatcgtttttataatatgcagcaacacagtggagagcatattttttcgggaatcgtccaccgcaggtttggatttgagaatgtgggttttcatctgagcgattctgtagtgacaatggatttcagtggagcgatttcaccggaggatatagcagaggtggagcatgaggtaaatgtagccatttcaaaaaatattccgatagaggtgacatatccgtcaagggatgagcttgcgcagctggagtacagaagcaaaatcgagattgaaggacaggtcagaatagtgacagtgccggggtatgatgtgtgtgcatgctgtgcgccgcatgtaaagcgcaccggcgagattggtatgcttaaggttatgaattatcagaattataaaggaggcgtcagaatcagcatcctttgtggtttcagggcactggaggctttcagacaaaagtgcgacatcatatcagagctcatggggatatttaccacaaatcaggaggctattgtggataacgtcacaaagcttaaggcagtaaaccagtcacttaagtcagagcttggtacagcaaagtcagctcttttggattataaggtagcagagcttcctgctgatacggacaatgcagtattgtttgaggacggcattgatacgaatacagcaagaaattgcgtcaatggccttgtggagaaatatagtggctttagtgcattttttacaggaaatgatgaggcgggctatagctttattatcggaagcaagaatgcagactgcaatacagttgccgcagcgctgagaaataagctgggtgccagaggcggcggtaagccggttatggtgcagggatctgtcaaggcagcaaagagcgagattgaggaagtgctaaaagaggtgctttaactttttgaaaatatagtttgtgggacggattaagaacacaaaagcggtttcaggacattgcgtcctgaaaccgcttttattgtaaaaatcatatacaaagttaattatttgttagatcttctccaaatgtgcatcttctcagcctctttgatgagctcatcacggaaatcaggatgagcaacagagatgattgcctcagccttctgccatgtagaaagaccctttacatttaccataccatactctgtaacgatatagtgagtgttggctcttgtgtcagtaacgacagaaccctctacaagagtaggacggatacgtgagtgaactacgccctgcttgtcggtgaaagttgaagagcagcagataaagctctttccaccgtttgacatataagcaccgagaacgaaatcaagctgtccgccggcaccgctgatgtgctttgtgcctgaggtctctgagctgatctgtccgaagaggtcaaggtctacacagttattgattgagatgaaattgtcaagtgcggcaatattcttgatatcatttgtgtagcttaccggggcactcatgagctcaggattctcatcgaggtaatcgtacatcttcttggttccggcaccgaagccgtaagcctgacgataacggtcgatgtttttctttgctcctgtgatttttccggcctttgcgatgtcaacgaatgcgtcaacgtacatctctgtgtggacaccgagatccttgaggtctgactcagcgatgagtgagcctactgcgtttggcattccgccgataccgagctggagacaggcaccgtttggaatctggtcaacgataagctctgcaaccttcttgtctacatctgttgcaggaccaccggcaccaagctctccgattgcagggttgtcaccctcaacaatgtaagaaacctgtgaaatatgtacattggcttctgaaccgccgtgacagcgaggcatgttttcattgacctcaacgatgattttctttgaagtctcgcatacagcaccgaggtgagatgcgttaggaccaaagttgaagtatccgtgtgaatccatcggtgcaacctggaacatagcgacatcgtcaggtgttgttgaatctctataataacgaggaagctctgagtaacggattggtgagtagaaagaacagcctctcttgataagctttctctcataaccgcccatgtgccatgagttccatgtgaagtgctcgccggcatcctcacgctcgaaaatggcaagtggcttaagcaaaataccaccacgtacattgacatccttaagttcatcagttcttctggcaagtgccttgtcgagggcatcaggtgtgcctgtgcaccagccgtagtcaacccagtcgcctgatttgacaatttttactgcctcatctgctgagacaagtttctgcttgtactcttctaaaaagctcataaaatcctccttagatacctaaaatgatagtagcaaaatgctacgttaaaaaaataacaaaccctataatctctatattatcactttagagaggattttacaagttggtaaatgctggtagagacttttatatgacagcctctgctagtcaccctccggaagcatccattcctcagcctgcttctggtaatcggccgcctggctgcgcagtgaatcaatcagctccttatcgcctttaaatacattccttgatttaggaggaagcgaatcaagctttttctgcttctcatcagcccatcttgagtagcactcagacagggcatgaagcgccttgccaccgccgcactccacatcgagtaccggctttgtctcgaatgcagcgttgtaataccacaggcttgcctcctcatagtctgccttgtcgaaatagtacgcaccgagctcacagcacacctcgctgcagccatcaactgctacattttttagggcaacagaaaaaaatttgtcatagtcgccattcatgcgatagtagcgtgatagcacgcaggtggattcgatgtcggggctgttgcggtattcaccctgaaaatatggcagggcattggtaaaatcctcggggcttccgcattttaaaagctccttggcatacatagtcgctatactttttggcagggtgccgtttctttcaaaggagcgcttgaatatggtaaaatcacgtttgccgtgagtgccctgcggcagatgttgtatacagatatcgctgtcatagactacaggctctaagcgaaccgtttcgtgcaccggattaatccatgtaaacgtgcgaagcctcttgaacagcttcgggcgatactctgaggatgaattttgcactgtgttgaatttgcttggagtaatgtatttcatctggacaatctcaatttccggcagcagcgcagccttaagcatcatgaaacgcctgcggttggtatcgtcgagcacctcgtcggcatcaggtgcatatatgtattcctgcgtagccttggaaaacgaaaaatttctggccgcagcaaaatcatcgcaccatgagaaatcatagattttgtccgtataccgtgcagctatctcctttgtgctgtccgtcgagccggtgtccactatgatgatttcatccatcagccctttgagactgttcaggcaacgttcgagcacctcttcttcattttttactatcatgcataagctaattgtaatcatatttatctccatttaccggtcggatgttataatagttacgattatattataatatatatatcggcatgttttgcagaaatatttgtgtattgtaaatattgccgggatttcatataattaaaatggaatgttggaattatattagaatttggagggaaagactatgagttcaaagaatatagatataaaaatatcagaagatttagtaccttatttatatatactaaaaggtggcgaaacggtaagtgataagcttacattatcagcggtggtaggtttgtttactactaaagttattactttagaaaaagctgcggagttgacaggcaaaagtatatgggattttatagatattcttaaggtatatggtataccatggggagaatatgaggaggatgacatggatatggatgatgtttttttgagtaaattgggggaaataatggatgaaaaaaattgacattatatgcaataccagtcctattataggtttgatttcgatagatagattatatttattatgggatttatttggaagcattataattccggaagctgtcttcaatgaattatgtgcagattctgtaaatcatcaggatgaaattaaaaggattaaagagtgtgttaattcaggaaaaattatcatatacaaagtaaaaaatgcggatacagtaaaggcattatatggaagattgcattttggagagcttgaagttattgttggtgcaaaagagcttggaattgattttgcaataatcgatgagcatgctgcaagaaaaatggcatcggaatttttaattgatacaataggcgttttaggaattttgagcttggcaaaaacaaaagggttaataaatttagtaaagcctgaaatggataaacttatttctaaaggctatagaatttcagataaactatataatcagattttagcaaggaataatgaagtaaattagaagaggaacaaacatggaaaatcatacaattgtaacactgaaaaaaggcgaaggacgcactataaaggcaggtggcgcatggatttttgacaatgaaatagacacaatcacaggcacctttacaaacggagatattgttgtggtacacgattttgacggatatccgatggggcgcggcttcataaaccagaattcaaaaatccgtatcagaatgatgacaagaaaagcagaccagctgattgatgacaatttcctcaggatgagagtgcaaaatgcctgggattatcgcaagcaggtgatggcaggaggcaatgataatgtgtctgatttaaactgctgtcgtgtgatatttggcgaggctgatttcctgccgggtatcacagtggacaagtacgctgatgtgcttgtggtggagtgtcttgcacttggaatggagcagtttaaggtgaaaatcgttgaactgttaaaggaagtgctggcggcggacggaataaatattcgtggagtatatgagcgcagtgatgcaaatgagcgcagaaaagaaggtcttcctaaggtaaaaggttttataggagccgagtttgacacaaatgtggagatagtagaaaacgcagttcactatatggtcgatgtggaaaatggacagaaaacaggcttcttcttagaccagaagtataacaggcttgctatgcagcgcatctgcaaggggaaaagagtgctcgactgcttcacgcacatgggtacatttgccctcaatgcaggaattgcgggggcaagtgaggtcacaggacttgatatatcagagtatgcggttaagcaggctacagaaaatgcgaagagaaataatctctcagacacagtgaagtttcgcgtggcaaatgtgctggatgagctgccacggctcgctgcagatggtgaaaaatatgatgtagtcattctggatcctccggcatttacaaaatcgcgcgaggctaccaaaaatgcgataaagggctaccgcgagattaacatgaagggacttaagcttgttaaggatggtggatttctggctacctgctcatgctctcatttcatgacgcaggagctgcttgcaaaaacggtcaaggaagcggcaaaggccactcacaagaggctgcgccaggtggagttccgcacacagggaccggatcatccgatactgtgggccaactcagctaatgtaccggagtcgtattatcttaagtttttcattttccaggtcgttgatgagaagtagatgacagaaagtggcggaaatgcttgatttacgagggctggaaggtctttagtgattagcttgcaaaccttgtaaagtatcgcaaaatatcgtatcacagtggtataaagttgtaagaaaaatggtaagtctgagtggcaagcacctgaaatgtaatgggggtaaattggaatgacaatgacaccggagaaggttatgtgttcgcttttcgtaatacggaaatttgtagtatagatgtagcgttttgtggtatactatagaagaacaaatacctttctgcgaaagggaaaggggaaaggatacgtgtatgacagttgatagaagagtaagcagtattgaatccagcttcaaaatggaaagcatgccatttgatgcagaatgtcgtcaaagagtaagaaatgtcttaaccaagaaagtttctgctacagatgcaatttcagaattaaataagaaatacagagtatccaagaagcaggttgaaggatcaagagtatgattatttctatgaggatgaacaggatgccaagtactgttatccgggaataaatgtattaaagaataaactggatataagagatttagatacattgcatgaggctgaaagagattattcagcggtgcgtcaggcagaacttgtaggtcaaggcgttactggagatttctcttttaagcatctttgttctatacataagcatttattcagtgatgtatattcttgggcgggcaagacgagaacggttgatatttccaaaggaaccgttttttgtttggtgcagtttatcgaaagccagtttgatgatttgtatcgtaagctgaaaaaggaaaatttcttagttgacataaccgataaggaagaaatgagcgagagactagcctattacctgggtgagattaatatgatccatccgtttagagaaggtaatggaaggactcagagaatatacattgagcagttatgcttgaacaatggtagatttgaaattgattttaccgatgtttcaaaagaagagatgatagccgccagtgtcagatcggcaaatgccagcaacgatatgttggaagaactgattagtagttgtcttgttgaaaaatagttttagagaaggtagaattgttttgcatcagttattacggggatgcagcatgaaatatttaaggattcatgatatgtataaaagtgattgaagtaaagatgtagtatgagactttttatgattattggtttatatgtgggctacaagggtgcaaccattgcccggttagtggcggcttgccactaagtactggggattatctggcgaaatagccgcaggtttgaaatagcggctttgctgaaaaaagagaatacaaagacctgctcggaagaagcttcgtaaagtatcgcaaaatatcgtatcacagtgttataaagtggtaagaaaataagagacggcaaatcgtcaacaagttgttggcaatttgccacatttagttgtatgttgtagttattccacttttgtgctgtggtctatacctctgcctcagccatgataatctcagcagcatcaagtatgagctgtgaagttttcatgtgaagcataccaggctttccctgataggattgcctgatagaatgtccatgtttgtcctcatttcttctgttttagtgtaatgtaacagtagtataacccataatgtggatttatgccacagttgttttttattggggaaagaaacaaatattgtaaattaaaaacaccaaaagttatactaaagatgttatagaaatataggggcaagtgtaaatgataggaattgcaatatgcgatgaccatacagactacgatgtaggaaatgaaataataaacacaattctaaattactatctgtctccaataaagtctgcttgtaaaataaccgttcgtcgaaaaaatgaaccgttcgcagaaaatagttagcatataggcggaagatgggataaactagaagctttcctgctctgcttctagtttatttttttgtaggtgtgaatatggagaactacacattttggaggataagatgattcaatatttaggtgagcataaactttttaatgaaaaatacattatatttattttattttgtatattcttaattgaatttaaaaattacttttctcataaaaataaagaaaaagggtatacattggtgatttcgttaatgtacttaggggaggcaatattatttttaatgccttatgagaattatattgttgatattatgtgtacattatttggaatagtgttaattttatgcttaatcttgagatacaaaagtagaaaaggatagaaatgagtagtataagaatatatgaaaataaaacgtttaaattaaataatttattaaaatatgagctgcattctgcagatgagaatgtaaaagctttacatagagtcgggactgtctgcagacgggaatggcaaaaataaaacaaagagaagaggcgggataaaaatgtataaagtattatatataggatttctgacttttcagttaatatctgttttttgtaatttgaaaagtttaaaaaaagacatattggaagctcataatagcaggaaatttaatattataggaatagtatgtcagatcatagctgtaatatttattatgatcattctaaaaatgcaggggtgaagagtgaaaaaatatatcgtacattttattatatggggactaggtataattagttactatatattagacaagacaacgaccggagatgagtttcagaatattagcgtattattaatcggatgtttgatgttttatgcagtgtattatatttctatgatatcagaaattaagaaaattgaatgtgaattgaatgaatcgggaatatttggcggacgtggcatgggaattttaataaacatgtttagcttgcagtatatatttgaactttataagaaaccattagtttgcattgttcttatagtattttctgctattgtgctgatactattacgtaaatatataaaatctttttggtcaaaaaatatatggagtagacaatttttacttatttttattgcatttaatgtattggcgagttctataggcagtgttcttggttataagtgggatgatattttgttggttaatgtagaaaatgtatcaaacgtaacaaaattgattcttataatattttatattgtgatttttaaaaatacagagttgccaaacagtttttttataagatttgcttctaaaaatgaggctttattaaacagaaaaaattagaaaataagcttttaatatatagcatacgaagggataataatggagcaagataagcgcgtagaagataaaaaagctagatttatattattaataacacaagtggttttatggtttatggtgatggttatggaaatggttgttttgatagttaagcagataaatgtatcggaacatatgctttttctggtgtctataaatttgattacaatagtgactattttaataaatgttcacaattataggaaaaacaaaaagaggatgtaattaagtagatatccatactatacaagaggtaagtgctatggaatgttaattggaatcattcaaagtgaatggtgttatagaaaaatcagtgaagaaacaaatttgagtaaaatagacatattgtaaaaaaaggggagaattttgttgggagcgatattaattattattgaaatagtgattagaatgttgtatccgtcaatgtttaaactttatgcagctttgttttcaaaatgaccggaagtatattcataaatgtgtccaccaattcgttgatttttcatctgaaagttcggtcacatataattgtgtgagcatatgttcgtgtgtgacctactttattaattttaaagtacatgaagggagtaatgaatttgaataaagagattgttgaaggaatgttcatagctcttatttttattgcgggatactatttagtaaagacgaaaagaattaatattttgtggaagatattggcagctgtgaatatactttcatgggcgtgtttattagtaatattagcactggatataaatgtaagtgatgattttatatccttaaatttagcagcatgtatgtcgttggctatttttacaccaataatatggttttctgatagaaaaaatatggatatctacagtttatttggaaatataggatttgtattagtgcttaacaaggaagtaaatcaaataaaaaatagtgccagactaaaagaaaaccttcagaaaattctaggtcttgattgttatcataagacatggatcacaatatcgaaatcaaaagatgaagaaattacattgactatgttatttttcagtaaaaaggaatttgcctgctttgaacgaaaaattgataagaagtatatagtagaaaaggaaaatggatttggaacattggttactatgcaaatacgaggagatattatatggaaacgataaaaatacagcacttatttggtagattttctatatttttcttggtgttaattgtggcagtatttgctgaggaatattcaattaataggttgtgcttgaatataaatggatttccatttatttttatgaatgcatttatgattgtaggaatagcatatatttatcaaaaagcaacaaggaaattattcataaaggaatttgagtatgagatatatgaagatttcttctatattaatgggaataaatatgaatatcaagatgtaataaaatgtgaaattcattatttcgattatttttttataaatgtattgtgtttacatatagacatgaaaaacacttctaaaagcaccattttgttatattcagaagacttggatgaaggaatagactgtaaagacattcaattgtttaagttttatgaatcagttagcaaacatttgagaatcagctaactattgacagatagggatgaaagaaaataataggcttgccaggatataattagtgagcctattatttaatgtggtgtttttgcaggagtaatataccgcggattttcataacaatactgttaccctcctagattttgttctaatttttctctactccattgataacttactttttttaacaatccatcgttttctactactacctttgcaatcacctcccccttttcacatatataataaataccattcgtttcatataacacgtcaatttcactgagctgatatcttttgtatatagaattattttcttgaacaatttgtttaattaaatcatctaaattatcttcattttttctgatatagtatacaagagtgaaatcaccttcatgtttataatcatgctcgtcatatatggacgccgcctcaaaataatcatattcgccaaaattcaatccataataatccaaaactctatcaaatgtattatttacacctgatgccgaacccatcataagacaaaacaaaccaaaaaataatgtccaaaaaacatatataagacaatatatttttttactctttatattttctctatcacgatgtcttccataacaaatcacatccgtaatttgctttgggaaaaatagcgtgataaaaattgaaaatattgcatataacaatcccataacagtttctcccatttcttattattccatcattcattttaattatatcatttataccatgcttcgtccatttttatctaaatacgctcatataaaatttaggtacaaaacaaacccaaaaataatgtcaaatgctttgaaaaagtgtcaataaaaacataaaataataaaaaagttttgagctaattgacaattgtttaattaatatatcttgtgataaaatatccgcgaagataatggagtgccattataaggaggtattcagaaatgaataaaataataaacaaacaagttcttgctacgtttgcattagttactatcatggcaggagtgttaataggtactaattgtatttatgcagcgcaggacggaaaagagacaacaactatccggcttataaaccagacttattttaatgttaagaatatcgaggtaacctggaacgatggcaaagagcagactgtcaatacacttggcagccatgattcaattaatatctcatcagatgctgcaagcgtatacaacatggatgttaccggaacaacccagtccggagagaaattcaccggacattttaagggattggtcggcaaagatacaagagtatttatagagcttgacgagaatgctgatgttcaggtatttatcccacagggagaaattgattaagcattaattattgttctttaagatccgccagagtgtgcttcggcttatgccgagtcgtctggcggttttttctttattgtcatgttcttcgtgtaacacctggagaatgatctgataatttatctcatctagagttccctcaaatttaactgaatcatcaaagacgcgtccgtagtcgggttcctgtttcaggatagtttctacggtgtcacaggagatatatggtgtctttgttattgtgacaagctctttaaggacatgctgcagctggtcgagattgttaggccagttgtacgagagcattttttccattgcgtcaacgtcaaagcctattatctgtttcccgagggagacattgaaccggtgcagatagagcgcggttataccggaaaaatcgtcaatgcgctctcgaagcggtgggagattcatggtaaggcaggaaagatgattctccatgaaagtgcgtattgtagcaaatgcaggctgtttggagttgttggtagaaagagagactatgagcctcattctcgtgcaaagcttcgtctggtctatatattgaaacaaatcaccaatttgttccagactaagagcatcggctttttcgaaaaatactgtactgttaacttcattgagaggggaattttcattgtttagcagactgtgccacttacgctcttttatcagagagcagtcgatactgtaaaatggagcatgcttatagttgctttgcttgtaaataagtgatgcagccttgcctttgccggttccgttttctccgagaataagcacaggcagatggcttttagcgtattcttctattatctgcgctattttgcctgctttaccggttccgttgtaagcgtcagcaaagtcgttggaggaggtgttgtcaatattgtaaatctgaaatccagggtcgtcctcggcggttaatgcaggactcttacatatagtaattgcagtgtacttctggtcctcgtaaatcaggtggcggttgtacagagtatagacgttatcgcgtatctgatgcgaaacggtctggttcgaaactttcaaaaatgacttaatgtatgtctgtacaaaattcatcaacgatgtattcatttcatctattgcgatgcttgaaaaccacagagtacctgcaggcgagtaaattaagaattcgcggtcatcctcggtcagaagcgactggaacagatccttctgcttgtggacataattggaagaatgcacaagctttacagcctcggcaacggcgttttctatactttccctgccggaggttacaagattataatttaatccgatatcctttgcggctctggcaccggtcacgtcacataggacaagcgtgcagccgttttcttttgcttctttaaggcgattgactgcatctaccgagtccttgaaagtgattatgtcaatatcatattgaagcaggtcgcacagcagatgtgcatttgcagtgattccgggaaaaccggcaattacaaattttccgttgtagctctcggcaagcttgatgctcagaagtatatcgtaaacagagatggatatatctatgacgggaagctcaacagcagattgtataagctctgctgtaccgcctcgcgaaatgataacgtcgtaatttttatgtgcaagctgcattgcgatatcacggccggtgaacagatcaccggtctggacagtgagagcaatgtcatcgcgcgactgtgctatatcggtaagtatgtcagccatgccctcgtaaggggcgactgcaagaatcttggttttctgcatatatttctccttttgggatttgtaaatgttaagtggttattttaatgtttaaaaatgaaacgtgaagatagcgctagtgatgttttgttactatttaactatattgtattacagtatgtttcaaaatacaacaaataaatgtagtttatgtttcaaaatagaacaaaaataacaaaacaacgcgttgaacgaggcacaaaaaacagatattatatgattagttcaaagagatgttcaaaaataaaacacaagaataacaatataacaaaggagaggtaatatatgagttatcagattaaaattccgtcatgtatctttggcggagcaggaagcattgagaatgtgaaagcggtaatagaaaaagagaatgcaaaaaaagtaatagtttttacggataaaggcattcgcgcaacaggacttttagatctgctgacagagattcttgaggaaaacaagacagagtatcaggtatttgatgatcttgcttgtgaaccatcatatcaggatgttgaaaaggttatgaaggaagtggagagcgcatcaggagatcttatcatagcaatcggtgggggaagtgttatggatgcagcaaagctttgctgcgtattaaaagatgcagactacactataaaagatctgctcaatgatccgacgcttgcaaagaaacagattaagacggttatgattccgacaacctgcggaacaggatctgaggcaacctgcaatgcaatcgttgcggttccggaggaacagtcaaagaaaggaattgtaaatgacagtatgattccggactatgtggtattggattcaaatatgatcagaaagcttccaaaatcaattgtggcagcaacaggtgtagatgcattggcccatgtggttgagtgcttcacctcaaagaaagcaacaccgttttccgatacctacgcagcagccggagccaagcttattttccacaatatcagggaagcttataacaatccggacaatatggaagcaaaaagcaatatgatgaccggagccttctatggcggagtcgcaatcacaggaagcggaacaacagcagttcatgcactttcatatccactgggaggcaaatatcacattgctcacggtgtatcaaatgccatactttttgcacatgttatggaatttaacaaggacgcatgcagcaagagacttgcaatactttgcgatgctgtttaccctgagcatgcaggaaaatctgaggatgagaaagcacagtacatgatcgatcagattgctgacattgtaaaggttacaaacattccaacagatttaaaggaattcggtgttaagccggaggacctggatttccttgttgatgccggaagcaaacagcagagacttcttgtaaacaatatgaaagaattaagccttgacgatatcagaaacatatatcttaaggtattaaaataaaggaggagcctatgaaaaagccaattatcggaattacaatgggagatcctgcgggaaacggttctgagatttcagtaaaagcgttatcaagacctgaaatatataagcagtgtcgtccggtgattatcggtgatgccgcatgtatggaagaggcagtaaaaatcgcaggaaaagaaggacagataaagattcatgcgattcacgatattaaagaagcaaagtttgagtacggaacgattgatgtgtacgacatgaaccttgtgaacatggacagacacatattcggaaaagtatcaaagatgtgtggagaggctgcttttcagtatgttgtaaaggtaatagagcttgcgcagagcggcgagattgacgcaactgtcacaaatgccttaaataaagaggcaataaatatggcaggacatcattattcgggacatacagagatttatgcagagtacacccatacagacaagtacacaatgatgcttgcacacgaggatttgagggttgtacacgtatcgacgcacgtttctctcaggcaggcatgtgacaaggtaaagaaggacagagtccttgaagttataagaattgcaaatgatgcctgcaaggcgataggcattgagaatccaaagattggtgtggcaggccttaacccacactgcggagaaaacggactgtttggaacagaggaaattgaggaaatccagccggcaatagatgaggcaatggcagaaggaatcaatattcctgagaaaaaaccgacaccgcctgacagcatattctctaaggcaatcggaggctggtatgatatagttgtagcaatgtaccatgatcagggacatattcctctgaaggttaaaggctttgtatacaacaaagaattaaagaaatgggatgcggtagcaggtgtaaatgtaacactcggaatccctgtaataagggtatcggtagaccatggtacgggctttgaccttgcaggaaaaggcgaatcgaatgagttaagccttgtaaattcaattgactatgcgacaaagcttgcagtaaacaaaaaatagcgggaggaaatgcgatggtaaagctgttgatcatagcagatgactttaccggtgcattggataccggaatccagtttgtgaataagggaattgccacccaggtatttacaaaaatgccggaagctatctgggatatagatgagtcgacagaggttctggttatagattctgagaccagaccaatgccggcagctaaggcatatgatactgtaaaaaatattacaggatgggcaaaagcaattaagattcctgttattttcaaaaaaacggactcagcgctccgcggaaatataggaagtgagcttcaggcagttttggacggaagcggacacgacaaagtttatttcctgccggggtatccgaagatagaccgctgtacggtaaacggaactcactacatacaggggcagcttcttgaaaaaagtgtattcgggcaggatccgtttgaaccggtaaagctgtcgtacatacctgatattatcgcacagcagacagctttgaaatgtgcctgtgttaagcggaataaagctttgaatgatataaaaagcgatgaacgtatcgtaatctgcgatgtggaaaaacacaaagacatagaagaaaggcttgatgaattgcaggaaaaagatgagctttgtattattgccggatgtgccgcacttgcggaagcgcttgccgacaagctcagatttgatgcagcgaagccgcaaagctataggaagagtgaaaattttcttgtggaatgtggcagcttgaatatgattacgcaaaatcagcttgactatgccgaagaacacggattttcaagaatccatatgaccgtagaacaaaaattgcagaaggattattacagcacacaggagggcttggagtttttgcacaagatgcaggaggaatgtgaaaaagacagatgtctcatcattgattccatagaccgggaagaagacaaaaagggctttatggaagcaaataagctgactatgaatgatgtaagagccctgattccaacggcacatggacacatagccgactatctggcagcaaataagcaggatacgacaatacttatgacaggcggcgacactttgatggggtatatgaagctgataggctgtacccagattacaccggtatgtgagatagaacagggtgtggttgtttccaatctgaaaaatcacggatttgtgcagcagataatatccaaatcaggtgggttcggaaccaaagatgtactggtaaagattgcagacaaaatattaaatcaaaaataaaaaaataaacaagtttaaaaggagaagaaaaacatgaaacagacagaattaaaaggaattattacaccaattttaacaccaatgaacgcagacgagagcatcaacgctgacgagctcagaacacagattgacagacttatcgatggcggtgtgcacggaattttcccatttggaacaaacggtgagggatatatcttaaatgaaaaagaaaaatgcgaagtccttgaagctgcaattgatcaggtaaaaggaagagtacctgtatatgccggctcaggctgcatttcaacacaggatactatcagaatgagcaaggaggcagaaaagctcggagctgacgtcctttcaataatcactccaagctttgcggttgcatcacagaaggagttatacgatcactatgtagaggttgccaagcatgtagatactccaatcgttctttacaatattcctgcccgtacaggaaacaagctgcttcctgagacagtaaagaagcttgcaaaggatgttgaccttatcatcggtgcaaaggattcaagcggtgactgggataacttaaagggatatatcacagagacacgtgaacttgacaagaagttctatgtattatcaggaaatgattcgctcattcttcctgcattaaaagaaggaggagtcggaggaatcgcaggatgctcaaatgtttatccacatgtgctttcatcaatctacaaccttttcaaagagggcaagcttgaggaggcagaggcagcacaggattctatcgcaagcttcagagctgtattcaaatacggcaatcctaacacagttgttaaaaaagcggttgcaatgctcggatatcctgttggcgattgcagacgtccattcaactatctgtgcgatgagggcgtggaagcgcttgcaaaggtattaaaagagaatgctgacaaaggtatgaactaactctggggaggatgaactaatatgaagtttgtaatgacacaggctgtatgccctgaaggaatgcagcttttagatggaatagctgatgtatatgtagctgacaatcaggatccgaacaattatcttgacgagatgaaggatgcagatgctcttattgtaagaattgcaaaatgtgatgcaaatgctatagaaaacagcccgaagctcaaagtaatcggacgtacaggcgtaggatacgattcggttgatgtaaaaaaagcaacagagcttggtatcccggtggttatcacaccgggagccaacaacagaagtgttgctgagcatgcggtagcaatgatttttgcattgtcaaagaatcttatcgaggcacagaatgagatgtgcaaaggaaactgggaaatcctggagcaaagaaggctttcgagcttgagggaaagacagtcggaatccttggccttggagcaattggaagagaaacagccaaaatctgcaaaggctgtggaatgagcattgcagcgtacgatccttttatgacaaaagagcaggtagaaggctatggtgctaaatattatgaggattatgtggagctgttaaaggacagcgatgtggtatcaatccatgtaccgctcacagatcagaccaggaacatgatttcaaagaaggagctttctgttatgaaaccgacggcgcttataataaactgcagccgtggaggaatcatcaacgaagcagatctcgtagaagcattaaataacggagttatcgccggcgcgggaacagatgtattctgcagtgagccaccaaaaacagatgatccgttattaaactgcagaaatcttatcgtaagtccgcattcagcagcccagacaagagaggctgtaatcaagatggcacagatgtgtgtcaagggctgtctggcagtagcagaaggtaaaaagtggccatatgtagccgacaagtcagtatatgagcacgagaaatggaagggtgctgactgggcagaggtttaaaataaaaatatatcgggggatataatatggattctagtattatttcaattataattgtattaattacaatgggcttgtttgtctggaacagactgccgataagcgtggttgctatcctgggttcggtagcaatggcaatgtttattccggaaatggagctatccgcagtatacagcggattcagcgcaacaggctggccgatggtagtcggaatgtgtgttgtaagtgccgcactttttgaaaccggaatagcaagaaagataggagaaaaaatcggaaattcttttcttgccaagacggagagacggtttatagtaacggtaagtgctgtgtgttcattgatgtcagcatttatgagtaacaacggaacagttgctatctggatgcctatcatcgcaatcgtagcagcaaactcatgtggaaaaatccgttcaaaaatggttattttcccggccggaacagcagccgttatcggaggtgcgtgttcgctgatcggctcaacctcacagcttgcagcaaactcagtattacagggatatgccggttatgaggaaggcatgggaatgtttgacatgacaaagatcatgtttccggcagcagttgtacagattattttctggggaacaatcggctacaagctcctcgacaaggtattaaaaccgaatagtcctgacttcgacaagggaaatatgtattcagttgcagagatacataagctcgagaaggaacaggagtcagatgccccggcctggaagggctatgtggcactcggaaccatgattttatgcatagtattgtttgtattaagtggtttccagccattcaagagttattttaacatcggtacaatcggtcttataggtgctgcaatggtacttggaacaggctgtatctcgattaaaaaagcatattcggatcttccttgggatgttttcgtatgtatcggaacaatatcaggaatcggaacaggacttgatgtatcaggtggtggagcattaatcgcaaacgctgtactcaacctcttcggaggaaagaacgcatcggttgtgcttcttacagtagttatcgcagtgcttacaagtgtgctgacaaacatcatgtcaaacaatgccacagcagcaatgcttacaccaatctgtatagcaattgcattatcgcttggaatcagtcctattccatgggtaatcgtaatcggtgcctgctcaaaccttgcaatagcaacatccttcggaacagctgtaaacatgcagatacttccggcaggatacaagttttcagatttcgtaaaaatcggtggaccgttgcttattatacttattgcagttgtttccatatgcagtgtggcattcctgttctaagaattgagtgtcctgaagcagcaaatatttgccggtacaccgaataataaatcagatactaacaatacaaacagagctatcatttatgatagctctgtttgtggatatgagcatcccgggagcaattcattcaat

SEQ ID NO: 1451 - DNA, 45148 bp, Unknown
  gut microbiota DNA sequence
tatggataacatctgatgaaggaagaatcccttcttttgttatctgatttacagaaacttattaaccaagtagtcttgattgactacaccattattatactaggaggtgacagttctggattatgagaaattgtacaattcctattacttgcaagtatactcatatgtaatgacaattgtaaaaaatcaacatcaggctgaggaaattacccagaatactttttataaggccatgaccgcaaagaaggcatatgccggcaaatcaagcgaacagacctggctttgcagcatagcaagaaatctggcaatggacgaatgccgaaaaagcacaaaatttacagagcttgacgaagagcagctcgaacaacccgataatatggtaaaaagcctagaaaataaagatacagctcttcagattcatcttatactgcacgagcttgatgagccctacaaggaggtctttcagcttagaatatttggtgaattgccattctcacaaataggcatgatatttggaaaaacagagaactgggcacgggtaacttaccatagagccagactgaaaatcaaagaaaggatggatagaaatgaataatccaattacacaatcaaccgatgaaacctgcaatatagttcaggatttactcccactatactatgacgatgtatgcagtccctcaagcaaaaggcttgttgaaaaacaccttaagacttgtgaaaaatgtcaaaatacatacaatgagctaaaaaacgattctattgattcaatgataaaaaaagaggccgacagtgtattaaagcagcatgagaaaaaagaaaaaactgctgcctacaagaccggagtcataatagccggattactgcttatcccaatactcatcacattcatagtgtgcctgtcaaatggcgatggtttaaatacctttgcggtggtaacagcatctatgcttcttgtagctgcaatgacagttgttccacttatggcacagcagaaaaaacttaccaaatgcataatctgcggtgtttttgctctgcttttgatattcttttttgttgacagaatgtatagttcaaatgaatttatgctttggtctgttccaactatatttggattatcaattgttctttttccgtttgtcatcagaggaattgagcttccacctgttttatcagacaaaaaagctcttatcactatgctgtgggataccttatggcttttcctcacaatcattgaggtgtgtggtcattcaaacgatgttgccggaatgaaggccggctgtattatagcatttgtctttgtacttgcagcctggctcatattctttgatgcacgatatttaaacgcaaacggatttataaaatccgcaattatagttttgatagcttcggtttggacagcttttgccgatgacgtatgcgagtttttaatctttggcacaagacaaatcactataaagtctgtgaatttttctgactggacttccaatatctgcgtgaatgccaatgtttacgctattgtgcttgtgtccggcattattattgcctctatactttttgtagcaggcggtattaaagcatttgctaataaaaaataaattagttttctctttgaaatattattacaaaacccctcccacagacttctatctgtgggaggggtttttatagtcattattcaataagtgcctacaagattagcaaacaccctgtgcaagcatagcgtcaactactttctcaaagcctgcgatatttgcacctgcaacatagtcagtctttccaccaactgttgcattgtatctcttagcagcatcactgatgttagcgtagattgtctccataatgcccttgagctttccgtcaacctcttcgaatgtccatgaaagtctctcagagttctggctcatctcaagtgctgatgtagcaacaccacctgcattggcagctttaccacctacgaagagtactccgttctcctgaaggtattttgtagcctcaagagttgtaggcatgttagcaccctctgtaacagatgtaacaccgtttgctacgagcatctttgcatcgtcaatatctaactcgttctgtgtagcacatggaagagcaagatctaccttgtactgccatacaccgtgctcaccgttctgctttgcatgatactcagcagttgacttagcagctgcatactcagtaagacgggcacgcttaacttccttaacttccttaagaagagcaacatcaattccgtttggatcataaatccatccggtagaatcagaacatgttacaaccttaacacctaactcctgtgccttctcgattgcgtagatagcaacgttaccagatccggaaactgctgctgtctttccctcaaggctcataccatgatctttccataatgcgttagtaagatataacagaccatatccggtagcctgtgtacgtgcaagagatccaccataggtaagacccttaccagtcagcacaccttcgtatgatccacgaattctcttatactgtccaaataagaagccgatctctcttgcgcctgttccgatatctccggcaggaacatcaacgtctgctccgatatatttgcaaagttctgtcatgaagctctggcagaatgccatgatctctctgtcagatttacccttaggatcgaaatcagaaccacctttaccaccaccgattggaagtgttgtaagagaattcttaaatacctgctcgaaacctaagaacttgataatacccaggtttacagaaggatgaagtcttaaacctcccttgtatggtccgatggaattattaaactgtacacggaaacctctgtttacctgaacctgtccgttgtcatctacccaaggaacacggaacatgatctgacgatccggctctgtgattctctcaagaatcgcattctttctgtataattcctcatttgcctcgattacaggtcttaaagaatcaagtacctctgttactgcctgtaagaactcaggctgatctgcgtttttcttctttactacttcgagtacttcatcaacatagctcatttttatatctcctttacaaaattatttttcacatcaacaagtttattttatataaatctattgctataatcaagtaatttttgaaagttttatataaaaaaaattcattttatttattatcttcatttatattatcccagttttggtactgattctcctcgtcatcggaatataccaccttgaaataatccgagagttttgcaagtgaagttataagaactttcatttcgtcatccgaaagatcgtcctttatatgctctatcatatgacggtgaaactgctcatgatgatagtatgcactctttcccttgccggtgagtgagagctttaccacacgcttatcctcctcactgcggatacggttcacgtatcccttgcgggtgagaccatctattgcctttgtcagcgtgcccagagtgatagacataagcttggctacggtgccggagcgctttggctcatcgactcctattgcctctattatatgcatatcgttgatagaaatatcagaaaattcgtctgttatcagacatctgccctctatctctgtcaaatccttgaacagacacaccaataattcatttaaagtttcatctgccgtcataaatacctctttctattgccactctatggcgcaggctccccatgtaagtcctgctccaaagcctgataaaattattttttcctcatgctttatcataccatctttgcggactttatcaagcaaaatcggcacacttgccgcagaaatatttccacactgctgtaaattggtcgggaatttgtccataggctgcttaagcctcttggcaaccgactcaataatacggatattggcctgatgcagcacatagacatccacatcatctgcgctccagccgatttcatcaagcagctcatttatagcctttggcactgtctttaccgcaaacttgtatacagcaggaccgtccatggtgacatagccaccgagtgcagactgctttccattgtcggtaaacggattgactactggacggttgtctccgtcaagcgcctcaccgccttttccgtccgagccctgtacaaagcccttgaaggcatcgccctcgtctgtcacaacggctgctcctgctccgtctccgaagagtacacaggtgcttctgtcattccagtccattatttttgaaagaacctctgctcccactacgactgccttgtgaaatctgccggtcttaaaatatgcatccgctgtggcaagcccgaataaaaagcctgagcatgcggcatttatatcaaatgccactgcactgcctgcacctatctcagcctgaatctgacatgcgagcgacggaacgattttgtctgtggatacgcttgccgctattatcaagtctatctcacttccgtcaattcccgcatcctgcagcgcactttttactgcatcacatgctagtgatgtggttgtctcagtagttgcaatgtgtctgtttcttattcctgtacgcgagctgatccactcgtcagatgtgtccattatggctgccaggtcatcgtttgagaccactctctgcggcaggcagcttcctgttccaactatcttcatagaatttcctttccgggactagaacttgcggaaacgcttatatctttcctccaagagctggtcctttgtcaatttgctttctttttccaagaatttcttcatgttgcccttcatgtagtttccgattgatgaaagggcatcctcgtcggctccgccaaactcaggtattatatcatccacgacatcaagctcctttaagtcgtgtgctgtaatcttcattacctctgcggcttcctttgcacgctttccgtccttccagaggatagatgcaaagccctcaggcgagaggattgagtatgtggcattttccatcatccacacttcatttcctacagaaagagctaaagctccgccgcttccgccttctcctatcatgagacaaaggattggcaccttgatgccgctcatctcataaaggtttcttgcgattgcctcaccctgtccgttttcctctgcttccattcccggataagctcctgatgtattgacaaaggttattattggacggttaaatttctctgcctgtttcatgaggcgcagtgccttgcggtagccctcaggtgatggcataccatagtttctctttgcacaatcctcaagatcctttcccttgtggacaccgataactgtgacaggctggccgtctaaatatgcaattccgcctactatagccgggtcatcgcggaaatatctgtctccgtgcagctccataaactcatcaaagatatagtccatatagtcaaccgatgcaagtctcttaatctgtcttgcggcactgaccttatcccataccttaaatggcttagccttgacctcgcgctccttcataagctctgtaggctcgtaattgtcgtctgagtgaagcgggtcaaaattggcatagcctgttgtaggtctgtgagcacgtaaaatcttgtaaagagtcttctttaaatcctcacgctcaactatcatatccacaaagccatgctcaagctggaactctgctctctggaagccctcaggcagcttctgtccgatggtttgctcgataacacgaggacctgcaaagccgataagtgcctttggctctgcaagaatgatgtctccaagcattgcaaagctggctgtcacaccacctgttgtaggatctgtgagtacaggcacatataaaagtcctgcctctgaatgacgctttgctgcggctgaagtcttagccatctgcatcagcgaaatgataccctcctgcattctggcaccgcctgaacagcagaataatataaccggaagtctttcctctgtagcacgctcaaatgcgcttgtgattttctcaccaaccacatggcccatgcttcccatcataaatcttgaatcaattacaccaagcactgtctcctcaccgtaaatctttgtcttaccgatgacaatgccctcagaaagtcctgttttctcctgagtctttgcaattttctcctcatactcagggaaattgagaggatttcctgttgtaagctctgtaaaccatggctcaaatacttccttgtcggaaaccattctgattctgtttttagcacgcacacggaagtaataattacactcatagcagacgtatttgtgctgttttacaactgatttgagcacagtcttgccacacttgggacaaacaattgtctcagggacatcctcttttgtttcctgtgctgcatcggcatttttgccatctacggctggttttgtgttctcaacgttctttactaacgcctcatcagcctctatatttttatctttcttcttgaataacttcatcatgtctccttatgcaattaacctattgcaaatgtaagctccgccatacaggcaaccttgccgtttactctggcaacagccttgcccacaccgataggacccttaacctttataatctcagttgtcagttccagcgtatctcccggaaccaccttctgcttgaacttggcattattgatgcctgcaaaatatgcagtcttgcccttccactcatcctgacaaagaatggcaactgcaccggtctgcgccaaagcctcaataataagcactcccggcatcaccggatttcccggaaaatgtcccataaaatgtggctcattcatagtcacattcttcttagccacacactttacgcccggctccagttcctcaaccgtatcaatgagaagaaacggactgcggtgcggcagaatatccataatctgctgcgtattcaaaactgacatatacatctatcctttctcaattcgctctaaactatctacatacttcgcgctccgcaacgtggagccgggaagcacacagtgtgttctgaatgaaaaatatgaactgtcacggcgttccatctgctccaatagcatgaagctctaacaccatatcacagactgcccgtgcaaaatgccgtgactgacttcatatttttcacgaagaatatactgtgtgctccaccggtcctcacagcctaaatgcgcgaagccctaaaaagcagaagcaatttatctacatgcttcgcgctcaacaacgtggagccgggaagcgcacagtgtgttctgaatgaaaaatatgaactgtcacggcgttccattcgctccaatagcatgaagcgctaacaccatatcacagcctgtccgtgcaaaatgccgtgactgacttcatattttttatgaggaatatactgtgtgctccaccggacctcacagcctacattcgcgaagctcctaaaaagcagaagcaatttatttataagccttgaggagaatacttgcattatgtccaccaaatcccagtgaattgctaagtgcatactcaacaggctcctcatagctgtccttgcagtaattaagatcaatctcctcatcaggagtctcatagccaacagtcttatgtataaatccatcctgaatttccttcacacatgttataaactcaacagctcccgctgctccgagcagatgtcctatcatagactttgttgaattgattttaagatttgcagcctcatcaccgaacgcaagcttgattgctcttgtctcaaagagatcattgtgatgtgtgcctgttccgtgagcattgatgtattttacatctgccggtgtgacacctgcatcgctcatggcattggtcatggctcttgctgcgcctgcgccatcctcctgcggagatgtgatatggtatgcatccgatgagcagccgtatccgactacctctgcataaatctttgcacctcttgcctttgcatgctcaagctcttcaaggataacaactcctgcgccctcacccattacaaagccgcttctgtttttgtcaaacggaagtgaacactttgccggatcatctactgtagaaagcgctgtgagtgctgtaaatcctgcgattccgataggacatacactgccctctgtaccaccggctaccatcacgtcagcctcaccgtactggatgcttctgtatgcctcaccgattgtgtttgttcctgtagcacaggctgttacatcattgatactctttcccttgagaccgaactggatagaaacatttcctgctgccatgttacagatcataagcggaacaagcagaggattgactctgtttggtcccttttcataaagcttttgtgtctcgcgctccatagcctgaagacttccgatacctgaaccaatggcacatccaaccatgtatggatcttccttttcgatatcaagtccgctgtcatcaattgcctgctttgcagcagctacagcgtactgtgagaatggctccattctctttgcagcctttctgtccataaaatcctgtgggttaaagtccttaagctctgctgcaatgtgacatttataatctgttgtgtcaaattttgtgatgtggtcaaatccgatttttccggcctttaccgatgtccagaaatcgtccacattatttccgattggtgttactgctccaagtcctgttacaactactcttctactcatattgccattcctccgtcaacagacagcacctggcctgtgatgtagcctgctgcatctgatgctaaaaataatactgcgtttgcgatatcctttgtgtttcccggtctgccaagcggaatctgtgataaaagattctcctttgccgcatcggcaagcacatctgtcatctctgtctctacaaagcccggtgccactgcgtttgctgtgattccccggctggcaagctctctggctacagcctttgtgagtcctataactcctgccttgctggcactgtagttggcctgtcctgcatttccgagtattccggaaactgatgaaatattgataattcttcctgatttctgcttcaggaaatagcgtgacatatgacggattgtgttgaacgcacccttaaggtttgtgtcgagcactgcgtcatagtctgcctcgctcatcttcatgatgagaccgtctcttgtgattcctgcgttgtttacgaggatatctatgtgcttgtactccttgatgagcgctgttatcatattctggcactcgtcaaaatcagatacattgcactgataagaaactgcatcaccgcctgctgcctttatctctgcaacaacggcatctgccttttcctttgaaccgttataatttactattacaaaggcgtgtgctgcggcaagtgtaagagctatctgtcttccaattccgcggcttgcgcctgtaaccagggcatttttacctgttaacatacttttcaaaatcctccagtttgtctatgtttacgacttttacgtctctatttatctttctcataaatccgctgagtgagcgtcccggtccgatttccacgaactcatctgcaccgtctgcgataaagcgctcgatggtctgctgccagcgtactgacgatgaaacctgctttgtcagataatccttgacatctgccggtgacttcacatagtctgctgtgacatttgtgatatatggcaccttgatatcgtggatttctacactctcaagtgcatctgcgagcttttcgcctgcacccttaagcattgctgagtggaaaggtccgctgaccttgagcggtacgcatctcttggcgcctgcctcgctgcatgctgctgcggcggcatctactgctgccttttctcctgtgataacaatctgtcccgggcagttatagttggctaccgataccactgaatttgtctcatctgctgtctttttgcagatatcctcaatgacctgcggatcaagtcctaaaaccgctgtcatggctccacctgtaggaactgcctcctgcatgtagattcctctttttctgacaactgcaaatgcatctgccatagtcatggctcctgatgcgatgagagcaccatattccccaaggcttaatccagctgtgacatcaggtgtgatacctttgtcaatgattgcctgatatatagctgcctcaactgcaagcatacatatctgtgtgtactctgtaatattcagcttgtcattttcctcaaagcataatgccggaatatccaagcctgtctgttcactggcaaggtcgattactgcctttgcatttggcattgtatcgtaaaactccttacccattcctatgtactgtgagccctgtccgggaaacataaatactctcttacccattttcggtttctccttatttctgacaggataccgtaagccacgctttgcaggcggcccggtatccttaaatttgcatgtaaaagtgaatactgtctatttgttcagtcccactacatcctcaatgatttctttgcaggtttcctctttctttacgaggcctgcgctctgacctgccatgacgctgccatatacggtatctccgtctacaacggcttttctgagtgcgccaagtgtcattttttcgagctcttcaaatggagctccttccttttccagcttgagatattgtctggtcatcttgtttctgagcactctgattggatggcctgtgctcattcctgtaacctcggaatctatatccttggccttaatgaccttctgcttatagttttcatgtactatcgattcttttgcggtgacaaagcgtgtacccatctggactgcctccgcaccgagtgcaaatgctgcattgaagcctctgttgtctgcaattccgcctgctgcgataacagggatgctcactgcatcaacaacctgtggcacaagtgtcatggtagtctgtgctccgatatgtccgcctgactccattccctcggcgattactgcacttgccccgcctctctccatgagctttgcgagtgctacgcttgcaactacagggattacgatgacgcctgcttctttccacatgtccatgtactttgcagggtttcctgcgccggtggtgactacctttaccttttcctcggcgatgatttttgctatctcatcggcctccggattcataagcatgaggttgactccgaacggcttatctgtctccttctttgcagcgactatctgctcctttacccatgaagccggggctccgcctgctccgatgatgccaagtccgcctgcattggacacagcgctggcaagctcatgggttgctacccatgccatgccaccctgaatgaccggatatttgattccaagaagctttgttattcttgtctccatgtcttttaagcctctacacctttgttcttaagatactcaatgatgtcgtttactgttgcgattttctctaaatcctctgaagggatttctactccgtactcctcctcgagtgccattacaagctcgaaaagatctaatgaatctgcctcaagatcctccttgaagtttgactctaatttgatatcatcctcgtcgattcctaactgatctgctacgatttccttgattttctccaacatatttctgttctcctttttctgtgtttattttcggttttgtgtgctggtatatttgcactagtttgcatgtcaaatattttcatcatcaaatcatttgacagtgaaagtatatcacatttaaaatagttgtcaagtcaaagtatttttatttttcattttttatatggtacgggacttgtggggtgggtgagggacagtggcacaacttacaatggtttacgctgcgctgctaagatactgtacgaattatgcttatagtttcttgtagccggacgaaaccggcttttatgcgccgtccatggcgcataacgccttgccccaccgtccttggtggggcatttctgtatttcaaagcataattctacattatctaagcaactacgctattcaaccgttgtaagttgtgccactgtccctcacccgcctcgcaagtccctcacaatgtgacaataatatacaaaaaaacagactgtaattttgagtggtcagctcaattttacagtctgctctatattttgttgatatggttatggatttaccaatgatacattataccggctcaggaagcttatatccggcttcgctcattgatttttcgaactcttcaagcgataatccggctttttcagcacctctttgtacagagtaatctccatcctgtacagataaatatatctctgtacgacgccctgtctgaatgccttcctgtttttgttcttcaccatattcttttgcatactcttttgcatattccattgcatactgtcttactgcttcactcatagcaccacgtccttccttttctttgtaataagccactgcttttgacaatgtctcactttttatctgctccggcctgcactgatgaaaatctctcatcatacggcctatatcatcattaccttcataccttccatttacatagatgatatgtgaaccatctccaaaggcttcacccgtttcatcaacacgcctttgaatgtgataaaatggcagtccttttctgaacttatcgtgatcataaataaaaatcacgtaggaatccttaatctccttaaactcatgtccttcctgcagcatcctcgcatccatcatactgctgtgatatctggctcttctgacatgcgaaccctccgcattaatctgcacctcgatatcaatatgcctgccatcgacatctattgcatgcacatccaaggtaatacatctcccgccaatcacaggattttttaattcatcctgccctctgacgtctataaccttaatatcacgctccattattacgcgaagcagtaactccgtcgtctcgatattctgcccgaatacaagactcatcagattgtcatcaaacagtgtcattttgtcaatcaatctgttgatgattacatcgttttggccataattactgcccaaaacttcttttgtctctcccgacattattctcctcctgtttagttgtgtgagcagggagaatataatatcgcatgatactaaatttcttgtcaatataaagcatcagcaaccccagtccgcttcattcacataagattatctcaatcgacatatccatttttccctgctattgataggtaacttaaagcattgaaaatttccatgtctttgtcgaaaaaatattaagtggttctgccctcttcaaagtgatacgcaccgatgaaaatgtgtattgtggtgtcgctcaacagaaatataatgctttgtataattgtagcatagtgagctatatttgtcattatattttcgtctgtcagattgcaattttatatttttcgaggttttgttttgcttttttcgaataataaaaaagcaggacaagtatttctacctattctgcttatttttacataatttaattgtttagatatagattatctaccggctgttcgccatctgcttcacatagtcgagcgccttcttaaccggtgggattgatatcactatgattgtgataattccctctgcagcaaggtatgaaccattgtaggtcactgaatatatgagcgcatctatcgtcttgtttcctatcgtgacaggtgcgtatgctgcaaagaacacaactcccgacagcactgcaaagaaaaatctactgggctgctccgcctccggtggtaccaccggtagctccacctgtattaccaccggtgttatctccggtatttccacctgttgtaccgcctgtgttgccaccgttgttttctccggtatttccgcctgtgttgccaccggtgttttgtccaccatttccgcctgtgttaccaccggtgttttctccggtatttccgcctgttgttccgtctgtattgtctccggtatttccacctgtgttgccaccagcagcatctgtcttattcgtgtctgttgttgtcttatccggtgtggtggttcctgcatcaggtgtggtcacagtctgatctgtaggattattctgcgtctggtcatcggcaggtgtatcctggctgtcctgataatcatccgatatttgggcatatggcaggaaatctattggtgtgaggtcagcatgtatctgatccatgtagttcttccatatttctgccgggtaagagcttcctgtcagttttttgactgtctcaggcatatcgcagcctacccatacacatgtggtgtagtatctggtaaagccacagaaccagccatccttcttatcgtttgtggttccggttttgccggcacaaggcatgccattgtccagattagcgctacgtccggttcctgatttcataacatctgtcatgacatctgtcatcatacgcgatgctgtctctgtatatatgacggtatccttctgcgatgatgtatatatgatattgttgtcagaatccacaatcgacttaatacatgtcggattcctgtacattccatcgttctcaagtgttgaatatgcagatgccatctccagtgtggatacacctgttgtaaaacctccaagtgctgttgctgtgacatagtcatcctttacaatattggtaaaattcatatccttgagatactgtaagcctacctttggtgtgagctcatcatatagctgccatgctacagtattcagtgacttttgaacggcaaacctgatagtcacatcaccgtaatatgaatcacccgagttagacggtcctccatcaaacttgtggtcatttacgatggtatccggtgtcttaccacgctcaaatgatggtgtatacacaatgagcggcttgattgagcttcccggctgacgatggctttggaaagcacggtttagcgtatgactgaccgcatcctggcttcgtccaccaactattgcaaccacctcgcctgtgtcgttgtctatacaggttgcagcactctgcagcttaaatgtgccatcatcggtcgtgtctgtaaagtccaaaagcgtaaggtcaattgaatcctgaagctgctgctgcatagtcagatcaatcgatgtataaatcttgtaaccgtctgagtagagctttttctgacaatatgaatacatctcatcatatgaagcatcatactccttttcttcatcgtctgagtcaaagtaatacttgaacttgaagccctcattctccatgagcgccctcgtagcgcagtaatatgcataggtatccacataattgtacttgaccgtgtcatccttctcaggcatgttgagggttatctcctcgtttatggcggcctcatattcctgctgtgtgattttgccatcttcccttagatttttcaatatgagattgcgacgtgtcaatgtatgatccttgttgtttatcgggtcatagtatgtcgggctgttcggaatcgcacacaaaaaggcagtctgcgacaaatcaagatccgaaagctcacagttaaaatagccatggcacgctgcctgaataccataatatccgttcatgaaatagacattattcaggtagaactccataatatcgttcttggaatattttttttccagctccattgctatgaacatttccttgacttttcgctgccagttcttgttcgtatccagataaatatttcgggcgagctgcatcgtgatggtactgccaccctgggtaattctcttgttttttataattgactttgcggcacgcactattgcctttaggtccacaccattgtgcttatagaacttcttgtcctcgatactgaccatgcagtttacgaagttctgtgggatatcctcatactttacatagtcagcctttttggtagtggccgtctcggatatctcatcaccgtttgtatcgtagagtgtactcgtcctcgccggtaaaaatgtgtttttgtcagatttctgcacgagctctaccgcctctgagtgaagcttcgccaccttgtctgcatagcctccaaagtaataaaagcataatccaccaagaatcagtaccatcagaaaaatctgaagctttatgaaaaaccagaaaacgcgatgctgctttttcttctttttctttttctgttttgccatttctaaacgttacctccaaactatcggtataccattgtatatcggcatactttatagataattgacaactatatccaatatgtactgtctattatactacaatgcctctacatcagataattaataattgcttaattttctattatacctttatagcacaaaaggaagctaattgctccctttatcaagctattttacatctttattactgttgtagtcaagtaaatagttttttacaatgcattttgctatctctagccaagctggtcagccagaaattctgctgctgcacccgccagcttttcggcaatctcagacttatcggctttttcatcgtaaacacacagtataacggctcccgcgctatcaccatcatgcactattactgctattgcctgcgcttcacagtcagctttatcgtcctttaccacaggtatcagggtatcgtcttttttactgtacaatgcactttttctcttatccataatattctcgagttcttttgacaaagccttgcctatataatttttgtggtttttgccggctgccgctattatctcatcccggtctgccacacataccatggctcctgttacctttgacaggctctgtgcatatgcctgtgatatattcttcaggcttccaacctgcgaatacttctttagcactatcgtctcgtccgcatccatatatatttccagtgggcttccctcttttatatgcagcatcctgcgaagctcctttggtatgactattctgccgagggaatctactcttctggtcaatcctgtgattttcactttattgtcctccggttacttttttgcatttgcattcatgctttggaggtagtatatgggaatttgaataaaatatacattcgatatgcactgatacagtgctctttcataatagcttttataatgtcacggtatgttttgaatttgataaggtatctatatccgtcagctcacgctcatctgcgatatccacatatacacagtcatacttctttgccacacttctgccacccttatcaccctccagtgataaaagctgcgggataagcgatgaatgaaatacacacggattacctacggtatctccacagcgaagtgaaaaaactgatttcatatttcctttattttcaagcactttatctattaatttaatcacgctttgactttttaaatatggctggtcagctactgcaaacatgtagtagtcctgcataccagtctttttctgctcctgcaccgccataattcctgcttttatggtgtaggatatgcctttttcgctgtccggacttaagactgcatggcaatccgggatacatgcgcagtagtccagtatttcccgataacgtgtaacaacggttatatctatgaccgggttattcgattctgcattttttgtcttttttccaggcttttttgataaaccggtgtctgtgccaatataagtatcaataacagtatcagcatccatttcatcactgtctaaaggcttattagttccggtattttttaatttattatatctatccttaatttctatcaagtggtcaagcagatgcctgtacataggttttccatccagctcataaaacagcttgttacttccaaaacggcggctgtttccagccgccatgtatatgatatgaatcatttcactcttaggtccttttcgtgccagtcagggtctgccattcccataagtattttctctggggtaaacggaactgtcctgtgccatacgcctgttgcgcgataaatggcatgtgccagcgcaggagccggtgtattgataactatctcgccgattgacttgactccaaatgggcctgaaggctcatagcttgtctcaaattcgacgttgatatgtcccacatcctgtcgtgtcggtatcttgtactgcatgaaatcattttctgcgattttaccaccggcattgtaggtgacattctcataaagtgccatgccgattccctgacctatgccaccctctgtctgtacacgcgcaaggtttggattgaccgggattccacagtccacgacagcctgataatcaagtattttaactgctcctgtttccttatcaagctctatctcgaccatgcctaccatgtatggtggcggtgagacaggtgatgaatatgtggcggtgacatctacaggtatcgtgttgttgacctgtgattttgttgctatatcggaaagacttacggaaactgccccattgtctgcaccgtccggatttatgatatacacctctttaccatcgaaatccacctctgatgcagcacagcccagcagctgtgcaccgattttctttatattttcacgaagctcaagtgctgcattctgtgtggccattcctgtgatgtaggtggttgatgaggcatatgaacccgagtcataaggagaagcatctgtatccgctccaaacactgttatatcatccggctcacagtcgagcacctcagccgccatctgcgcaagtattgtatcacagcctgttcccatgtctgccgcacctatcatcatattgtaggtgccacagtctgaaagctttaatgtacacgagccgacatctacattggatatgcaggagccctgcattgcaagtgccatgcctgccgcacgaaccttgccatttcccatgtcgcagacaggatacttttctgcccagtggaaattgtctgcgcagtgcattatgcatctgtcgagtgcacatgcattggctgtctcgccaaaatatgccggcataaacatgccctcacgtacaatatttttcaaacgaagctcaaccgggtctatatgcagcttttctgcaagctcattgacggttgattcaagtgcaaatataccctgtgtggctccatagcctctgtatgctcctgccgcctgcacgtttgtatacacaacatcgcacgaaaatctggttgcctcgcagcctcctgtataaagaggaagcgatttatgaccggagagtcctactgttgtagtgctatgctctccgtatgctccaccatttgacagcgtataaagatctatcgcccttatatgaccatctttcatcgctccaagacgcacggtaacttccatctcatgacgcggtgacgcgatagtctgacactcttttctgctgtagattatcttgcttggacgctttgtcttccaggtaacaaatgccggatacacctcacagaccgctgtctgcttggcaccgaaaccgcctccgatacgcggcttttcagcgcgcaccatagactttggaatatcaagtgcatttgccagtattcggcgcaggtggaaaactatctgtgtcgagctgatgcagtgaagtctgccgtatctgtctatctcacagtatgccctgcaggtctccatatatgcctgctgcgcggcctttatgcgatatgtgtgttcaattatctcatcacactctgacagaattttctccacgtttccatgctcatcctcctcgtgatgaatgagattgcgctttacatcgcctgtatctatgctggatgaccagtcatcctcaggatgcacgagcaccttgttatccagcgactttctaaagtcaagcaccggctcaagcaccgtgtactttacttttatcatgttaagagccttgtccaccgccttttcagattctccgaccactatagcgacggcgtcacctacgcttctcacatggcggtcaaggattaatctgtcatatggtgacggctccggaaaagtctggcctgcgatagaaaaacgctttttcggaacatcctcccaggtgtatactgcgaccatgccaggcaccttaagagcgatatctgtctttacatcctcgacaattgcatttgcatacgggcttctaagaagctttatgacaagcgcatcacgcggtgtgatatcatcggtaaataccggctttccgagtaacagctggctcgagtcctttttaggtatacattttccaactgcgtggtaatcctttctggcgcggttgaagctgttttcgttagtttgatttatgctcatcctgccactcctttccgatatcctctccatagacgcctgcctcaagattaagaggtgcgccctctttcttactgtttaaaaaatttctgattgagcgcagctgactctgatatcctgtacaacggcacagatttcctgaaagatattcaagaatttcctcatcagtcgggtcaggattttctctcagaagcgccacaatatttacaatataacccggattacagaagccgcactgatccgctccctgtgcagcaaaaaatcctgtaaactgcttagcttcctcctcaagcccctcgagggtatccaccgctctgccgtctgccctgcctatcggcgtactgcatgacagcacaggctttccatccagaagcactgtacaaagaccacagttgcctgactcacagcctctcttcaccgaaaagcaattgtgcttgcggcaaaagtctaaaaggaccatatcctggtctaccgagtcggttattaacttaccatttaattttattttaacatccatatatatgaattccttcctacttaatgctcgtgcttaatttcatcgcagatgtcaagcgactgtgtgacagcgcggcgtgtaagcaccctgcagattatctctctgtactcagcccctgcccttatattgcttccaaaacggatatgctctgcaacatattcggcaaatttatctatttttgcattggtttcggagttatctgtcaaggctgcattaccatctgtctttgcatctgctatgccatcgagtatgccatcctcatcccacacaggctctgccatatatggtgatgctccgataaccgccacatacctgccgcttctatttgccactgcacatgtgagcaccggaaagtctgttgactgatttctctggcttaagtatactacgccctttgcatttttcggtactattactgacacaagcacatcgcgcgttgttcttggaagtgccgcaaactcgtccaaatccataattcccgccttgtgaagctgcacctttgctcccagtgccctgaaaatcgtcatgacatctgaaaatccgaatctgccccagatgcttcctccgacagttgccacatttctaaactgcactccgacgatatgtctgaccgactctgcgattgcgccgtgtgtatatgcattcagtgcttcatgagtctctatctgcctgagtgttgcatacgcgccgattctaaactcgttctcatcctcatcaatttggtcaagtccgagatcgcacaggtcaattgccgtgccaagcgtcttatttttcattttgagccagagcatgccgcccagcacaaaattcggttttttctgataaagctcataggcttcatcaaggctttgcgccctcacatactgattgtaataaaacatatttttctcctgttatcctgttatataggtaactatcaattacctcatttcgatttcatacattgcttcccacctgatgtcatgctccttcataaaggctatgaggcactccctgtcagaaagctctgctctccatgccagcccgcagcccgccgatatgacagacggaagagggatcgtgcgtcccggaataccacatgccttgcccttgatatcaagctttaacggtgctgtggtagtctcgaatgtgatgattagccgttttttcttttctcttgccaaatttttatccattacctcacaccttgtataactctacggacttacaataagagatgccccagccatcttttctgcaatatcatacatgttggtcacctctccgactgcaagcttatctgacagctcatagtaattcaggcatgttccgcaggtaagaattttcactccacggctcttaagctcctttaaatcctcaagtgactctgagccctcacaggtcagcttcgctcctccattgtagaaaagcatggtttcaggcgggttgtcctgctgcgaaagtgcgtagatgaagccctttataagtacactgccaagctcctcgctgccctctcccatatatgaagagcggattacaacaaccctgttatctgcggccggcctgcatgtatactgtgaagcctcgtctgtatccgaaagctcatcggcatttacagcttcaattgtcagctttacgctgtagcttccgtcatcgagcttactgctatcgcagctatagcctttctgtacagccatcttttttaaattttccactgcaacttcattgtccacaagtgtctccaccgtatccggctgtgtgagagcctctatcgccttctttgtctttacaaccgggatcggacatgtatcccctattgcatttactgttatcatatttataatcctccctatgttatttcaactcgtcagccctcagaatgcagggcatgcagcctgtcagcaaatttgcataagctatggcagcttaaaatcagttcacatatatcggcacatctcgccgcttaacaaatcgtcccacttttgcagccggaagtcctgcggctttaagctcatgcaaaaatgcatctgcctcagtagcttttactgcaaacagcagtcctccagaggtctgcggatcgaaaagtacctcctccattgagaaaggtatatttttttcaaagcacaccttatcacctacatggtttctgttgcgctgggccgctgccgtgaggaaaaactcatctgcgcatcgcagtgctccggtaatgaccgggatggaaatcgagtctataagcgctgttatatcatcatttaacatctcactcagatgccctaaaaagctaaatcctgtgacatctgtgcatgcatgtatatcgaaagcatgactgatttcggatgctgccttattcagtgtggtcatagagcttactgcatcctcaattgcacctaacggagcctcccctacgcggtttgcgttgcatacaagccccactccgagtttctttgtaagtataagcacatctgacggctgccctgtgttgttgctgtaaatatgctccggatgaaccgtacccatgactgaaagaccgtattttacatcactgtctgctatagaatggccgcccgcaagtgtgccgcctgcctctatcaccttatcagcaccaccctgcattattttgccgagtatattcaggtccattttctcagggaaacagacgatgttcaatgcggtctttactgtgccgcccatcgcataaatatcactgagcgcatttgcggccgctatctgtccaaacgtatacggatcatcaaccatcggcggaaaaaaatcaagcgtctggactaccgccgtgtcatctgaaattttgtacactgccgcatcatcacagctatcatatccgatgagcagattgctgtctttttcaccccttggtagctttgctaaaacattacttaacaaatccggaccaagctttgcagtacagccaccgcccttgcaaaacactatttcctgtggcatttttgctcctttcaattgtttaatactatttatcgcaatgccgcaatctgcataagcgcttcagcggcctcatttatctcatcaactgtattataatatgaaaatgagaatctcaccataccctgattttgtgttccaaagaatttatgcatcagcggtgcgcagtgtatgccgctccttgttgctatgccatactcattcataagtatgtctgacacctccgccgagtccatatcagctatatttactgaaacaatcgcacagtgcagaccattgtcaggcagcatatcaaaatctccatatatcctgattccggggattgtctttatttttcccataaatgcctgcatcagctcatgctctttagcgtatatattgtcgaggccgattttctcaagctccatgacacctgttaaaagccctgcgattcccggaccgtttaaggtaccggcctcaagtcttgtcggaagctccataggctggttctcaagaaagcttagcacgccggtaccaccgctcttaaacggctttatatctgctctctctcccacataaagtcctccggtgccctgcggtcccatcaaccccttatgacctgtgaagcagagcacatcaatattcatgtcttttacatttatcggaatcacaccggctgtctgcgatgcatcgactataaataaaaggttatgctttcgtgcgatttgccctatcgacctaatatccaccacgttgcctgtgagatttgaagcatgtgtgcagacgatggcttttgtatccggacggattaaagcctctatgtccgatggggaaattatccccctttttatgcctacatcactgcatggtacaatatccacacccacgccccgctccctttgcatataaagaggtctgagcacagaattatgctcgagctgtgttgtaatcacatgctcccccggctcaatcagtccgtggattgcaatgtttagtgcctcagtggcatttgccgtaaaaacgagtctggccgcatcatctccgccgaaaaattctgcaaggcacattctggcctcatatattttcctcgacgcatcaagcgatgcatccgatgccccgcgcccggaattgccgcagtgcttcattgcattaagcactgcatcatataccgcatccggctttttaattgttgtggcagcattgtccaggtaaatcatagtatgtcctcatttacttctcatccaagcagataaaaattctttatataaagctcatcatttatatttttgctaagcatatttgcttctgtatgcctcggaaggcttgcgtaaattattgaatcgttatttaatttgcacaatacttcccagcttttcaattcttcaatcattttataatctttaatcctgattatatttttatcattatatacaagtgccgtttttgctttgcctaccgatattattatatcctgtgggaaaacacctatgtgtgatatgtcgtccatactcattgcagtctgttcaagctgctcatcagtgacctcaaatacgctatcccattccacagcaagcaaatgatgcttatcctgccattttacctctgatatattgctgcagcccacaagcagtgcctgctccacagacataggccgcatgaagaaatcttttttgtcgcggactgtactcagtacacctctctccatgcttccgatacgctcggccaggcgatacacctcatcgcgattgtgtgacacaaaaacaacaggattgttaaaatctgtcagcatctccataagctctgattccatgcttctttttacatgctcatccagtgccgaaaaaggctcatcgagcagtatgcactccggcttagccgcaagcatgcgaagcattgccacgcgctgcctctgaccaccggagagatgattgggatatgtgtacgccatgccctcaagcccatacctcttcagccagcccttcactttttcctcgtcgcggtgtcccattgctatgcatatattttccatcacggtcattgtcggaaataatgcatagtcctgaaacaaatagcctaccctgcgcttacccgggtgcagatttatacgctttttcgaatcatacagcacatggccgtttaatgatataaagcctgaatccggtgtctctatccctgctatgcactttaatgtcatactctttcctgagcccgacattccgattacggacacaacctcgtccgtaagctccatgtcaaccgaaagtatgaaattatccaactgtttttttatttttactatgagcgacattattttttctctttctctttatgcccttgcttttgccacatatcatatttatcgatacaagacatgcaaatgaaatcgctatgattactatgcaccagaagcccgctgtagcataatcaccgctttggacgaccattgctatctgctgtgatatggtcgatgtttttcctgctatatttccggcaagcatcgatgtggcaccgtactcaccgatagctctggcaaaggccagcgtgacacccgatatgataccgggctttgccatcggcagacgtatcttccagaaaatcttccactcacttatgccgagagtgcgcgccgcatatatgacattttcatctatctgctcaaatgccgccctcgcatttctgtacatgagagggagtgcaatgatggttgctgccaccacacagccaagccacgtgtgtactacctgtatccccatgctatggcttaaaaagcttccaaaaggacgccttgtgctgaaaatccttaaaagaatgtatccagccacggtaggcggcagtaccataggaagtgtcagcagtccatcccagaatgccctcactctgccctttgtgtttatgacaagctcagcaaaagctattcctataaaaaaagaaaaaactgacgctactattcctgtttttaatgttacccaaagcggtgaaaaatcaatctgtcccattattcctttaccgaaaaatgatatttctcaaatactgacattgcctcatctgtctgaaggtatgcgataaattccttcgctgcttcaagctcatctgatgtggtgctgtctccctttaaggctgctatcggatagatgacatcgcctgttaagctgtttggaagcttttctataatatcaagctggttctcgtatccgaatgtatctgagtaataaacggttcctatctcatttgcgccctcagctacggcagatgcaaccgcacctacattggcacagctgtttatttccagaccgtcaagtgcctttgagatatcagaatctgaaatagcctgtggctttgaagcatcaccttcaaccatttttgaatttactaacgctgctctggtgtactgtcctacaggaactgttccgtcagcaagcgccatatttttagcctttgagatatctgcaaagccggtaactgccgtgccactattcttatatgtaacaaggcacacctgattatttaataggtcaacacgagtaccgtccaccacgcttcctccgtcgtagccattttgaagctcatccatctgtgccactcctgctgagaaaaagatgttgcacttcgcaccctctttaatctgtgccatcagagttccggagctgtcatagttgttttggaagtttacatttggatgcgccttggtgtaggctgcacaaatttcatccataacaccgtttaagctctttgccgcaaaaattgataaatcgacatctgcatctgctgtatccttttttccacagcccgcaagaagtcctgctataaggataagtccaaacgcaagtcctgcatatgctttaaattttctctttaagcccttgcactcctttgctgatccgtcagtacctgtcgctattcttaagctcatacttttaacctttcttttcctttatttaaattaaatatgcatgcgattaatgttcatattcagcttatcttgatttattaatatatgataatttcatcatccaatctgctccagcagcaccgaaatactgcctccgcacaccatgccctctttctcggcatcgtcagtgttcatgctcacatccatcaaaccgcatttgaactcctgcttgcgaaacagtctcctgcaatggcttataacctctgcctccgcacaaccgccgcctatagttccgatgatccgattgtctgagctcacgagcatctgtgttccgactccgcgcggtgcactgccattcttttttatgatggtacacagtatgtacttcccatctgatgcctcaataagtgcatcaagcacttcgttatccacctgtgtgcagccggtacgctcatttttgcactttactatctcacttatcaccgaaagcgcaatttcctccggtgtctgtccacctattgcaaggcctatcggagaatgtaatccggatatgtttttctgtgaaaatcccgattcttcaaggtctttttttactatggcagctcttttctttgagcccatcatccccacataggcgtatggctttctgaatatctctgtaagacactccatatcaaagcgatggcctcttgtcatgcatacatagtaatcatccgcctgtggctccagcctggcgagagtttttttataatcgccgcaaattacatggtctgctccttggcgctttgcattatcggcaaacagaggtctgtcctctatcacccatatgtcaaaggccaaaagcgatgccatgcgtacaagtgccaccgatacatgacctcctccgcagattatgaggcgtggtctgctgcctatctgctgtttaaacatcacaatggaattatcattgtcatttatttcatctgcccatgcactgcctgatgccactcttattctgccatctatataaagcgccttttcaccggcatgtgctccttctatgactgtcaacagctcacagcggctgtccgccggtctgtcctttatcgaagcatatatgtttgccggaatcagcttcacctcgtcaccggtataaatctgaccgcctcttatgactactgcaaacacgccctcctttggcataatgcactcgcccatcctcttgtagatagcacaatgcgaatgacactgtttgcctatctgcgtcatttccagaatagcatctcctatgcaaaagcgtgttccaagcggtaaattcttgaaatcaaatcctgatataattaaattttcgccaaatgcgccgttgtctatctgcgctcctcttgccctgaaggcatctattttctctgcggaaagcaggctgacctgcctgtgccactttccggcatgtgcatctcccatgatgccatagtctgcaacaagctccgcctgtggcacctctctcttttcagttcctctctctttgcttatattgattgcaagaagctttcccatgatttgctatcagcctcctatccggctcatatttcttgctgcatttacttccgcagctttcagctctgtagcctttgtctctacagtctttgtctctgtagtttttgtatatgtcactgcattgtcattaaaattgtgacaccccggctttgcctttatggcagcctttagtgcctgaactattacaaaatctttttccaaatcatctgtaaattcgcatgaatcaggtactaaatccatcgtcacgctgcttcccaggcatggcataagcctgccgtcagccgtaacacgtatgcggttacaggtatcgcagaacttcccatggattgcctgaatcagccctactctgatattaagtccatgaaaactgtaatactctgccggaccgttatctgaattattatatcccgaattaatttcttctctattttcagtatctatatggcaaggagttccatatacttctaaaagtgcgccaataaccttctcatacggctcgactccgttggtatgcccttcacctaccggcatcatctctataaaacggatatctgtgcctttttttgaagcataccgtgtgagagccaccacatctgtctgcggtgtgagcaccacattgattttcactcttattccacactctatggcagcatcgattccatgctccactttatgaagcagcggtttttttgtgatatgttcatattctgacgcatctatcgtgtccaggctcacatttatactgtctatgccggcttccttaagctgctttgcatgctgcgcaagcagtactgcgtttgtggtgagcgatacactcctgacaccgggtatcattttgatttgtgaaaccatctcatcaatctgcggatgcagaagcggctcaccgcctgtcagacgaaaatgcgtgattccaagccttgtggctgcgcggactatgcaaagcaccttttttacgctaagtgtatttattgcctgacaatttttattattgtcctgtgggttgcaataataacagttcagattacagctgtctatcaccgatatacgcatgtagtcaatctctctgccaaatctatcgcgcatattaaaagcccttcccgaaaccgcagttaggaaacgtgcagacatcacaattcaggcatagtccgccttctccaagtccggcaagctcatctgccaaaatcatatcacacgccataagcctcggcaatacaatatcaaatatcgtgcgcttgttatacatggcgcagccaggcagtccacatatcggcaccagcctgtcacctgcatcatagtacgacagcaaaaacatggctcccggcagcaccggtgaaccgtacgacacgatccgcgcgcttgtattttttatggcaagcggtgttttatcatcaggatccacgctcattcctcctgtgcagaatacaatctccgctcctgcctctattgcacgtaagcatccgtctgttatttttttgtcatcatcatcaaacacctcatgaaacatcatctgtgcaccaaactctgctatttttttctcgatgacaggtgtaaacgcatcctgtatcctgccatggtacacttcgtttccggttgtgattattgctgcttttctgaccacaaacggctttatatcaagaatcggtccgtcatcgcatatgtgcgaagccgcctcaagcttatccttttttataacaagcggtatgattcttgttccggcgagcttatcaccctttttcacagtggtattgccgtgccttgtggctatcatcatttcaccaaaggagttgatctttttcagcttttcgctgtccaccttaagcagtccgtcacagtcggctataacctctatcttgccttcctttacaggggatggatgcattttacttgtggtgccaccaaaaacgccggattctgcggcttcacaatgaccttctgcgtctgcctcattgctatttgtgccacatgcgctcatacgataaagcacctctgctgcctcattttcgtgcatcatggtctcatcattttcccatatatatatggtgtcttttccgacgctaagcagcaccggtatatcctcttttgttataatatgccccttgcgaaaaaccgcatcctttttcactccggggataatctgtgtgatatcgtggcagagcacctgtccgactgcctccgttgtcttcataagcttcatataatcccacactccaaatattatttttgtaaatagttactgtcctaaaccataccccgtgcatttctgtcaccggccgcactcactgtcatactgcagtaaaatatcaagtccatgctctatatttcccatcagaaaatccatgctctccgacactgccttcacactgccgggcagattgactatcagtgtgtttttcctgataactgaagctcctctgccaagcatggctttaggtgtaagactcatgctgtacgctctcagtgcctcagcgatgcccggtgcattacgctctgcaatatccattgtagcttccggtgtgatatctctcggtgaaaaaccggtgccgccggttgtaagcaccagattgcatttcacatcatcacacagcctgacaagctcgtctgcaatctgttccctctcatccggtatgattttatatgaaaccacatcatacttatctttgggaagcagttcctttattttaggaccgcttttatcctctctctggcccgctgcgcctttatcgcttatcgttataatccctacagtatacattacatctccctgttatccttgattaattgtgtatttttaacttctcagcattttaaatgggctataatcgttgccggttacattgttagttgtgatcagtaacgtaatgtccgctcttgccaccggatttttccagcagatgtatctgcccgatttccatgccacggtccagtgccttacacatatcatatatggtaagaagcgccacactgacccctgtcatggcctccatctctacaccggttttgcccacacaggctgtcgtgcagattgccttgatactgctgtttttttcatccagctcaaactcaacatcacacttcgtcatggcaatagcatgacagagcggaatgagcatggaattgttctttgcgcccatgattcccgcaatcctcgccactgccagcacatcgccctttttagctgttcccgtagataccgccctatatacggcgccatttacctttattgtgccacaggctttcgccacgcggtatgtgtcatcctttgcatgcacatccaccatgtgagcttcccctgcctcattaaaatgtgtgagctttcctttattttgttcctgattattgatatcaaatccgttttcctgcgtcaatctatttatcctcactgtaactattcagaaccactgaaaacaccttaatagttacccttatttattatttaataaatctttacgccgtgctcaaatgccgataccgcctcaagcacactgcctgctatacttcttgccttgtcagagattgtaaagcagtttgttagctcactctcgcgcgggtcgatatccgctatcttgaagccttccctgaaataatatccctcacggataaggcctcgtatgatgcctgtaattgtagcattcacagggacatattcagacaatgcattgtcatagctttctttatccggatatatccgcgctatctcatctcccttttgcacgatgtctccgatttttctgacatcatgaatatatcctgccgccggagcatgaatcacacgctcacttgtgaagccggcgatatttcccggaacccctgtgttgggctgtgccatgccatcggtaatgatgcgcgccagattgtgcccacgcatggactcaatcaccagatgcacgtcacgccctgccgtaaagctcgggcctactcctatcacaagcggggccatattgattgtggtacccagatttttctttgctattatggcatctaccacaacatccggctttaaaagtgcaattgactcaccctttgggtctataagaagcggaacctctccggcttcaagcacagcttcgatggctgaactatcccacttttctgatgcaatatgagctgccggtgtgtcatttatccctgaatctgtctctgtatcagtctctgcatcagccaaggcaggaacaagtctggctgtcacaccctctacagctgcgctcccatcatacactgcttcacaaaaggacacctggcgccgtatggcagccggatagtctgtctcaagcgctatcaccctatgccctgcccggtgcagtctgtggatgatgccggtcgcaagatctcctgcaccgcggcatatgattaacaaatttttctttattatctgattattgctctgattcatgctcatctgattaattaccctgttaccttattatttccatatttgcaactattcagcccccacgctcattcgcaaaaacgcacgatacccgtccttcaaacccgctatcgcgcagctttctgacatagacctgccgcagcgtatctataatcgaatcatcaaccactacatcctctgccgttccaagctccttttgcataagctcatatcgaaatacaacgtccttacatgacctgcccttttcccatgtgccaagcactatgataacatctgtggtacccggatatatgacaggctcatccgctgccggatatttgagggaatggtgctttgccccatctgcttcgattataacataatctaacgcctgtggcatgtctttaatcagtttatcgagcaaatcatacggcagtccgcacatctttgactttgactgttctgatattttctgttcagatattttctgccccgccatacaatatccatcttttattattttatcccttaacgcaaaaaaatcgcaggataggtcagtgtcagcttcgacatacatgtgcgttgttgttgtgacaagcacaccttttccactcctgtgatattcccttgcaagcttatgaacgagtgtggtcttgccacctgcgcccactattgaaatcactttttccatatatttccatactttcccacaaacaataaagccgccggtgtacttaatgcaccggacggcttcaaaatcctaagcgttagtcatccacacgcttcacatcgtctttctcgtccatatcccacatatatggcgcgttctttgacttcttcggcaaaataatattgagaagaatagcgcaaagtgagcaaggcacgatacctgaaccgccaaatataagctgtacatagtatggcagatgtgatgtagcaccggttgtagcgccaagtccgtagcctaaaccgattgctactgagataattgtaatctcacggctgccgattggctcctttgtgatgagctcaattcccgaaatcaggatagaagcaaacatcataacagcagctccgccgagcactgactgaggcatgattgacatgagagctccaatctttgggcagaagccacaaataacgaggaatatagctcccattgaaatagcaaatctattgacaacctttgtcattgaaacaagacctacattctgtgagaatgaggtatttggcagtactccgaaaagcgctgcaaatgatgaaccaagaccatcacagataacaccgcctgaaagctctgaatctgtagcctctctgtccattccaccctccacacaggctgagatatcgccaactgtctcgattgcagtaacgataaacatgatgccgattgggatgattgcattggcatggaaggaaattcccacatctgacagctttccaaagcctataaagcttggaactgctatccatgccgcatttttaacctcatcaaagtttacaacccatgagtatgtgtatttaacaccgtcagcggtcacacctgtatgtgacatggtaagtgtcataatgattgctacaacatatcctgccaggataccaaaaaggatggcagatgatgaaaaaatactgcgcgatggtgcaaaatgcttaagaagcacgattactataagtacaaccattccaataaaaaggttaggcagtgagccgtaatcatttttgcctgttccaccacagaagtagttgattcccactccaaggagtgaaagtccgattgctataacaactgagcctgtaacgattgccgggaaaaacttgcgcaaaggctttaagaaggctccgagtatgccctcgaagatacctcctacaaggcaggctcccataatagctccatatgctataactccgccgccacacgctgcaactgtattatttaatactccaagaaagcccgaagaggttcccataacgataggtacctttccgccgacaggtccgatggaaaacatctgtactaatgttacaatacccgcgataatcattgcattctgtaagagagctgttctaagctccgcaaagccagcgtccgctgtgagcccgcatgctcccataacaatgataagaggtgtaaggtttccgatgaacatagccataacatgctgcagtccaagcggaatagcctgagacagaggtattctgccctcaaactggtaaggtgaagagttcgttgtctttttcattggttcctccaaataattatactcttaatttaataaaaaatttacaaaattattttacgagcataaggctatgtggtcaatttagtattacttataatataatgtccatttacttataaataaatgctattgaaattagtttctgacaacaacagggcacaccacaaccggtatgccctatctattacaaacgatatagctattcagaataatctaaatttattcaaccctaagcagctcgcagtttccctgcatatccttccagaaatcctttataggtgtgccgcgaaactgattgactatgctgcagttcattgcaccgtgtcccacgacaagcacatttttgcctgcctcaagctgcggtcttagcacctgctctataaactcgcctgttctgtgatatagctcctcaaagctctctgcgccgtcctttgccacatatttttccggctcctcaaagagcaggtagacagggcattcgggcttttgcctgatgttcttcactccctcataatcaccgaagcacatctcgtgaagcctgttgtcagtgataatctctactgcagggtttctgtctgcaagaaaaatccttgccgtctcctgtgctctcttaagcggggagcagtagcatatgtcaaagtctatatccttatatttttctgcggcatcgtaagccatctgcctgccggtttcgttgagtgggatatccacctcaccctgcagtctgtgctcctcattccaatctgttcttccatgccgcaaaatataaaacataattaatcctcgatttctccatttctatgtctctcgaagaaatgccttgtctccttaacaacaacaccactgagagcaaacagcgctatcatatttggcagagccatgagaccgttgaagatatcagcgatagtccacaccgcacttacagtcatataaggtccgatgaaaactgcaagtatatatatccagcgataaacctttacatatttcatccttccgccactcaaatactctaagcaccgttcactataataatcccaaccgagtatagttgtaaaggcaaaaaatacaagacacagcataagtacaaatgctgataactctttcggtaaaggaagaccattctggaatgcgtatgtagtaacctgcacgccctcgagtccgtcaacctgccatgcgcctgtgagcacgatggaaagtcctgtaagtgtacatataactattgtatcaatgaaggttcctgtcatgctgacaagtccctgacgtacaggctcctttgtctgggctgctgccgctgcaatcggggcactaccaagtcctgcctcgtttgaaaagattcctctggcaacacccttttgcattgcaacaagaaagcttcccacggcaccgcctgttatggccttcggtgaaaacgctgcctttactattgtagcaaacgctgccggaaccgctgtgatattgcataccacaagcacgagcacaaatacaatatatataacagccatgaaaggaactattatctggctgacacttgcaatacgctttactccgccgataagcactgctgccacgcagaatgccagtacaagcgaagcaatgacaactgaccatgaatactccccaaggaacggtaaaacctttactgtatgctggtttttagggtcaaaaaagttgtttacagcacttgatattccgtttacctggctgaatgttcctattccgaatagtccaacgcatacgccgaaaaatgcaaatatctttgcaagccatttccattttgcacccattccctgctctatgtagtagaatggtccgccgagactatgaccgtccttgccgatgacacgatattttacagccaaaagtccctctgaatactttgttgccatgccaaagaaggctgcaagcaccatccaaaaaagtgctcccggtcctcctgcaccgactgcagttgctacaccgactatgttgccggttccgattgttgcgctaagcgcggtacagagtgcgccaaagctcgtaatctcgccatcgccgccctcttcatttttgaccatccactttagtgccagaggaagttttcttatctgaagaagccccagacgaactgtgagcattatacctcctgccatgatgagcaccatgagcggcactccccagacgaaatcgtccactgctttaagaaaaatgttgattgtgttccacattgaaatactcctgcctctcttttttatctaaacacaaagtctttgtgttttgagcaaatactattaatataaataatttcatccggaaacaattgaaaaagcaggcttagcagcacttacgcgaattgaaataaaaaaccccatatacgctgcatatacagtctgatacatgggattaagaagattatcttaagaatatctgtccaatatcttctccgtcctgttgcctgagagattcgtacgagaagcagcctgtgccatgatatattcatagtcactgcactcctactgcttcctattcgtacgttgcaccttcggcccccgccaagcgggtgtctccagagagtcgatccatttacagttgcaccgcctgctgcggcacctgagagttttactccttcggtaggctttgataatgtaaaatcgctgccgttttcctgcaaacttcatctcgaaattgtttattttaaatttattgtttttattaatcgttaagaattatatgacatatatacgatttaatcaatagtataaatgtactaaactgtctcaaccttaatcacattggtgttgcctgtcttaccgttgatgagacctcctgtgagcactatatgatcaccctttttgagcttcatgacactctttgcctcgttcatcgcattgtagaacataacctccattgagttgtattcctcacacagaaccggctttacaccccagctcaggttcagcttgcgccatgccttttcagaggttgtcatgcctattatatcaacagggcagcggaaacggctgaccatgcgcactgtacgtcctgtcagcgagctgactacgatacatttcgcatccacatctattgccatggcacatgtagcatgtgaaatggcatcgactatgctttttgtctggaactcagcattggcaaatctcttgccgtagtttatctgcttttctgtatactctgctgtctctgccatattttttacagcctctacaggatatttacctgctgcagactctcccgaaagcataatagctgatgagccgtcgtataccgcattggctacatccgaaagctcagctcttgtaggacgtggattgtgaatcatggactcaagcatctctgttgctgtgattacgcgtgtaccaagcatacggcacttgttgataagatacttctgtattgccggtacctcaactcccggaatctcaacaccgagatctcctctggctatcatgattccgtttgctatctcacagatttcctccacatgatctacacctgagcggttctcaatctttgcgatgatttcaatgtcctctccaccgttttcatccaaaaagcttctcagatcagctacatcctgctttgtagaaacaaatgatgcagcaacataatccacctcattttttataccaaaaagcagatcgtccttgtcctgcttgcttaaatatgcatgcttcatgaccttattcgggaagttcatgctctttctgtctgaaagtgtaccgcctgcgataacatcacagattgcatcgtttcctttaagctctctgacctgcagaatgatgattccgttcgcaacaagcacacggtcaccaacctttaaatccttgatcagattctcatagtttactgatactctctcctgatttcctacaatatcgtcagtggtaagtgtgaaggtatctccatccttgagctctattttgccattctcaaaggtcttgatacgatactcaggtccctttgtgtcaagcatgattgcgattggcatatgaagcttctgtcttaccttcttgattaaatctattttgccctgatgctcctcatgtgagccatgagaaaaattcaatctggcaacatccatacctgcctttatcatcctggtgaggacatcctcatgttcactggccggtccaatagtacagataatttttgttttacgcattaatattcctcctgatgctgatcaccctatcagcttttcttttaaaaatataatctcacccgaagtcattatatgacaattttgttcaacaataaagtaaaaatatatatttttcaattatttaaaaattcatatgctccacatacatttcattgaaatgcggatacgatgccagctcgatgtaacgcatgttcccgcttatctccagtgctctttcccaggcttcctgcgataaagctgccgaaacagctccgtttcctgccgcatttcccacttcttttgccttgtccaaaagctcctgtggaaacaatcctattgcagccgcacttgctttgtcaatgtagtttccaaagcctcctgcaaatgtgagaacatcaatattacaaggcgtacagccatattccttaaacaatacttctattccggcggctatcgcgcccttcgcaagctgcagcttcctgatatcctcctgcgtaatgtagactccaggtgcaatatgaacggcgagagaggactctgtgctctgtgcagtctcctccgcttccacctcaaacacatacgacctaaacagtataggaagctcctgtccgcttaaaatcgtgccgttttcatctatgattccggctttcagaagaacggcaagcgcatcgataagccccgaaccacacagtccaacaggtctgtcatttccgataaccgaatacttaattctgcgcccttccagccataccttatccacggctcccttagacgccggcatacccagctcaatctgcgcaccctcaaaagccggtcctgccgccgtggcacagcacacatatctgtcgccttttccaagcgccatctcaccgtttgttccgatatccagatatagcgtcagctcgttgcagttcactgtctccatcatacccgctgtaatatctccgcctacaaagcctgatacagccggaaatataatcatggtttgacaattttcaagtcctatatccaaaggattaaattccctgccaaaatattcatccggcataaacggtgccttgccaagcttttccggtgaaattcccataagcagatggcacataactgtgtttccggcaactgaaaaccggctgactttagttctgccacattccgtgagcatttctgatatccagccgttaagcagggacactatctgtgtctgcatcatctgcaggccgccattcgctttatcgttatcatccgccctcgctgcagcatcaattctggaaagtacatctgctccaaagctgcgctgtggattggcaccgcttctggttgagataatctgcccggtctctttatcaatcagataacagactactgttgtggttccgatatcacaggccgccagagtgtcttcatttgattcgactttttcagattcatttgcagtctcttccttcaagacaacattcctattcacatgctcatttacatgctcattaaatttttccgatacatttcctccatttttcagaacaaccatgctgtcttctttggttccggtgctttcttttctcccaacaataatttccataccgtcacaaatcttcgtctgacaggccagcacgtccttatagtatggttttgtcaccgtcaccttgcacttgccgcaggtgccttttccaccgcacggtgtttctatccctgcaatgccgtgactgcggcagtattcaagaatagtggttttgtcggttgttttgctatctgtgttaagatttatggtaattcgctgctgcatatagtttacctcatttgacattgtactattatggcttttttctttgattgtatgataccacatttatatatacttttgtaaacaaagcacgagtatcgtgcggttttgtgaatgtgagtgggagtgattctgaatagttacctttaatataaagacccggacaaacgcccgggtcttcattgatccatatatactatgccgtattacactatgtctgatctatatcatctaatccatgtcatctagtctatatcatctaatccacgcaacctgaattattcaatttggtaagtgctgcaacaagctcatccatctgcttttcagatgcctcattgagagtagatttaattgtaacaacaggctcaacacactctatgttcttgaagccctcaacaatagccttcatctggcgtgctgctgtaggagcccatgaaccgttttccacgaaggcaatcttacgattctgataagcctttgccttgagatgatgtaagaaatcctccattggtgggaaaatgcctccatcatatgtgcatgcgcagagcacaagcctgtcgtatctgaacgcatcctcaacagcctctgccatatcatccctgcaaaggtctgtaaatgcaacctttacacctgtagccttgagcttttctgctaaaagctctgctgccttctttgtattgccgtgaatagaagcacatgccacaaggattccctcatcctcaggctgatagctgctccatgtattgtatttatctatgtagaagccaaggttctctgtgagaatcggtccgtgaagaggacaaatcttttcaatgtcaagccctgctgcctttttgagaactgcctgcacctgagcaccatactttccaacaatattgaagtaataacgtcttgcctcacatgtccagtcctcatcagtatcgagcgcaccaaacttaccaaagccgtctgccgagaaaagcaccttgtctgttgactcgtactccatcataacctccggccagtgaaccataggagccatgacgaatgtaagctcatgctttccaagagaaagcttatctccctctgccactacaacctttctgtccgttaagtctatatcgaaaaactgtcccatcatgttaaaggtctttgcattacctacaatctgcatatcaggatatgtctctgcaaccttctggatattggaagcatgatccggctccaaatgggaaacaacgagataatccggctttctgtcgccgagcgcctctctcaaattggcaaaccacttatccgtaactcttgcatctgctgtatccatgatcgcaattttgtcatccataatcacatatgagttgtatgaaacaccgtttggaacaacatactggctctcaaataaatcaatgtccttgtcgtccacaccgatgtaaataatgctgtctgtaatcttcttgtccatgataggtacctcctgctaataatctccagttaaattagtaattattactatttttgattagattatatgacaaaagtatcatttggtcaaccgaataaattgtatttttttgtattttttgatattctcgcctaaaggttacactgaaacgctcatccacttttagttgcaaaagtatattttcaacaaatctgttgttgctttgtcatttatgacagcccgtcctattgttatgccattgttgatgataatatattctccgttttcatatctgacatttacaaaatcatcttccctttttaagtctatacatatacttgatataattccgcaaatctcctcttgtgagcttccgctttttatctcataagcataatccgcatctcctatctcattcagatcagttaccaaacaatactccgctccattcatcagcatttcttcattcaaagtgggtaattgagccgtcttatactcattaaataaaaagataactacaagcgcaatgaatgtcggaaaaaagataccgccaaaccgctgtgcataattttgttcttcccaccgcttgctatgacgaccaaacagcggtattttcatctgcaccaaacctgctcctatacttacaagcaaaaaataaaatataacttttatcaaagactcatccccatttaatcattaataaaaatatcgttcctaaaacgacgcctactaaccatataaagcgaaacaccttgttatatctcgaactattagaacacggaacaagccaatattcctgtggaacccccaaaaggtattcttttaattcctgcttcaattccatgactatactccacattaatccagacagcacaatgcacaccgttccataatatgtaattggtgcatttgtaaccacagcaaagaaataatgtgccatcttaagaaggaagatacaccacgcaatacagcatggaattgtaaacgcccttttcattttccacttcaaacccaatataacctctggaacgaatacagtcaatgcccccatcggcaatcctcctgttcgtccatgtgtgaaatcgctctccgactccaaagaccaaattcctgtcaatactattactgctggtattagtatggtgcagaacaagttatatgcaataatcaacacattttcattgtcgtcgttcataacttagcccccaatcagttcatcaagcctgatagccactcttcctgacaatgaataatgcaatgctgttagctttgccttatcgtacaaatttgcatacacgttataataacatagcgatattgacataccaaagccaaataatgttgttcctgccaatactcctaaaaatcccgtaacacatgcatcaatatactgttggctgacatcctccggctccaaatctacatacattgcatttaataattcatttacagaagccgtactctcatagtggtccttaaatgaagtgacaattaactttgctcttgatgcggttttttccggatcaaacgtagataaaccatatatcgcatttgcggtatttatggatataacttttccctcatccaccgcggttagaatgtctgacgaattatttaccgcagacttgaactcatccataaaattaaccagatttgtagagaacatagaaaacttactttgtgctataaaattctcatatgctgtaatatcatctgaagtaataacataagcatatatattatcaaatcctggactttctttagtataattaggattgtctatataatgggacatataaagataaagtacatatttgttaaaatctgctgtgttatatgtattaccatatctctctaatgctacttgtgtaacatattgcatcctttcattctgttcttgtggggttgctggcggattaccgttctgtgcataagattgaatatacccttgccctgctattgcgttttctaatgcctttgtttctactgtttctactgataatctagctatgtccgtgttcaacgacgcataatatgagtcatctttcctttgcatctgcattatattggcaatatcctccgaatcaaaactaatattctcccatgactgtcccgctactgttatatcgttcagcactgtcaacatatcatccggattaatccgagccgatgatgctgcatatatcggctgaatagaacttccaatggttgaaataaacatcaaacatattgcaattaccacgctaatgactttcttaatcatattgacccctcctgttttttttcggtagtgtcaaaaactacccattttattgtt

SEQ ID NO: 1452 - DNA, 10360 bp, Unknown
  gut microbiota DNA sequence
gattgcattaggcttcttcatatgtatgggaaaaatccggtgtgtgtggtgccggatatgcttgacggcatgagagtgacggagcttgcggagtattgcttttctttcaagagcatgcctgaaaaattgaaaacagagcttggaattgatgatattctgcgtcctgatatgacggaactgtgtgatgattatatcgagagggtcatattgccggacggaatgcaaaagattggcaggctctgcttttacaattgttcaaggctgtctgtgcttgagctgccatccgacatatgtgatgtggatggtgacgctttcatgaactgcacaaaactttatatgcttgtgatgagaggctcaccgaaggataagtcgtgtcttaagcagattctttcacagataagcactcttgtgagggttagatgggctgtcagtgatggaaatgcgattgcgcaggcatgttttttcgagtacgaccagacatatgatgagattggtcctgctcatatttttaaactgaacatgaacggagaaggctttcgcgccagacaggcttttatggaccgcgtgtttgtgtggaagcagtatgatgaaatattttcagaggcgattgcgcaggagagtgaggatgatcttttagatatggctttttacaggcttatttatgcgtatgagctttcaaaagaagctaggcagcagtttttggagtatattgtcaatcataaaaaaaggctgtctgagcttatcataagaaaaagggattcgggtttgctgcagagttttctggagcttaaagacgatgaggagaattttatcgcagatgtcctggctgttactgatatgcttgcacttgcagcacaggatgaatggagtgagggcagtgtgattttgcatagatttaagaaggaaaatctgtcggtatccaggaagaggcggtttgaattttaaatttaagtgtaaatgcaaaggttatgttattactaaaaaatatttgacttttttcaaaaataaaaatataatagcctatgaacgagtagcagactagcgtaaatccagtttagctgctcgtttttttgtgcacctgctgtcgcacatcattaaaatatatagtgcattataaagtgtgtagcttatcagcgtaagtccagcttatgagataagagcgcactttttttatgcagaaaaggaggaataagttaagatggcagaaagtaacaagatgaagaagatgccggtaaataagctcatggtacagatgggaataccgatgattttatctatggcattacaggcagtttacaatattgtagacagcgcctttgtgggaaatatgaggtcaggaagtgaggcagcacttaatgcgctgacactggtatttccggttcagatgcttatggtagcagttggaattggaacaggagtgggaaccaatgcacttcttgcaagaacacttggtcagggaaatagtaaaaaagctgcaaaggttgcaggaaacagtttattccttggtgcaataatttatatagtatgcctgttgtttggaatttttggagttaaagcttatatttcatcacagaccgttgatcctcaagttatttcaatgggaacaaattacttgagaatatgctgtgtgatttcatttggaattattttcttttcactatttgaaaagctgctgcaggcaaccggacgttctctttattctacaattggtcaggtagttggagcagtggtaaatattattcttgatcctattatgatttatggtattggaccggttccggaaatgggagttaagggcgccgcatatgcaactgttatcggtcaggttgtgtctgcaatactgctgtttgtgtttcatatgaagctgaacagggaatttgagcatgatacaaagtatatgaagcctgatggaggaataatcaaggaaatttatgcaattggacttccggctattattgcacaggctttgatgtcaattatggtttacgtgatgaatcttattttgaaatttagtccttcggcacagactgcatatggtttgttttataaggtgcagcagtttgtattgttccttgcattcggactaagggatgcaattacaccaattatagctttttcatatggaatgcacagcaaaaagagaattaaggatggcatcaggtatggattgctttatacgattgtgcttatggtcataggagtagcgattacagaaattttcccgggagaatttgctgctttgttcaatgcaggagcatcaagagaatattttatcggggcaatgagaattatttccatcagctttatttttgccggaataaatgtggcatatcagggtatttaccaggcgcttgatggtggtatggaatcgcttgtgatttcactgctcagacagcttataattatattacctttggcaggcatcttctcatttcttgtaagaggcggacatattggagtttcgctgatctggtgggcatttccaatcacggaggtgactgcttgtattgtaggatatttatttttaaagagaatcaataaaaataaagtggaaagcttaaattaaggaggcataagccatgacaaaaagaatcattacgataagccgagagtttggaagtggcggacgttttatcggagaagaagtcgcaaagaaacttggaattaaatattatgacaaggaaataattggacagattgcaaaagagtcaggactggcaccggagtatattaaggaaaatgctgagctgtccccaaagaaagggatttttgcatatgcatttaccggtcgtgatattacaggaaaatcagtagaagatatggtatatgaggcacagagaaaagtgattttggatttggcagaaaaagagccatgtgtgatcattggaagaaatgctgattatattttgaaagacagggatgatgtattgaatgtgtatatccatgggaatatgccggaaaaaatacagcgtatctgtaagctgcataatacttcagaagctgatgcagtaaaaatgataaatgacatagataaaaggcgtatgacaaattataatttttacacggatcagaaatggggaaaagctgctaattatacgttgtgcctgaacagctcacagctcgggtatgacaaatgtgagagtataattattgaatgtgtatagtgtaataaacttataatcccgtatagcttatgattgtatcatgaactatccgggattactttttaaatatactttttaagatgttgtttgtgagtcacattttattgagaaaataaggttactatagtataataaactctgaaaatattgcagcagaataatagggtttgtgaagtatatgggaaaggaggcagcttcatgaaaaaacatgtccagacagattcagagtggcaggaggaaatgtcacagaaaataatagatgaaatacagtgcgagttgtatctcgacatgccttttatgaagctggcgctctcggctctttcgccgaaagccaacgagcagctttactccatggcaactgacggcacatatatttattacaatccaatcaggctgattgatatatttaagaaaaatggcatgtatctgaaccgggcttatctgcacagtgtgctgcactgtctgttttttcacctgtggactaaaggtgagagggatgaattcctgtggaatacagcatgtgatataatggttgagtacacgattgatacaatggaaaagaaaagcacaaagcgtatcctaagttatataagaaaaatcacgtatgagaggcttaaaaaagagcatgtcgtgattgctcccggagccttgtacgcgtggctatacaagcagtatgcagaaatagaggctgaagaaatcacggatatagatgatattgcaaacacaaaggataaaaatgagcttgcacttctggcacgggaattttatacagacgaccacgctttgtggccggaggagaaaaacgacaatgctatgccactaagttcatctgatgcaaaaaagcagtggcagaaaatatccagacagacacgcatggagaaaaaacattcaaaggacagtgaatccgagggcgagcaggtaatgatgagggagctgtccgcgaaaagaagcagacgaagctacaaggagtttctgcgcaggtttgcagtgcttcgtgaggaggtacacgcagattatgattcctttgatatggggtattacgcgtatggactttcgctttacggcaatatgccgctcattgagcctcttgaaacgagggagacatacaagataagggattttgtcatagtacttgatacgagctattctgtgagcggggagctggtggagcactttttacaggagacctttacaattctcacggagtcggacagcttttttgtcaggaataaaatacgcatcatacagtgtgatgacagcgtaaagacggacgaggaaattacagatgaaaggcagattaagccgcttttaaacaagtttacgctcgtaggaggcggaggcacagatttcagaccggcattttcgtatgtgagagaccttctggataagggagagcttaagaacatgtgcggacttatatattttactgatggcaagggaattttcccggcaaagtgtccatcgtacaagtgcgcatttgtgtcggttggtgcatatgagggtaatgaggtgccgccatgggcgatgcaggtggagctggaggaaacaatatgaatataaaacaggcaaaaaacgaagtaaaaaatacagtgaaagcatacctgtcaaaggatgcacatggagagtacgtgataccgcagatcaggcagagacctatgctcttaatcggaccgcccggcgtaggaaagacacagattatggagcagattgcaagagagtgcaaaataggtcttgtggcgtataccatcactcatcacacgcgccagtcggcggtaggactgccgtttataaaggagcgtcagtatgacggaaagagctattccgtcacggaatacacgatgagtgagattatagccagcgtctatgaaaggatggaagcaacagggcttaaggagggcatactttttattgatgagataaactgcgtgtccgagacgcttgcgcctacgatgcttcagtttttgcagtgcaagacctttggcaatcaggctgttccaaagggatgggtgattgttgcggcaggcaatccgcctgagtacaataaatcagtgcgcgattttgatatggttacgctcgaccgtgtcagatatatatctatagaagcggactatcaggtgtggaaggaatatgccagagatgtgcatatccatgatgcgcttttaagctatctggagcttcacccaaacaatttttacagggtggagaccgacgtggacggcatgaatttcgtcacggcaagaggctgggaggatttaagcagcctgcttaaggtgtacgaggcgggggagcttgcagtcacggaggatgtaataggtgagtttatccatcatcctgatatagcagaggatgtgtacgcatatctggaaatctataggaaatacaatgaggattacggtataagcgatatactgtccggaaatgtgaaaaagtcagtgtataaacgggtgtttgatgccgatttcgatgagagaatcactgtggtgaatctgcttttaagcggcttgacagttgttttttcggatgtggccagagagcggaaaatggtgcagctgtggtatgagtttttgaaggaatacagaaagtcacaaagaagcactgaagagcagcatgctctgtacaacagtgctgtggagcagttttcaaagaatatggagatattgaaggaaagctctcttattttgccgaaggagtattatatcaggcaggatgtcttaaagcatataaagggggattttgatacggtgatggatgattttaccgaagaatcagagaagctttcaactatggaggatgcggcaggagagaagctaaaccacgcatttgattttgtggaggatgtattttcagacggacaggagatgcttgtctttgtgacagagctgaccatcacaccggaaatcagcagctttttagctgagaatgaatgtgaaaaatttgatatctacaatgaaaagctcatggttggaagcaacaggactaagcttttaaaggagcttgagagataaattctggtgatgtatgcagggaagatttgaaggaattatctatgatttatatatttagcgctttttatgctgaggcaaaaaatataatagaccactatggcttaaaaaaggaaaaaagccttgagacggtcagatttgatgtgtttgcaaatgatgatatcaggcttgtgataacaggtgtaggagaaatcaatgctgcggcagcggtttcaaatatcggtggtgcgtatgggatttcaccggatgatgagattttgaatgtggggtgtggcgctggttttagcagtgatatctgtttgggcagtatatttctgggaaacaagctcactgagcagatgacagggcgtacattttaccccgatatgctgatgaaagcaaatttaagggagtgtgaaataataacggccgtaagggtgcttaaggaaggacgcgaacaggttgtatatgatatggaagcagccgccatatatcaggcagcagcatttttcgtgggaccgcaccgtatgcattttataaagctggtttcagatgccggtgagagaattgaccagtcaaaaatcacagggctttttgatttgcaggaagaaaaaatatgcggctatattgatatacttttaagtgtaggtggtaataaaacttcaatagatgataagactaaaggcgaaaatatggcagacggcaatgcgacagatgatactaaatccacttggaatattgacaggctgaccagcgatatgcgctgttccaaggtaatgggagatcagctggcacagcttataaagtattgcagactaagtggtatagattataaagctgttctggatgagtactatacaaatggcttgctgccgtgtgagagcaagcgtgaaggaaagaaatgtctgtttgaattgaaacagagattgttgtaagaaggaaatgtcaaatgtgccaatacaataaaatgttttcacatgtatatgtggaaaaaggcgtggccgagcacccacgtacaaagcagattttagaaaaactgaataatacaacagtcatagaaattgaccactacaaggatgttttctgccgcaaaaagcagagtatttctgctcaaagcaatgccaaggcgattattctggcagagaatacaagcggctgcatatatgaaggtgcaccggtgtgtcagagctttggaaatgataatttctactattgctcatgcatgatgaactgcatatttgactgcgaatactgctatttaaagggcatgtatccatcaggtaatcttgtggtgtttgtaaatctggaggatatttttgcagagcttgaaagtcttttagcgcaaaaaagcatatatctttgcgtgtcatatgatgcagacctcgtggccatagagtcgcttaccggctttgtgagggaatggattgcttttacaaaaaagcatgaaaagcttacaattgaaatccgtaccaagagtggcagacgtgacttgtggagcaattacgaagcctgtgacagggtaattattgcctatacagtttcgcctcaaagggttgcagcaaagtatgagcattttgcgtccgcacctatggagcggattcaggcagcaaaatgtgctatggatagtggatttccggtgcgactgtgctttgatccgatgatatactgcaaggactggagaggtgaatacaacaggctggttgatgacgtgttttcacagatagacggttctaagctgtgggatgtgagtatcggaagcttccgcatatcgcaggactatttaaagaaaatgcgaaaagacatgccacatagcgctgtggtgaatttcccatacgacaatgtgaatgggtattaccagtatccggaaaacatacgaagtgatatggaagagtttatgataaaggctgtctctacatatgtggataaggacaggatatttatgtggaagtgatatttataaaggagtaatcagatgaaaaaagcaattgtaaccggggcgtcttcggggatcggaaaagctatatgtaagcagcttgcagcaaagggctgggtggtttacggaataggaaggagctttcaaaaaagcgatgatactaccgggatagagcatatagtatgcgatattaccgataccgcaaagctcactaagaaaataaaagaaataaataaaaatcatgacatatcccttctcataaacaacgccggagttggcttttatgctcttcatgaggagcttaatcctgtaaaaatatcacagatggtgaggacaaatcttgaggcaccgatgattattacaaatctgctgcttcgcgatttaaagaaaaacaaaggaacgataataaatatctcatcaatcactgcaggtaaggccaatccgcatggctgtgcctatggtgccacaaaggcggggcttacgagcttttcacacagtctgtttgaggaggcgagaaagtatggcgtgcgcgtggtaaatttagagcccgatatgaccgacaccaagctatacaggaatgctgattttacagttgatcaaaatgaagctgcaaggctgcaaccggtggaggttgcagacgcagtgatttatgttttggagcaaagagaaggccttgtgatgacagatatcaccataaggccacagcttcacagaattgctagaaagtaaactatttatattttaaaaagcatcaaatgccattcgcactattgacttatagtcagtaagcgtctggctcttttttattttcttccaaagcttctcagagtccgggaacagcccatgcatatatgcccagatttccttcatgcggaaaatggcatccttttcaccggaaaagatggacagataaccggataaaatctcatcatgccagttttttaagcgctcgcaaagctctgctttatccatgcttatacccttaagctctgcgataagagcaggatttgcaaacagtccgcggcctatcatgatttcatcaatatcagggaagcggtcggttagagcattaaaactattagtatcagtgatatctccgttgtagcagagtatggttttatcaggatttattttctgtatggcgagggcgaagtcatccaggcgtggtgtatttttataaaaatccttctggactctaggatgcaccgtaagctcacttatcggatatttactgtatatttcgataagctttggccagagctcatcatcgttaaagcccacgcgggtttttattgaaacaggaaaatcggcttttgtatacagttcatcgaggaagctatcgagcatatcaggatatgcgagtatgccggagcctcgtttcttggatacgacggtgcctgacggacagccgagatttacatttatctcatcatatccgtaaggaacaagctgcctgtgcaggtcgatgacctcgtctgccactatagacatggcctgcggtatgagagtgattccgtcattgttcaccggggctatgtctctttttattttggcattcatacgctttgcagcaggaatgaatggtgtgtagtatttgtctatgtagtcaaaatggtggtgaaaggcatttcttactatatatcctgtcagtccctgcatcggtgcgagaaaaaatttcatgtgattgtgaatctcctcatttatgatttatacatcgaattgcatgcaggcatgcagcgatgatactttttgatcctttaatcataatatgtgaaaaagcctgaaatgtaaacccccataacgtgaaaagaagccgagggaagcggcttcttttcgaggagtttagtttatgaaaaaatgtttaaaaaagggaatttgtaaaggtgtatctcctttacgagtattactatactaaataaatttgtccaaattgtgtccttaatcgaaaagaataataaaaaacttaaataatttatgaagaaaaaagctaaaaaattcatttgaatttgcacattgtatatattgaaaaaaaaatgataattagatacaatagacagtaaacggataattgtatcggttgaatacttatgattagggagcagataatatgagttatgcagataaggtttttgtagcgatgtgtcaggatattctggaaaatggcacaagcactgagggagagctggtacgtccacactgggaggacggcacaagcgcctatacaataaagaagtttggtgtcgtcaacagatatgatttgtcaaaggagtttccggctatca

SEQ ID NO: 1453 - DNA, 21681 bp, Unknown
  gut microbiota DNA sequence
ctacgcagtaacttagagtatgtttgaaatcacttcaacacttagcaacgctcgtacacggatgtacgagcgagtccatactgagccacgatggcgaatatggacggttacgtactattgtctcaacctatatgtgatttcttacatactcttagttgcggagtaaaatgagtgcggaatgtatatgtatgacggattctgtactactgtcaatatactaaaatattcctataaattaaatcatatattatataaataaaggaatgtttcacgtgaaacattttgctataatgcaatatatatgtatagtacatccacaatttaaggaatccggcatacatatacatttcaaacgagtctacgcagtaacttagagtatgtttgaaatcacttctatgcatagcaacgctcgtacaaggatgtacgagcgagtccatactgagccaggatggtgaatatggacggttgcgtactattgtctcagcctatatgtgatttcttacatactcttggttacggagtaaaacgagtgcggaatgtatatgtatgacggattacgtactattgccaataatctaaatcatatattaaaagaggaatgtttcacgtgaaacattcctctaataaaattccaataaaatataaaacgtatattacataatctgaataatgttgttacggattgcaaataccgcagcctgagtacgatcagtaacctcaagctttttgaaaatacttgaaatatgattcttaacagttctctcactaatcttcatttccttagcaatatctctgttaaacttaccaacagccatttctttaagcacttccatctctctcttagtaagggcatctatcttaagctcatcctcatttttctgaatcatcttagaattaagagccggaataagacttggctgtatataagtctcaccatcagcaatagtgaaaatagcctttttaagctcagcagactcagaatccttcagtacatatccgttgattccgatatctacagccttcataagatattcagtctcattgtgaacagtaagaacaagtacctttaccttagactttctgtcctttaatgcttttaatacctcaagaccattcatctttggcatattgatatccaaaagtaatacatcaggtctaaaagtctttaatttatcaagacaatcctcaccattctctgcctcagcaataaccttgatatcaccgtcgagctccagcagatttttaagtccctctctgatcatagaatgatcatctgtaatcataatgttaatagccataatttaatcctccttatttacaggtataattaccttaactatacacccctcaccgggttttgatgaaatagatattttaccggaaagaagataaattctttccttcatcatagataatccaaagcctgaattatcatctcgtgtaaactcaggaatagcagatgtatcaaaaccatctccatcatcctttattgtcaaagttagtgattttggttcatactttaatgaaacattaatttctctggcatgaccatgcttgatagagttactgcaagcctcctgaatgaccctgagtaaggttagtgacacaagactgtctaccatgtactcatcacctgatgtcttgaaattgcatcttatattatttgaattgcgaagcttatcaagcgcacgctcaacagtaatattaaatccaatatcatcaaatgacataggtcttaaattataaatcatatttcgaagctcattgataatatccttcagtatctttccctgagacgtgagctcaagccggcacctgatagggtcaacatccataagtttaagacaaagctctgtcttgtgagtgagtgatgtcagactctgtacagtagaatcgtgcaaatcacgagcgatacgctgtctctcactctcaacagtctgtaaaatcaccctcttaaaagcatcactatcctcttcgttgataacatcagatatggcctctgaaatttctacttcattagttgtctcatcagaattatacactctgataacactgttgatttcatcaatcttgcaatcaacatcagatatctgtttgtgtaaagactttatctgaggctcaatcagcttctgttcttccttaagttccttaactttactcttattatatgaattgatttcacgtggagtaaaagcctcaaagctttcatcggattttccttcaagcatctggataatcttgatattttctttaaaatgattctcagcggcagtaagcttttctataagcgcatacttgctgtcataaaattcatctcttgttttctctaaatattttttaaccataatcaccgaacttttgtttgtataattaatttatctacgatataattatatatcatttttactatatttaaaagcaattataaaaaataattgtataaaacttcttttttgttataatatagttataagaatacaaaatcaatatatcaaatttttcagataaaaacaaggaggttataacatgaaaaaaagtacaaaaaatctgctttttctcacatctgcagtgattgccggaatgcatatatacaacagagttgtagactctaatgccgaaagaaaaaatgcactcaaagtagacaatggccactactacaaatggaaagaaggaaatatcttttatacaaaaaccggcaccggtaagccaatacttttaatacacgacaccgactccggagcatccggtgaagaatgggcaaaggtagctaaaaagcttgcaaagaacaataccgtatacactattgatttgcttggatgtggccgctcggacaagccttccatccaatatacaagctacatgtatgtacagattatcacagcttttgtaaatgacgtaatcggaaagcctgttaacgtagctgcaaccaatctttcaacagctcctgtaatcatggcaaatgctctgtcaaaggatttatttaataaaataatacttataaaccctgtatcattgcaacagcttaaatgtatacctgacaagagcaccaaatttaagcagaacataattaatctgccaatcataggtacatttatatacaataagcttatgagccctatcaaggtagatttactcttcagaaataaatttatttcaagaggccagctcatatcagataatatgaaggatgcatactatgagtccgcacataaagggcaaagccgcggcaaatatctttactcaagcattttatcaaactacatcaatactaatattgcgcccgctctcaagaacctggacaaggatgtatcaattatagcatcaacaggaataaaaaataatatggatgttatcaacaattaccataagctaaacagtaaatgcgacatcatccatattgcaaatgcaaagctttatcctcagttagagttaccggagaagacagcttcaattattaaaaaaattgttactaactaattctatactttaatccaaaataaagcaccgcctataactattcttcaacaattataacggttttttacaatggtttctttgaaggcagtccggcttttctcggatacttgttgctcgtattcataaccttatcaattatgacaaaagagcgatgattatccgagtagccaaactgctctattttattcagctttcctcccaacagataaatggccgactttgcatctgccacctcgctctcgcactcagctgatttatatgacacaaagcagcctcccattttcacaaacggcagacagtattctgaaagagtagacagatttgcaactgctctcgatacacaaatatcataagctgccctgtgttccttatccctggcaaaatcctctgccctgccatgaactgcttcaatatccttaagctcaagcgcttcaataacttcatttaaaaatccaactctcttattaagtgaatctaataaagtaatcttaagctgaggaaaagctatcttaagaggaataccaggaaaaccagctccggttccgacatcaatgatatttttttccgcgtttaaatctaatgtgtggcataaaaacaagctatcaaggaagtgtttctctattacctcgtcgaaatctgtgatggcagtaaggttcataaccttgtttttttcgataagcatgtcataatatagctcaaattgctctaattgtgaattatttaatgtacatttaatttttgataattcatcagtgaagtgtgtgaaatcatatttcatattttattctccattattattgttcaacgcttgtattatctgggtttaatctagaaaataaatcaggatttgagtattttaattgttccagaaatacaagtaaaaccgatatatcagccggtgtgacacctgaaattctggatgcctgacctatactaagcggctgaaattcattcagcttctgctgtgcttcaattctcagacccgaaatagtattataatcaaaatcagtaggtaacagttttttctcaagcttcttaaaatgagagacctgcttgatctgtcttgaaatataccctgcgtacttaataagaatattaatctgttctcttgtgtcatcagatagcttaggtctgtcgggatctatcggagcgagcttgtcataatccagctcaggtcttctgataagctcctcaagtgtggttccgttgcttagctctatactgttgtatttcttcagaatctcctgtacatcagcccttgcaccgatatttacatgcgacactctctctatttctttatcaataagctctttctttttacatacatagtcatatctttcctttgaaatcagaccaacctcgtatcccttctcggtgagacgcaaatctgcattgtcctgtcttaaaaggagacgatattccgctctagaagtcatcatgcggtaaggttctctatttttcttagtgacaagatcatctatcaatacacctatgtacgcttctgacctgtcaagtatcaatggctttttgccaagtatcttcatggctgcattgatgccggcgataagtccctgacatgcagcctcctcatatccggacgaaccgttgaactgtccaccactgaacagaccatgtattttcttaaactcgagcgatgcatatagctggtttgcattgatacagtcgtactctatggcataagcatctcttactatcttcacattttcaagtcccggaagggtgcggtacatctcatactgcacatcctcaggcatagacgaagacatacctccgacatacatctcgtttgtgtttaaaccctcaggctcaataaatatctgatgtctttccttttcagcaaacttaaccaccttatcctctattgaaggacaatacctaggacctgttccctctatgatgcctgcataaatcggtgaacggtcgagattgtttctgataatctcatgggtcttactattcgtatatgtaagccagcatgaaacctgatcaatctgcacactttcaggatcagttgtaaatgaaaacggcactaccctctcgtcaccgaactgttcctccatcttggaaaaatcaagacttctcttatctacacgcgctggagttcctgttttgaatctgcgcatctcaattccgtgatctatgagcgactgagtcagatggttggctgccaaaagtccattcggacctgtatgagtgatcatctcgccggttaagcatctggctcttaaatatgtaccggtgcacagcacaatcgccttacaatgatataaagctcccgaagtagtttttgcaccgactatattattattctcatcggtaacaatctcagaaacctcaccctgtctgatggtcagatggtcggtattttgaagggtttttctcatttccatactatattccgctttatctgcctgcgcgcggagagaatgaacagcaggccccttcgatttatttagcatctttgactggataaaggtcttgtcaatgttttttcccatctcgccgccaagtgcatcaatctccctgacgagatgccccttcgagcttccaccgatattcggattacacggcatgagcgctatactgtccacacttaccgtgaaaacaataatctcaagtccaagcctggcacacgcaagtgctgcctcacatcccgcatgtcctgcaccaactacaacaacatcataattttcttcaacaaacttactgcacataattgcctactttcccatacaaaatttactgaatatctcatccatcagatcatcctcaaccgattctccgattatgagtccgagtgactcatacgcactcatcaaatcaatcgaataaaaatcctccggcatatcatcatcaatactgttcataacaagcttaagactttccttagcatctgacaatagttttttgtgcctgatatttgtgatataaatctcatcattgaatgagacctctccatcaaaaaacatatcctttattgtatcagaaagctcatctattcccaagctttcctttgcagaaaccgagataaccgttttatccacaagcttttttatatcatctgccgacacctttgaagccagatccgacttatttagtaaaatgattgcctttttatctttaataaaattgataatatcataatcattatcatcgagtaccactgacgaatcaaccacatatatgattaaatcagcttcattggcatgctccatagcctttttcacaccaattttttcaacaacatcctctgtgcttctgatgcctgcagtatcaacgagatttaaggtgattccaccaatattaatctgttcctcaagcacatctctcgtggttccggctatatccgtgacaattgccctgtcacttcctacaagcacatttaaaagagatgactttccggcatttggctttccaatgattactgtgtttattccttccttcagaatccttccattatctgaggtttttaacagactatctatctccacatactcgttatccacaattgcacgtagtttttgtggataaccatccagagaaatatgttcagggtcgtcaagtgccgactcaataaatgcaatctcatgcaaaagctgctctcttatctgcctgatgcttccaagcacggctccgcctagctggcttaaagagcttttgagcgcaaaatcattttttgaatttattacatctatgacagattctgcctgggataaatcaatcctgccgtttaaaaatgcccttttagtaaactctccgggctctgccggtcttgctccgtttttgattactgcttcaagcactctcttcatcacatacacaccaccgtggcagtctatctccacagtgtcctccctcgtgtatgtattgggagccttcatcaaaagcaccataacctcatctattttctcatcgccgtcatatataaaaccataatgaatggtatgtgactgacaggcgcttattttctttttattattcttgcttttataaatcctatctattaccgaaagtgcatcatctccgcttatcctgataattccgattcctgacggagacatagctgtggcaatagccgctattgtatcattttgcatatgaaattcctcaaaaattctaagataatatatattcaaaaaggatacctgaaaccagatacccttttaatgatttatatctattatttcttaagtgtcacaacaacatgtctgtaaggctcatcaccttcgctgtgtgtttcaacaaatctatcattctgaagtgcagaatgaatcactcttctctcaaaaggattcatcggctcaagagaaacaggtctctttgtacgcttaaccttaaatgaaatattcttggcaagattctcaagtgtctctcttcttctctttctgtaatcctcagtatcaatctttactctgtagtaattctcagactgcttattgatagcaagatttgtaaggtactggagtgaatcgagagtctgacctctcttgccgattaaaacgcccatctcaggaccgttaagctcaacatcaacatttctgttgtcctcatccactttgatatcaatagtaacctcaagcttcattgccttaaacacactgtcaaggaattcgcgaatctcatcctcaacacttgcctcggcctttttaaccttgatgacagcatcacggctgccaattccaagaaaaccattgcttcccttatcaattacctcatactcgagcttatcgcttgttgttccaagtttaatagatgcctctgtcaaagcatcgtcaattgtttttgcagatacttcaatgtattccactattttctccccctatttgcgtgaattgcgttcattaaactctttaaccatattagcctttgaagcaagtgagcctgcctttgcattagccttgtactcagcggcctttgcaagcttctcctctgtgcctgctgatacagatacgtttgccttattgtcaattgactttgtcttaatctgagctgccttctttatataatcctcagacagtcccattttttctctcttcttctttgccttttcctcgttctttgccataacagcctcaagatcaagattctcaatatgtctgtttacgaagaactgctggatacctcttacaagtgcagagcagatccagtaaataccaagacctacaggaactgtaaagcagataacaaatgacataaatggcatcatgagattcatcatcttcatctggcttgccatctggtcattgccgtttgtagcctgtggcataagcttgatattgatcatctgtgtcagatatgacagtacaggaataagcagtgcaagtattacaaaaagtaaccacttatcaggcttgtccgtaaagttactctttatgatataccaaggtgtatctgagatattcagtcccaaaaagtagttgaaatgcagtaacgcatcgtgcgtcttctcaactgcgctctggataccatcaaaaaacttgccgtccataagagcatcccagccctttgaaggaagcttataaaggatatcaatgatataattgcttaaagtatcaccacttgcatcggcaagctttgaagccgcatttgaagcattaagaccacttgatgtaacaacattatacttttccatcagactgacaagtgtattctgatatccgcttgtctgctgaattgaatcaacaagccctgtaaaagaacccttaactccgctcagataagcagggatattgtaaaatacacggtacagtgcaaacagaataggcatctgtataagcatctgcacacagcttcccatcggagaaataccgtacttctggtataaaagctgtgtctcctcctgcatggccatcattgaagcctgatcctttttatttttatatttagcctgtatagcctgcatctcgggctgcattttctgtgatagcttagaaaacttctgctgcttaatagtcagtggcaacagacacatgtagattataatcgtaataattacaatacttagtacaacgctctcaactcttccacctgtaatattagatataccactgtatatccaatccatcaggataccgagaagcttggcaattggtccaagaatagagcctggatatgcggttaataaaatgtccgacataaaaacctccattgctgctatggaaccggatcatacccaccctttgaaaaaggattacatctcaatatcctccatgccgcaagcagaccaccctttatggcaccgtacttttgcacagcctgcaaaccatactccgagcaggtcggacaatatgggcatttcgttgatttcatcggggaaatatacttcctataaaatttaatcaaaaatattaagatacttttcaaaacgattccatcttctttttcattattcaaatattttgtttcttaataatcctgtgaagacctccaagatgtaaaacagcactttctatttccttataacccacatgccgcgctgcaactcttgcgatgactacgatgtccaaaccactatcgaacatgtcctcatgtagtctgtagctctctctcacgagacgagtaatatgatgtctaataacactatttccaacttttttgctaactgatatacctatacgattattttctgtgttatttttcagaacatacataacgaggtatctgttagcaaacgatacaccgttattatatacattctgaaaatccttgttttttttcaacgaatctgaaaatttcatttgacgctgtccttctaaaaacaatcaaaaatgaagaaaagaccacaaaaattgtggcctatgctgataatttttttcttccttttaatcttctggctgcgattacttttcttccgccagcagttttcattctctgtctgaatccatgaacttttgctctctgtctcttcttaggttggaatgtcatcttcatatatatccacctcctttacgttaaaaaacatcggtataattataacaaaaattcctgttgtgtcaaggattttctcaattttctttaaatttctacatatgtttttttatcggtttatattccacaataaaaatgtggaaaacgagtttcttctatatatataataattcttgataaccgtctatattttgatataaaccacctattgtgaccaacatattgtggaaagttatcaagatatcaaaaagttatccacaatatgtgaataacatgttggtaactttgtataattgtggttgaaaaatgttaataaagcatttttgtaaatctttttacattgcctaaatgccaaaaatagtgtactatatagtatgtatgggattgtggagaacattcccctaatatactctttatatgttaaataatggagaactttgatggataaagtaatggaaaagtggaatgaaatactacagatggtcaaggaagagcatggtctgacagacgtttcctttaatacgtggataaaaccgcttgaggtgttcgccatagacggcaatacactgtatattctcgttccgtctgagcagatggggctcagctatatcaacaaaaaatattatcttcctcttaaggtagctataggtgaggtgacaggtatcgagtatgatatccagtttattttaccggatcaggctcagagccttaagtttaaaaacaacgatacccctcagcttgagccacagactcctgtaaagggggatcactcaaacttaaaccctaactatacatttgacacctttgtcgtaggtaataataacaggtttgcccattctgcttctcttgcagtggcagaaagcccgggtgaagcatacaatccgctatatatatatggtggtccgggacttggcaagactcatcttatgcattcaataggtcatttcatcattgaccagaatcctgataccaaggtgctttacgttacttctgaagagtttaccaacgaggttatcgaatctatccgtaacggtaattcttctgccatgacaaagttccgtgacaaatacaggactgtagatgtgctcatgattgatgatatccagttcatcataggaaaggaaagtactcaggaggagtttttccacaccttcaacacactgcagacacaaggcaagcagattatccttacctctgataagccgcctaaggagatggagactctcgaggagcgtatccgctcacgtttcgagtggggactgatggctgatatcggtactcctgactatgagacgaggatggctatcctccgtaagaaagctgaaactgacaattttgatatagatgatgatatcttaaactacattgcttcaaacatcagctccaacatccgtgagcttgagggagccttaaacaagcttttagccttccacaatctcgagcatactcacatcactatggatattgctgagagggagctttccaatatcatcacgccggacaagccaagggaaatcactgcacagctcatcatcgaggtagtttcagagcatttccacatctctgtggaccagatgatttcaaagaccagaagcagcgagattgcacgtccaagacagattgccatgtacctctgcaagaccatgacctctgattcacttgatgtaatcggccagcttttgggcggcagagaccactctactatcatccacggcatcaagaaagtcaccaaggattacgaggagaatgacagtacacgtactctcatagaaactatcaagaaaaagattaatccaaattagtttctacctatttatatatgtgctcatttgcatgttaataatttggttataaccttgcttttatttccacatgagcatgttaatgacaggttgaaggaaagtgaataaaaagttatcaatttttatcatttttacttcaacaggtttttaagcaagttatcaagccgcttaaagcttgtctttaaaggctttgaaggggttttaaactttttaacagcccctaagaagaatattacgaatatcttttaaatatttatatatacgcgcaggaaggagtttttctaaatgaaacttatttgttcaaaagcaaatttactgaaaggtgttaatatcgtatcgaaggcagtacctacacgtactacaatggcaattctcgagtgcatactgattgatgcatccgcaaacgagattaagcttatggctaacgatatggagcttggaatcgaaacaataatagacggaactatcgaagagagaggaattatcgctcttgatgccaagattttttcagaaatagtgagaaagcttcctgacaatgatgtaacaattgagacagatgcttccttcaagaccgtcatatcatgtgaaaaggccaagttcaatatcatcggaaaatcaggtgatgatttttcttacataccatatgttgagagaaatgagtctattgtcctttcacaatttacccttaaagaggttatcagacagacaattttttcaattgctgacaatgacaacaataaactgatgacaggtgagctttttgagattgaggagaataagcttcgagttgtttctcttgacggacacagaatatctatcagatatatcgagatgaaaaatcactatgacagcaagaaggttgttgttcccggcaagactctgcaggaaataagcaagattattccgggttcagcggatgaggatgttgttatatacatcaccaataatcatattgtttttgaatttgaaaatactactgttgtttcacgtcttatcgagggtgagtatttcaagattgaccagatgctttcatctgactacgacactaaggttcgcatcaataagcgtgagcttcttgactgtatcgaccgtgctactcttcttgtcaaggagggagataagaagcctattatcatgaatatcacagatggcaatatggagcttcgcatcaattcatttatcggttccatgaatgaggacatcgatatcgacaaagacggaaaagatattatgataggctttaatcctaagttcttcatagatgcacttcgtgttatcgatgaggaggaggttaatttatacatggtcaatccaaaggcaccatgcttcattaaggatgatgagggcaagtttatttacctcattcttccggtaaattttaatacagcagcaaactaggagattttatgaaacagatttctataagagaacaggatgagttcattaagctgggacaggctcttaaaaaggccgaccttgtgagctcgggagttgaggcaaaaattgttattcaggacggtcaggtgactgtaaacggtgagactgagcttcagagaggaaaaaagcttcacgacggagatgttttctcatatgacggcgaaacagttaaggttgttaaataatgattattaagtcaatccaactgagtaatttcagaaattacgaaaaactggatatcagctttgacagtgaaaccaacataatctacggcgataatgcccagggcaagacaaatatacttgaggctgcatatttaagcggcactacaaagtcccataagggcagcaaggacaaggaaatgatccggtttggcgaggatgaggcacatatcaggacaattgtcgaaaaaaatgacaaggaataccggattgacatgcatctgcgaaaaaacggtgcaaagggtgtggccatcaataaaatgccaatcaaaaaagcgagtgagctgtttggtattttgaatattgtgtttttctctcctgaggatctcaatattatcaaaaacggtcctgccgagagacgcagatttatagatttggagctttgccagcttgacaaaatttatctgtctaacctgagtaagtataataagacattagttcagaggaacagactgttaaaggatatagcttacagacctgatttgattgatacacttcaggtatgggatatgcagcttcttgattatggcaggcatgttataaaaaagcggcgcgagtttgttaatgagctaaatgagataatacaggacattcacagcaatatttcaggaggcagggagaagcttatactcaaatatgagccaagcattgatgatatttttttcgaggacgagctgcttaaggcaagaagcagggatttgaagctgtgccagacaactgtcggaccacacagggacgatatgcttttttcagtggacggtgtggatatcagaaaatacggctcgcagggtcagcagaggacatctgctctctcactcaagctttctgagattagtcttgtaaagaaaaatataaacagcactcccgtgcttttactggatgatgtgctttcagagctggatggcaacaggcagaactatctgctcaacagcttaagtgatacacagactattatcacttgtacgggacttgatgaatttgtaaaaaatagatttcaggtggacaaggtctttcatgtcgtgaagggccaggtggaggttattgatgagtaaagaaatacagcagaacaatcaggaatacggagctgaccagattcagatacttgagggtcttgaggcggtcagaaaaagaccgggtatgtatatcggcagtacgtcttcgagaggacttcatcatctggtttatgagatagtggacaatgcagttgatgaggccttagccggttattgtaaaaatattgaggttacaatcgaggaagacaattccataacagtacaggatgatggacgaggaatcccggtcggaaccaatcataaagcaaaaaaatcagcacttgaagtcgtttttacagtgcttcacgcaggtggtaaattcggcggtggaggctataaggtatcaggcggtctgcacggagttggtgcatctgtagtaaatgctctttccacatggctgacagttgaggtctacaaggacggaaatatttacagacaaagctacaagcgtggcaaaacagacgatacagtaaagattgttggacagtgtgacgagtcgcttcatggcacaaaggtgcattttctgccggatccggagatttttgaggagacagtgtatgactacgataccttaaagcagcgtctcagagaaacagccttcctaacaaaaggacttaagattactttaaaggatgtgcgtgagaacagccatcacaatcatgtattccactatgagggcggaatcaaggagttcgtcgagtatcttaaccgtggcaaggaggctctctatgatgaggtaatctactgtgagggaacacaaaacggtgtttatgtagaggttgcattacagcacaatgattcgtttaatgattcaaccttcagctttgtaaacaatgtaatcacacctgagggaggtactcatctcgcaggctttagaaatgccttgacaaagaccttcaatgcctatgcgcgtgagaaaaagatacttaaggattcagatccggccctgacaggtgatgatatccgtgagggacttaccgcaatcatcagtatcaagattgaggagcctcagttcgagggacagacaaagcagaagcttggaaacagtgaggccagaggagccgtagatgcagttgtatcggaaaagctcacatatttcctcgagcagaatcctgatgtagccaaaaatatctgtgagaaatcacttttagcacagagagccagagaggccgcaagaaaagcaagagacctgaccagaagaaagacctctctcgatggaggtactctgccgggcaagctggctgactgttcagacaaggatcctaaaaactgtgaaattttcatagtcgagggagattcagccggcggttctgcaaagacagcaagaagccgtgctacacaggcaattttacctctgcgaggcaagatactgaatgttgaaaaggcaagacttgaccgtatatatgacaatgcagaaatcagagccatgattacagcattcggaacaggaatccatgaggattttgatataacaaagctgcgttatgacaagataatcatcatgacagatgccgatgtagatggtgcccatatcgctactctcatgctcaccttcctctacagattcatgcctgatctgatcaaggagggacatgtatacctggctaccccgccactttacaaggtggagaaaaacaagggtgtatggtatgcctacgatgatgacgagctcaagcagattttaaatgacataggccgtgacaataataacaagatccagcgatacaagggacttggcgagatggatgctgatcagctttgggagacaacaatggatcctgaccacagaattttgaaacaggtcatgatagacggagaaaattcatctgagcttgatgtgacatttaccacactgatgggtgataaagtagagccaagaaaagaatttattgaagctaatgccaagtatgtaacaaatcttgacatctagcagggaggagtaatttaagtggacgacaaaatttttgaccagatacagcaggtcgatttgaaaaaaacaatggagagctcctacatagattacgcgatgagcgttattgcaagccgtgccctccctgatgtcagggacggactaaagcctgttcagaggcgagtactctactctatggtcgagctcggaaatacacctgacaagccacacagaaaatgtgcgcgtattgtcggtgatacaatgggtaaataccatccacacggagacagctcaatctatggagcactcgtaaatatggcacaggactggtctatgagatacacactcgtggatggtcatggaaactttggttcagtcgatggagacggagccgccgccatgcgatacacagaggcaagactctcaaagatttctcttgaattaatcaaggatatcggcaaaaatacagtagattttgagccaaactttgatgagacagaaaaagagcctacagtgctcccatcaagatatccgaaccttttagtaaacggaaccacaggaatcgcggtaggtatggcaaccaatatcccacctcacaatctgcgtgaagtggtaaatgccgtagtgcgccttatcgacaacgatatcgaggaaaaagaaaccacaattgatgagcttatcgatgtggtaaagggaccggatttccctacaggcggcataattctcggaacaagtggcatcaaagaggcttacagaacaggccgcggcaaaataagagtccgtgctgtcaccaatatcgagccgatggaaaacggcaaaaacagaattgtagtgacagagctgccatacaacgtaaacaaagctcgtcttattgagaaaatagccgagcttcataaggacaaaaagatagatggaataacagacctccgcgacgagacaagccgtgagggaatgagaatcgtggtagagcttcgccgagatgtgaacccgagtgtagttttaaatctgcttttcaagcatacacagctccaggatacgtttggagtgataaaccttgcactcgtaaacggagagccaaaggtattaaatctatacgatctgctcaactactatctcatccaccagaaggatgtagtgaccagacgtacaaagtttgatctcgacaaggcagaggccagggcacatattgtagagggtctcattattgcccaggacaacatagacgaggtaataagcattatccgctcaagccagaccacgcagcaggcaaagaccagattgatggagagatttggcttgactgatgaacagtcacaggcaattgtcgatatgcgtcttaaggctcttacaggtctggaaagggaaaagctcgaggctgaatataaggagctcatggctcagattgcgcagttaaaggcaattcttgccgatgagaaaaagcttcttggagtaatcagggaggaaatcatcgcaattgcagataaatacggcgacgacagaaagacagaaataggctatgacgagtatgatatgtcgatggaggatttaattcctgagacaaatacagtcataacaatgacaaaggtaggctacataaagcgcatgagcactgacaatttcaaggctcagcaccgcggtggcaagggaataaagggaatggagacaatcgaggatgattatatcgtcgagatgctcatgaccacatcacaccactacctgatgtttttcacaaatacaggaagagtatacagaatcaaggcatatgagatacctgaggcaagccgtacatcaagaggcacagccatcatcaatctcataccgcttcagcctgatgagaaaataacagccatgattccaatcaaagaatacgaggatgacaagtatctgttcatggctacaagaaacggaatagtcaagaaaacgccgataaaggattatgagaatatccgaaagaacggacttgcagcaataaatctgcgcgaggatgacaaactcatagaggtcaaggtcacagacaattcagaggatattttgctcttcaccaaattcggacagtgtatcagattcaaggaaacagatgtgcgctcaacaggccgtacaaccatgggcgttatcggaatgaatcttgcaccaaatgatgtaataatcgcaatgcagaccgcatcaatgggcgaggcagtgcttttggtatcatcaaacggacttggaaaacgtacacgaattgacgaatttaccacacaaaaccgtggcggtaagggagtaaaatgttacaagattacagaaaaatcaggcaatctcgtaggagtcaaatcagttgaaaacgatgacgagctcatgctcatcacaacagagggaattatcatcagaatccaggtaagtgacgtaacagtgcttggacgaatcacaacaggtgtcaagcttatcaacctaaaggaaggtgtgagcgtagccagcatcgcaaaggtagtagaggataagactctcatgccacctgaggaagctaaggaagagactgacgaatcagaaaatagtgacgaagactcagcagagaataataattcacatgccgaagctatcgaaaataacacagaagcataactaaattcataaaagcagggtcataagatcctgctttttgcgaatgtggtgatactattcgagcaatattgagaaaaaatgtttacatgcaagcactatgcatcatatttgcgttttcagagactttgaaagtaataaataaacataatacggaaaaataaatatgtttatccacaaaaacacaaaaaataatattgaattgtggataaaaggtgccggaatttaaaatacagagaataaaaagagaggaaaagaaatgatcagggaaataaacgtttcagaaataacagctgcaataaaggaaatgtgcatacaggcaaatcattttctttcgccggacatggacaaggcacttaaagctgcaacagcaaatgaagaatcacctttaggaaaaaaaatattaaaccagctacaggaaaacttaaaaatagcaggcgaggatatgataccgatatgtcaggataccggaatggcagtttttttcatagaaataggccaggatgtccattttacgggaggcgtattggaggatgccataaatgaaggagtcagacagggctacacagacggctatctgagaaaatcagtggtaaaggatcctctcatcagggaaaatacaaaggacaacacacctgcagtcatccattactcaatagtttccggcgacaaagtcaaaataacctttgcaccaaagggctttggaagcgagaacatgagtcgtgtatttatgttaaagccggcagatggtatagagggagtaaaaaatgcgattataacagcagtttcagatgcagggccaaacgcatgtcctcctatgattgtcggagtcggagtcggtggaacatttgaaaaatgcgcaataatggcaaaaaaagcgctgacaagagaagcaggcatacattcagacatagagtatgtggcagagcttgaaaaagagatgcttgaaaaaattaataatctgggtatagggcctggaggactcggcggaagcactactgccctcgcagtaaacataaacacatatccaacccacattgcaggattgccggttgcggtaaatatttgctgtcacgtaaatcgccatgtagtgaaggaattgtaaagaattactgcgtagaagaaagaaaatggcaattttaattgttacagctacagtgaaatgtgaaccgtaattaaaaagctataatagttacaggttatattatgctggaaaaataaaaatacagtaaaaataaaagaatcaggagaaaaaaatggaaaaacatataacaactccaatcacacagaaaataacaaaagacctgaaatcaggagactatgtatacataacaggtgaaatgtatgtggcaagagatgctgcacacaaaagaatgatagaggcgctggaccgtaaagaagaactgccaatagatataaagaattcgacaatctactatatgggaccatcaccggccagagatggtcgtccaattggctcagccggaccgacaacagcaacaagaatggacaagtatgccccaagactgcttgatttaggtgaaaaagcaatgattggcaaaggaaaaagatcaaaagaagtaatagatgcagttattcgcaataaagcagtgtattttgccgcagtcggtggagcaggcgctctcctttcaaaatgcataaaatcatcagaagtaatctgctatgatgatctcggtgcagaggcaataagaaagatatacgtagaagatttcccggtaattgtggtaatagacagtgaaggaaacaatctgtacgagacttcaataaaagaatttaaaaaaatataaaaatactattgacaaaacaaagaaaattttatagaataaacaatgcgtcacgtaagtgcgtaaaaaatttaaatgatttatgtaaagactttggagaagtactcaagtggccgaagaggtgcccctgctaagggtataggtcgggaaactggcgcgagggttcaaatccctccttctccgctttatcttctacataaaataatttaaaaaagttcttgacaaatgaaaaacattttgatagaataaacaagctgtcgcaagatagagaacttaaaacagagttcaaaaaaaagtgcttgacaaacgaacagcgatttgataaaataatcaagctgtcgcaagaaagcaaaacaaagaacattgataactgaacagtgagaaaccttgaaagattttgagaatcaatcagaacgcttcaatgaaaattgaaga

SEQ ID NO: 1454 - DNA, 1608 bp, Unknown
  gut microbiota DNA sequence
actggatagttggtctcttttctgttatgctttgatttctggcggctggaaaggagtcaccatgtcaaagtttttatcttatgaagatcgaatgattattgctcaacgccttcaggagaatgtctcctttggggcaattggtacagagttaggaaaggaccgtacaaccattgccaaggagataaaaaagtattcctatgacaggaaaagcggtcgtcctggatatccgtataacccttgtaaattccgtgctacatgcaaagcaaaaaggatttgcggaacaagctgtacacaccaatccgcttacaaatgcagcctgtgctctgaatgcaccttacattgttctgactttgtagaagatgtctgttctgtcaaaaataagccgccttatgtttgtaatggctgcagtcagctgccgaaatgtacgttattgaaacgtatttatgatccggcagatgcacatgagagagcacaccatgctgtttcggaagccagaaccggtatcatgtcaaacgaagatgatattgcaagaattaaccagatcatcagccctttggttaaaaacgggcaatcacctcatcagatctatctggatcatgtagacgaattgatgtgtagtgaaaagacattgtataactacgtggatgcccagctctttgatatcagaaatattgatctgcctcgtaaagtgaaataccgtccccgttataagaaaccagaatttaaagttgacaggggctaccgtattgaacgaagctacgttgactttcaaaaatatctgggagcaaacccggaaacgaccattgtacaaatggatagcgtgattggtcgtgtgggaggaaaatgtcttcttaccatacactttgtagaaagcagtctcatgctggcttttttgcgggatgcaaatacatcagcttcggtaattgaaatcataaacttattggacgaagctcttggggcaaaaacatttagtcgcttgtttccagttattttgacagataacggaagtgagttttcaaatccaaaggaaatcgaaaaacgtagcaccattccgtgcaatagaacaaagatattttattgcgatccaagtgctccttatcaaaaaggagcttgtgaagtaaaccatgaattgatacgtcgtatcctgccaaaaggaagcagtttcgatgaactgacacaacaggatattactctgatgatgaaccatatcaattcttataaaagaaaaaagctgaacaaccgtagcccatacgaaacattcagcttttactatggagaagatgtgcttaagaaactgggatgctcaccggttgccgccgagaacatcatcttaaagcctaaacttctcaaaaagtaacaaataaatttgctaagtgccgccagaatagaacaactctatccaatcaaaacagggatggattctccgaatacaaaaatttcgagagggaattgatctctggttgtcgtacgcaaatttattgctgaacgtattatatcatatcgtaatggaaatgaaaatgcgggaatcttgcttacaaaccgggactttcatttgcaaactgggaatctcggttacaaaacaggactttcatttacaaatggggagtc

SEQ ID NO: 1455 - DNA, 80014 bp, Unknown
  gut microbiota DNA sequence
aactaaaaacggtgtagtacaattagcttgccggtaagtgaaaaatatgagaaaataactacatagatagtaaggaggtagctatggacaataataatatcgggggcatgaatccccaacagttttcacagaacacgccacagacttcacagccacatatgggggtgtcgggtattgaactgcagaagatgcagcaggaggcggagcaaagacggcgtgaacaaagcaggagaaacgcggatttttttggcaggctatgtatacctacgataatatatgcgctgctgtacaccattttcctgtatgagaatacaggtggaatacttgttacgttgtttgcaatcgtcacaggagtatacagcctgtattgtatgaagatacttcatatagaggcaaagccactcactatatggtacagtgtgatgatgatactcacaggcctttcgtcaggcttgaccggtaataaaattatacaaggatttaatttttgctggatacttgtgtttcttgtttttatgctgcttcacaatttctgcaatgacagacagtgggggctcataaagtatatcgctgcggcatttcaggcagtgtttggagcgattgggtgtatagctgagccgtttatggatattgccgactatatgagaaatgaacgcatggatagtgacaatatgggcagtgacagtatggtcggtgacagtgcaaatgcaactgcaggagagcggcatgtgaaaaaacacagaatgctttatgtgtttatcggaatagcaattgcctttcctctggttgtgctgatagtggtgctgctgtgctctgcggatgcggtttttgcctcagtaataaagaaaatatttgctgatatcaatttatttacagtgagcaaggttgtatttctttttgtatttgcgcttttctcatcgtactgtggtataaagtatctgagcaagaagcgtatatcggatgcaccggttgagactccggcatttccggctgcaatcggtatcactgtagctgcaactatatcagtggtatatgtatttttctgttttatacagattgtgtatctgttcgggggacttatgcagcttccaagcggctatacctacgccaggtatgcgagagaaggctttttccagctgcttttcgtgtgtatacttaatgtgattatcgtattgctcggaagtgaattgtttagaaagaataaaatattaaatgcatttttaattttaataacattgtgcacatatatcatgattgcatcaagcgcataccgtatgggactgtatgtgtcagagtacgggctgacagctaccaggctttgtgtgttctgggcacttggagtgatagcgctgtttatgctcggagtgattttatctatatgtaagcctgctttttcgctatttcggtacggaataatagtaatcggggtatgttatcttgtgcttgcatttgcaaggcctgattatctggttgcaaggtacaatacagtatgtatggaggatacagactacaaatatctgatgtcactttccacggatgcatctccggcgcttgcagcagatgcagactttatggaaaataagggtatggtcaccatgtatgcaagacagctggcaggtgagacaaatgacagcttaagacagctcaatgtatctcatataaaggctgcacatttattcagagatagcatagatgaggtaaagagctcacagcttatccttttatatgtatattcgccttacgattcgggcagctataacaacaatgataccggtcttgatggcgtggacagcatacagatgggctatcatgtgttaaaggatacagaagatgatgacacagccaactatgattacgacagttatagcatggatgatacaagagtggcggcaccagtatttttcaaatgggtggatgcagtcgaggtgaagaagatttccgacagtgagcgtatcttccttgcaaagattccaagaaaggcattaaaaggcaaagatggagtgaatattgaatacagatttaataaaaatggagatgttatatattcatcccagtacaatgtgattcttgacaagaaaaaaggactcaacgaggtggagctgtcatactatggcggaacagatggcgtggatgtgcctgagtacaatatttatggaaagtaatagtttaaattgtatataattcaaagttgatatggtgaagttgattaaaaactgctatacttaacatgtagtataggttgttaaattatttcattaaggtaggaaaattcatgggaagatttttaaatccgggaaataaagcttttcaaaagacattgaaatcggaaatatatgtggataaaactatgcttttggcatacaccaataaggttataggttctgatatggcatgcatatgcaatagcagaccgaggcgctttggaaagtccatcacggcgaatatgcttgctgcttattatagcagaggatgtgattcctttgatatgttttccactctaaaggtaggcaggcttgattcctttgagacaaaccttaataaatatgatgttattcatattgatgtccagtggtgcatgatggatgcgggcgaagtgcaaaacaccgtgaaatacatcaataacggtattcttgatgagcttataatagcatatggtgatgtgataccggacactgttaaaacagcctatggagccatgtcttatataaacgcagccacaggaaatacctttgttatcataatagatgagtgggatgtgttgataagagatgaggctaataataaggaactgcaggaggaatatattaatttcctcagaggaatgtttaaagggacagagccgacaaagtatattgcgttagcttatcttaccggcatacttcctattaaaaagttaaaaactcagtcagcacttaacaattttgaagagttcacaatgcttgatgcaggagcgcttgcatcatatattggctttacagatgatgaggttaagcagttatgcaaaaagtatgacagggattatgaagcagtaaaaaactggtatgacggctatatgctttcgggtaaacatgtgtataatccaaaagcggtagtgagcgtgatgatgagaggcagcttccaaagctattggtcacagaccggcacatatgaatctctgattccgcttattgacatggattttgatggattaagagccgctattatttcaatgatttcaggaaatgagataaaagttagaacaaccacgtttcagaatgatatggtatcatttaaaaacaaagatgatgtgctgacattgcttatacatcttggatatctggcttttaatcagaaaaatcagatggcatatattccgaatgaagagcttcgcaatgagcttatggatgcggttgaggaaaacaaatgggatgaaatcatgcagtttgagagacagtcaatagatttgtttaatgcaacaataaacaaagatgtaaatactgtggtagcaaaaattgagcagattcatatggagtatacctcggtgattcaatataatgacgagaattcccttagcagtgtgttggccattgcttatcttggaacaatgaactattattttaagccggtcagggaattaccgacagggcgtggctttgctgattttgtttatattccgaagcctgagtatataaatgattatccagcgcttgttgtggagctgaaatggaataagaatgcggatacagccatgcagcagattcgtgagagacagtatccgaattcattattgcaatatacgggaaacatcctgcttgtggcaattaactatgatgaaaaaacaaaagagcatgtatgtaaaattgaggaatatgctaaaatacagaattaatgattgagatatataaatacaaaaacaaatacaaaaacggacatggcagttttgcatgtccgtttttgtttttttataataagtatcgggtattatgaaccgggtaggtttacaaaaagcagagtaaaatttaatcaagctttaatattaatcctaatatacgctttacagaggtctccatttcactatgagagatggcacccttatcataagccttctttacacgatcaggatatccacttcccatcttaagatcatttccggcttttgtctctttgtaatgctcgccacaggtccaccagtcggttgtgaccattccttcatagccccattcatcacgcagtattcctgtcaaaagatcctcgctttcagaggctctgtagccgtttatcatattgtaagaggacataatagcccatggattttcatcctttacaatcatctcaaatgccttcagatagatttctctggcagctctttctgaaacgcgtgaatcgctgtttttgcggttggtttccttgttgttcaaggcaaagtgcttgagtgtggcaccgacattgttggactggattccgcgtaccatggcacctgcgagctttcctgtgacgaatggatcctctgagtagtactcgaagttacgtccgcagagaggacttctgtgaatacagatggcaggggtgagccacagtgcaaggttgttttcctttaattcttcaccgccggcgcgccctacagcctctaaaacatccgggttccatgtgcatgcgagcagtgtggagcatggaaacgcagtggtgcatataccgacctcaggtgctatgcgcactcctgcaggaccatctgctgtcatgacagaaggaataccgtattcaggcatatttccgataccgaaggtatttgcaacaccggtatttggctgtccgccgagcagatgaatgagatcatcgatggaaagctctgatacaaattcatcaagcgtgatacgtccttccacaacatccatgatgtcgtgactgccgtttttagccatgccatcggcaaagcggaagtatgggatggctctctgaccgggagcaacaccctctgtcagggaagggtcaatgttgccaatagctgagtagtcggtgtccacaggctcactttgaggcagagcttcatagcttccgtcagctagcattctctttggcagacttgtaggaaccagctttgctgaaagctgctcagtaattacatcacgatttaatatatatgagtaatcagctttcgtcacgtcacggacgctcgttccaacgtatatatcatatgaaccggcttcaagtacatatgcagattttttaacctttccaaggtcatcatatgatgccatatcgtttatttcccatgtgaggatcataagctgtgattcacccggctgcagttctcttgtcttttcaaaggctgcgagctcctttgcaggcttgccaagctttccttgtggtttagcaatgtatacctgaacaacctcttttccggagaatttacctgtatttgtcacacggacttttgcataaagcttattggcctcagacgtacagttggaattcacaacgccggcagaaacagtctccacatcaaatgtggtgtatgagagtccatagccaaatgggtatacaaccttctcggcagctcccggaattgtctcaaaatagcggtatccgacatatatatcatcggtatagttcacatagtctcttgactcgtggaaattgtaagtagacggatagtcgtcgagtgatttggcaaatgtatcgacagtttttccggaaggattgccatctcctacgagaagctcagcggcagcaagcccgccttcaataccaccctgtaaggcaagcagtgctgattgaatctgatcatcataagcaaaccaagatgtatcaaccattccgccgacatttaaaatcacgattacatttttgaaactggcttttacagtgtcaatcatctccttttcttttacggagagacagaaatcaccatccttaaaaagctctgccgacttttcggtcatctcgcgttcgtagtcccagagagccttgttgtttgggtcaataacactctttctgtcccagccttctccggagtagcggcagattgagatgatagcagtgtcggtatatgcctgagccttgcttaaaagctcagccggtacatccggctctatagtcatgccgggtacagcaccggctgcatactgctttttaatgtcgttgcggtagtaatcacacagctcctcaaatatgcttattttctctttttgaagcttaagtccttcgtagagattgcggatatatgcaacggttacatcaccgcttccgccaccgccctttacatagtcgaaagtaccctttccaaacagggctaccttagaacccgctgcaagagggagtacgttgttttcgtttttgagaagtaccatgccttccttggcagcttcctttgaaagctctatgtgagccttgcttcctgtaactctttcaccatttgccccaagtggaagattaggagtgaatttgaatcgtgaccatttgttcatagcagattacctttcttatatttttattatttaatgagcttcccatacattaatatgtcgggagcttgttcttttcgtacaagatgattgtaaattataaaagcgatatatacaattgtgatactgacattattttaggtcgatattgactttttgcgtgagaggagtatattttgaaggtagaatttcaaactatgaatatttttttttcggaacaattggatatgctcaggctaatatagcatgattaaagggtcaaaaggtatcatagcattaaatacgaagtttgatttagtaagtcagggagaaaattatgcagcaatacacacacgaaaacgtcagatcaataccacatcttccaatctactgcgacagatacgaggactacaggcagttttcaccgaggcactggcatgaccatatagagataatctatgtagtttccggctcactgcaggttgtctgcggtgaaaatgaatatacattgaaagaaaatgaattttttgtcataaactcaaataagatacatggcacgcaaagctatgaaagagtcagggtgcttctggtgcagataccgtatgcatatctggatagctacatagacgattacggacatataaggtttagagagtgctatgagaccgagcatggcagcagaaaatatgagcagatgaagtctcttcttaagtcgatagcacatatataccggaaaaagggcaagggctatgagcttcggcttatggcaaaagtgaacgaattcttatatattttgtttacaaattattcgtacaaagagatgaatgcgggaaaagaatccagacagatagcgcgccttaaggatgtccttagatatgtggcgaaaaactatcaggagccaatagcattaaaggaggcggcagacatagcctcactcaatcaggattatttctgccgtatgttcaaaaaatgcatgggagttacatttctcgagtatgtcaatcaggtaagaatcaatcacatacatgaggagcttctggcaactgaggattccatcacggacatactggagcacaatggatttacgaattataaggtgttcagccggatgtttaaggcgcagtttggcatgacaccgagggaattgcggaaattacaggaaaattaataataaatccggtcaaaaaagttactgatggtgataccggctcaacaaaagaagcagcttcctatacatcaggaagagtttcaacacagaataagcagaccttcatatatggacgatttgaatgccgtgcaaaggttccaaagggacagggataccttcctgcatttacattatcttaaatcttgctgttggtggaagctgggttggaaatccaaacgatgagacaagctttgagaataatccatatgtgatcgattatatccgtgtataccagaaggatagctacgatgaagatgttaaacgtcccggtaaaggaagttacacttatattgtgagataagtttagttatgtcatgaatctgatattttaagaaataattttgtataatacactgctgcaaaaatgtatattatattacgaaaatggattactgctgaatatacgttggaggcagttgtaaccgtagatcacataataagtatagaatggagtaagtaatatgaaatacggatattttgatgaatcaaaaaaagaatatgttattacaagacctgacacaccggcaccatgggtaaactatcttggatcgccggagtatggagcaattgtttccaataatgcaggtggatacagctttgcaaagtcaggtgcaaacggaaggcttttgagatatgtgtttaatcagttcgatgagcctggcagatatatttatatcagagacaacggcagcaaggattactggtcagcttcgtggcagcctgtaggaaaggatttgaatgaatacaagagtgagtgtcatcatggaacagcatacacaaagatgatggctgattacagcggtattcattcagaagtaagatactacgttccgctgaacaagacatacgaagtgtggaatttgagcgtgacaaataattctgataaggcaagaagccttaatattacaggctacgctgagtttacaaacaacagcaactatgagcaggatcaggtgaatctgcagtattcacagtatattacaaagacagtatttgtggagaacagagtgcgtcagatgatccatgccaatcttgaccgcatcgaggatggcaaggaaattgacaacaaggatgtggtaaacagatttatcggacttgcaggagcacctgttgacagctggtgcggtgacaggggagaatttctcggagaatatcacagatatggcaatcctgtcggagtagagagcggaaagcttaacaaccacggcaactacaacgagaatagctgtggagcaatcacaacagtattggagctggcaccgggcgagacaaagacaatagcattcttagttggaatgatagataatgagacagcaggaaagattgttgcttcttacacggatacaaaagctgtctgcgacaaagaacttgaggagcttatcgcatactggcatggacagttatcacatttccagattaatacaccaagtgatgagttcaacacaatgatcaatacatggaacgcatataactgtttcatgacatttatctggtcaagggctgcatcatttacatactgtggactcagaaacggatacggataccgtgatacggtccaggatattcagggtgttatacaccttgcaccagagatggctgttgaaaagatcagatttatgctctcagcacaggttgataacggtggaggacttccgcttgtcaagtttacacacaatccgggacatgaggatactcctgacgatgcttcctatgtacaggagacaggacatccggcttacagagctgatgatgcattatggcttttcccaactgtatacaaatatgtatcagagacaggaaatgtagcatttatagatgaggtcattccattcgccaacaaggatgagggaacggtttacgagcatttaaagagagcaattgatttttcgatgaaccacctcggaaaacatggaatgcctgcaggactttacgcagactggaatgactgcctgaggcttggtgcagatggagagtcaaccttcgtagcacttcagttctactatgcaatgactatattaaaagagtttgcagcctataagaaagatgatgaatatatcacatatcttgatgagagccaggaaaaactcggaaagatcattcaggagctttgctggaacgaggacagatttatccgtggatttacaggggatggacaggttatcggaaagcgtgatgatcctgaggcaaatatgtggctcaacccacagagctgggctgttataagtggatttgcaagtgatgagcaggctgataaggctcttgaaatggtatatgaaagactcaataccgagtatggtgccattcttatggatcctccatatcatgcacacgcattcgacggagcactcgcagtgatatacaatgcgggaactaaagagaatgcaggaatattctcacagtcacagggctggataattcttgctgaggcacttaaaggacatggagacagagcttttaagtattttattgaaaatgctcctgccgcacagaatgacagagcagagataagaagacttgagccgtactgctatggacagtttactgaaggaaaagcaagtccaaactttggacgttcacatgtacactggctcacaggaactgcttcaacagtcatggttggatgtgtagagggaatacttggtatgcgtcctgatttctatggacttcatattgctccgtctattccaaaagcctgggatggatttgagatagagaaggatttcaggggatgccatcttcatatagttgtaaaaaatcctgatcatgttgagagtggatgcaagagccttcttgtaaacggacaggcggttgagggagactatattccaaaagagcttcttagcgagcagacagagattgagcttaccatgtaaattttccgtaggtgggataatgactgctataggattgtatatggtgtgtgaaaatttgatttgtaattgtatagaggattgattgaaaatatgaaaaatatagattttatagacaaatacggaaccttcaggatcaaaaatcccgaaaactacagtgggctgtatctgccgcttgcaggggaaaaagggcttaaatcaagcattacaccaactctcggcggagacagtaaaacgagccagaatacctttcttctggaacctgttagtatagaaaatcttcacaacaataaaggcaccagaaatttctggtgtcggattgtggggaagggcttctggtcagtatgcggatcatctgcacagcaggaggccgacagatttacaggtaatcaggatgaaagtgagcttgaggcaggtttaatgtggcagaagctgcaccgtgcttcaaagatatatgggttagaggccgacacaacatcatttgtcacacttgatggaagtatggaagtcatgcttgtggagatcactaacaagacagatgaggctatggagatagtcccaatcggggcaatcccaatctatggcagaagtgctgacaatatcagggatcacagacatgtgacatcacttttgcacagaatagaaaccacacaatacggcattgaggttacacctgtcctctcatttgatgagcgtggacaccggaaaaatgatataagctacttcgtatatggatcatccggaaacggagaaagtcctgagagtttctatcctaccgttgagcagtttataggagagggaggctctttccttattcctgaggcagtcagaactgaaaaagcaggtgcaaaggccggagaaaaatttcagggaaaagaagcagtcggagcaataaaatttgcaaaccgtattataaaaccgctggagacggtaagctatatcatgcttgcaggtcttacggaaaaagtaaatgacataaatgccattaccggacggtaccgcagtgtacttgaagtaaaggaagaactaaacactgtcaagaaacactggatagacaaggtaaatattgattttgagacaggaaatgccaaggaggacaattatcttaaatggatatgttttcaacctatcttgcgaagaatatacggctgttcattccttccacatcatgattatggaaaaggtggaagaggctggagagatctatggcaggactgtcttgcacttttacttatggagccttcggatgtccgcaggatgattgtaaacaattatggcggtgtgagaattgatggaaccaatgcgactattataggaaacgagcctggcgagtttattgctgacagaaataacatcacacgtgtatggatggatcacgcattctggccatttgtaaccacaaagctttatattgaccagaccggtgatacagatgtactttttgagcgtacgacgtactttaaggattaccagtccatgagaggcacaagccatgatgaagcatggaataatacatatggaaacaaacaaaggacggcaggcggtcagatatattttggaacggttttagagcatattctgatccaaaatctgtgcgctttctatgatgttggggagcacaacgagatgaagctgcacggtgcagactggaacgatgcgctcgatatggcatgggacaaaggcgaaagtgttgcatttacatgtgcatatgccggaaatctgcttgatatagcaaagtgtttaagaaatgtggaaaaaataagcggaataaacaggattgaggtgttagatgagcttaagctgctgcttgctgatgacgaaatactttacaactgccctgacaaaaagcaggagcttctcatgagctatgcaaaggcatgtgagaactgcacaagcggaagcactgttcttgtcccaattgctgcgatttgcgaaaacctggagcataaggctgagtggatgatgaaaaacatccgcgaaaacgaatggatatcagatggcacggatggaggctggttcaacggatattatgacaataacggcagaccggtggaaagatgtgagagtggagatgtacgcatgatgcttacaggacaagtatttgccatcatgagtggaaccgcaaaaaaagaacagatcaaggcaatctgtaatagcgcagacaaatatctgtttgatcaaaaagccggtggctacagactaaacactgattttaaggaagaaaagtttgatcttggaagaatgtttggatttgcatatggtgaaaaagaaaatggtgctgtattctcacatatggctgtaatgtatgccaatgcgctctataaacagggctttataaaagagggttacaaggtattaaagacgcttcttgatactgcgatggactttgacagaagcaggatgtatccgggagtaccggagtattttgataatgatggaagaggtctgtattcataccttacaggtgccgcaagctggtatatgcttactatgataacatctgtatacggagtccatggagagcttggagatcttgttattgagcctgcactcatgccacagcagtataacgaaaaaggtgatgcaaaagtttcgttagaatttgcaggtcatggatttgatattttagttcacaatcctgataagctcgaacctggggatgcgcaggtcaaaagagcactctgtgatgatgtaaaagtggaaaatgttacaggaaacagcgtgcgtattccaaggcatgctattgaaatgctttctacagataaatgtcatacggttgagatatacatagagtgatagtttataaaattaatagcgtttgatatcgtatcattgtgtatcagctaaataaaattcccacgcatatttgcgtgggaattttttgtgcgtagtacaaggcttttggtatcaggctaccacatggatttgtagtacctgtcgcgatatttctttggtgtaagccctgtaaaactctcgaatatctggataaagtggctctgtgatgaaaatgacaggtagttggctatatctataatcggcttatctgagtatttgagcaggtgagtcgctttttctattttcttttcccttatataatcacttatcgaaacaccgagattctgcttgaatacccttgaaagatagctctcggaaagccctgtgtatgcagccagatcagctattgtgatacgctcttttatgttgctgtatatatagtcaacacactgggtaacaggctttgagaggatagacgatttcttctgcagcaccatcttacctgtgaaatcctttgccatctcgtgatgcaggtcagcaacctggcgtacggtggagcagctgtccatcttaagtatatagaagtcactcagacggtatgcctgctcaggctcgagtcctccatcaatacagtatcttgtgatcatggcggttgtgacaacaaagtgatatttgatattctgtaaagtatttctggacaatacacctgttccgtcaaggtgtataaatgcatcttctttgcagttttttattacatattccatatccccggttttgactgcgttataaaaactatattcaatacttggagcacgatgcagtgattcgctctcgctgtcaacaaattctgcgtcataccattcttttgaaagtgccataaaggttctcctttgcaacaaaatattagatttatgtcatctttctattattatgacatgaatctgatatttttacaattgatttaatataaacgaaaacggttaaggagtaatataacaactgtaaacgagatatcaaattaatttataagaagatatcaaaacagtttctatggaggaaatgaaaaatgaaacagaaagtgattagcacaatgctgttactgtctatgggggcaacactccttgcaggatgtggaacaacagcaggaaacggaacagaaggtggagcttctaatgcagcagagggaaaggttatcaatatctattcatggaacgacgagtttcgaacaagagttgaggctgtttacccggaggttaaagaaacttctaaagatggtacaattacatacctcaaggatggtacagaaattcattggatagtaaatcctaatcaggatggtgtttaccagcagaagcttgatgaagctctttcaaaacaggcggatgcagcagcagatgacaagattgatatgttcttatcagagacagattacgtattcaaatatacagataaagatgcagacgtagcaatgcctcttaaggatcttggaattgattgtgacaaagagtttgctgatcagttcgatttcacaagaaaaacagcttctgattcagacggagtacagagaggttcaacatggcagtgctgtcctggacttttagtttaccgtcgcgatattgcaaaggatgtattcggaacagatgatcctgaagcaatcggtgagaagacaaaggactgggatacattaaaggctacagcagcggaacttaaggcaaagggatactacacattatcttcttacgctgatacattccgtttatatggaaactcaatcgacaactcatgggtacagcctggagcagatgaggttgtagtggataagaagattacaaactgggtagatgattcaaaagagtggcttgatgcaggatatgttgatgctaaagttaaaggccagtttaatgatgactggaacaaagcaatgggttctcagtcaaaggtatttgcattccttttcccagcatggggaatcgatttcacacttgcaccaaactgggatggagcagaaggatcatgggctgttacaacaccaccacaggagtacaactggggcggatcttacctccacgcagcaacaggaacagataaccctaagcatgttaaggatatcatccttgctttaacagcaaataaagacaacttactcaagatctctaaggattactctgatttcacaaatacaaaatcaggaatgaaggaagcagcaaaagatgattcattcgcatcagacttccttggcggacagaacccatttgcttactttgaaccggtagctgagaatatcaagattgcacctctttcagcatatgatcagggatgtgtagagctcatccagaactcattcagcgattacttacagggtaaggttgattatgataaggctaagaaaaactttgagacagcaattaaagagcgttatcctgatatcgaaaaggttacatggccgaaataagataaataaaacaccatgcggagcctttgggcttcgcagaggtgactctggtagaaaggaatttggctcatgaagaagaaaagaaagagcgtaagttatgcaaaatggggatatatctttattcttccgtttttcataacatatttaattttttctctgattccgttagtagatacggtaaggtttagtttttttgaatactatagatccggaatcaaacaaataggaccgaattttgtgggatgggctaactatgccgagcttcttaaatcggatatgatcacatatggtaagaatactcttatcctctgggttatcggatttattccacagattgtggttgcacttgttttagcaaactggttcactgatgtcagattaaaaattcacaaattacagttttttaaggtagtaatttatctgccaaacctgatcatggcatctgcatttgcacttttgttctttacactgttctcgaacagtggtcctgtgaactcaatcctgcagtctatgggagtaatcagcaagcctatcgactttatgggaagtgtatttggaaccagatcactcatcggcttcatgaacttccttatgtggttcggtaatacgactattatgctcatggcagcagtcatgggtatcagtacagaagtatttgaggcggcagatctggatggatgtaatgcattgcagagattcttctatataactttaccgagtatacgaccaatacttgcatatacactcatcacatcaatcatcggtggactccagatgttcgatgtacctcagattctgacaaacggacagggaaatccggacagaacgtcaatgacacttatcatgttcctgaacaaccacttaaagagtaagaactatggtatggccggaacattgtcggtatatctgtttatagtcagcgcaattctgtgcttcatcgtatacagaatgacaaatgacagcgatcctgacggatcaaaggcagcagcaaagcgagctgcaaaagaagctagaagaaagaaaaaggaggcggctaaataatgaaaccaaaacataaaattaatgtccgcagtgttatagcgcatatagttttgatattattatcatttttatgcctgttcttctttgtaatacttataatcaatgcgacaaggtcgcatgcacagctgcagaagggcttctcatttatcccgggcgggcatttcctggataatctgaaatctgtagctaatgacggaaccttccctatgtttaagggaatagtaaacagccttattatatcgggctcatgtgcagttttatgtacatatttttcatcgcttacagcatatggactttatgcttatgattttaaattaaagaaagctgcatttacatttatcatggcgatactggttatgccgacacaggttactgcgatgggcttcctgcgtttaataacaaatatgggaatgtatgattcgtggactccacttatcattccatcaatagcatcgccggcggtattctatttcatgtacagctatctacagtcatcacttcctctatcacttgtagaagctgcacgaattgatggttcgaatgagtttaggacattcaaccatatagtattgccgatcatgaaacctgcaattgcagtacaggcaatttttacatttgtaggttcatggaacaactacttcacaccggccctgatcatccagtcaaagaacaagatgacagtaccaattttgattgccacacttcgaggagcggactatatgaatttcgatatgggaaaaatctatatgatgataacagtagctatcgtgcctattattgttgtatatctcctcttatcaaaatatattattgccggtgtcacacttggaggcgtgaaggagtaaacaatttaattagttttagcatcagagcagatggcttacatatatgttatgtaggtcatctgtttttagtatattgaaatatgaagtacagcatattttttatttaggaaatattgtggcacctatgcagtatatcagcaaaagaatgcagcagaacttgcagaatatatccagtcaaatatcctgccggattatgataattttgtcaaagcaggagaacagtacaataacgatgcagtgcatataaatgatattgtaggtaatttcaataagatgtcgtttgagctcaggcagagcattttaataattaaaggctgttgaatggcagagcggtgtatgattgatgattaaatcgacttagacattaatcgtgacagatacacagaaaatatctataatttacatattcttgtagggaaattaatttaggttttacacaattatattatacttagtatgtattataatctgaaagcgcatgtgaaaggaaggatggacttatgagaaaatatttattatcgattcgtaaaagcctttggaactgtaattgtagaaggggctattgtagatatgataactggggaagtatgtttttctacacaaaaggttagatatgcgccggtaattaacggtaaaaatatatttaccgatgcatatattactaaaagatatactattacttatgacaaaattactggtagaatgtcatatagtataaataatgcatcttataaatctaatagaggagatagtccgagcatgattgtattgaatgcacaggtagcagagatgggaagtagatagtaatgatagttataacacttcagcagttttttgtattattatggattttttgcataactaaagtgatattacatggttttagaatcaatattataggaatatccataaatagatatttttatgagtataacgtagatgataaaaatgcgattaaagaatatcatagaggaagggctgttagatccattattattttaattcttgattcaataacattagtaatatcatataagtatagtatagagatggctactggatttatgataatatcaactatagcatctataataattaaatacattaaagataaagaatagtggttgtgagattataatacataacgtaagtgattaaataatagagcgtatgctatatgatatagtgtacgctttaattattgtgaggaatcgtaagaaattaaataattctaaaatgatagattatagaattggctcatggtataatataacgaacgtaaagatatgtgcgtcaaaagagatatcatatagataagattggagaaaatacatgaacccagcaagcataatgaaaatgatgaaagcaaaaaatacatttacagcaaaccacccaaagtttgtatcctttttacagtatgcattcggcagcggcattccggcagactctgttattgaaatcacagttacaaagccgggtcaggagccggttacgtccaatatcagggttttacagtcggatctcgaacttttggacagcttgaaggatattaattagatatgttataccagattaaggatgggacagtttcggcaggaggtcagacgattctgtcccatattgatttttatataaaggaaaaagaaaaaatagctgttgtcggcaaaaacggagcaggaaagaccacattgcttcggcttcttgcaggagagatgcagcttgaccgcgatgaccatcgcggtatgtcgtcaggagcacatggcaaagagactgcctgcaaaaatagtcttggaatcgtaacctcgcgaaatatcacaatcggaatgctccgtcaggttgattcctccaatcaggacaagacaatcgaggaaatacttcttgagagctgtccggacagggatacatattccaaagagcggtttgactacgagatggagtacgacaggctgtttacaggctttggctttgaaaaagaagaaaaaagccgtacactcggcagtttttctggaggtgaacagaccaagatttcacttataaagctcttacttgaaaagccggatttgctgcttcttgatgagccgacgaatcatcttgatatgaaaactgtcgagtggctggaggattatctgataaactatccaaaggctgttgtcattgtgtcccatgacagggcgtttcttgatgctgttgcgactggtgtatatgagcttgaaaacggagcattgcacagatatgccggcaactacacacagtacaggcagcagaagcttaaaaatctgcagatacagcgcaaagcctacgagcgccagcaggcggagattgcgcataataatgagcttattgacaaattcaagcataagccgaaaaaagctgcgtttgcacgctcacgcaagaccatgctggcacgcatgaagctgatagaaaagccggttgaagacgaagctcatatttttacaggcaatatcgagccacagtttccgggcggtaaatgggtttacgaggcgaaggaattaaaaattggatatgacggcagggcactgcttgagctgtcgcttcgtataaggcgtggtcagaagattgccgtaattggtgacaacggcataggaaaatcaacatttctaaagactgtggcaggacttattccaccaataaagggcacaagccagctcggcagcaatctgctggtgggatattttgaccagcagtcggcacttatagacagcgataagaccgtgagagatcattttcacgagctttttccggcacttctggagaaggatttaagaaagacgcttggcatgtatctgtttggaggggcaaatgcctcaaagcgtatcagctcgctctcaggtggtgagaagtccaggcttgtgctcgcagagcttctgacaggccgtccgaacttaatgatactcgatgagccgaccaatcacatggatattccggcgaaggagacactcgaatcggcatttaaggcatataccggcaccatgctctttgtatcgcatgacaggtatttcataaagcaggtggctgatgccatactggtctttgaaaatgacaaggtgatgtactatccgtttggctatgaccattatatttcaaggcttaaggcatcaaaggatggcaatctgccggcactcatgcaggcaaaggatgctgcgatggtcgaggcacttgcggctgtcccaaagagggagcgacatgagaccagacagctttcaacagaagaggcgtacttagagtggaagcttgcacttgcagcggagccggtggcgaaggcggctgaagaagcagaaaaggtttatgaagagctatgtgaagcagaaagcgagcttaacgaagaaaatgtcgataagctgcgactgcaatatgaaaaagttgctgactcatggacaaatgagtgtacaaaatggtatgatatatacttagatgagatgtatccggagagtgatttttaatttgcagacataagggaatcaatgtcatttgctgtatatcataaattatccggggagaaaggattatatatgtggttatcaagatattttgtgtattttattatatttagctgtatgggctggatatatgagagcatctactgtaccatcagagcaaaaaaatgggaaaacagaggctttctctatggtccgctttgtcctatttacggagccggaggtgtcgcgatcactgcgatagcagatttcatttcggctcacacggatgcgacatttacatggtggcagatatttcttgtggcatttttgggaagcattgtcttagaatatggcacatcgtgggcgcttgagaagctgtttcacgcatactggtgggattacagcagcatgccgcttaatataaacggcagggtgtgttttccatattctgtaggctttggggtggcaggacttatagtggtatatttcattgcaccatttacgaagttcatcacaggctggatgtcacctatatggtatgagtttttctcactgcttcttatgggctttttagctgtagacactgcaatcaccgtgtcagcgcttacagatttcagtaggacaatagtcaatctgcagaacaatttcaacacctatatggatgaggttgtggaagaggttaaagagcgtaagaaggcggcagatgaaaggtcgcaggagaggtcacaggagcttgcggaggcagtcgaggagcgcagaaagagaaaacgtatcagagccagtgcagaccgagttattgattcaatgggtgctttaaagaaatctgcgcttaaccgagcacagggcttcagaaatccaaaggtggagaacaggtatctcgagacatttacagagagtctgaaggaacgctttaaaagagaacgtataaagaaagcaaagaaggcgaaaaaggcagataaataacaaataaaaatttttaaaaaaatttcaaaaaaagcttgcattatccgattgaccatggtattataatatacggttcgttggtcaagcggttaagacgccgccctctcacggcggaaacacgggttcgattcccgtacggactgctaaaacaaaaagctctcagtacacagtgctgagggctttttatttttgcaagcaattaataactataaaaccacttagaacaaaaagctgatgcctgcatgtaagcatgacgcatcagcttttttattcttaaggtggctcaaatcattatgtctaaagtataataatacttgcgcacttcaaatcattgcccagattgtatactctgccggaatcgacaccgacaacagttggtcggagaatgtagtactcactgttttttacaactcttgccttttcaccattgctaagctgtacaattgaatcaacaggatatagaatcatactgctcatgaaagcacgcatgacacctatatcaagctggtttgtcatggacataagcatctcaactgcatcacgctgtgataaggcatccttgtacggacgctttgtgacaagcgcatcatagacatctgcgacagacagaatctttgcaaactgacagatttttggtgcatcaaagccgagtggatatccggttccgtcaatgcgttcgtggtgctgcagcactcccatcagtatagagttgtttaaatcctttcggtcttttagcatattgtagccgtacacggaatgttttttcatgatattaaactcatcatccgtgagcctgcccggcttgtttagaatctcattggggatcattgtcttgcctatatcgtgcagcaggccggatacacctatgtcgtggatttcgttgtcaggcagcttcatctgcttggcaagaatcattgaaatagtagccacatccacactgtgcttgaaggtgtactcatcgcttgttttgagagaactgatatcgacagctatggcatcgttttcattgatggcctccatgagcgagtctgcaatctggtttgttgcctgtgttagctcctcggagttagtgttgttgaagatgtactggacaccggttgatacacgctgcctgacactgtcgcttaaggtgaccttggaacggtcgtccgtacgcagctgtttgaccatggcggcagcctttggagacagtatggcatccggatcgtcaggatcagcacttccctcgcggatgtatactgacattataccgagcttaagcagcgaagagatgatataatcatcgatagctgagccctgtaccaccaggttacggccggtaggatccttgatgacctgatcaataatcatgccgggtttcaattgtcgtgttctcatatatctgcgtttaatcatttttgccccaaaactaaataagtctactctaaaaacaattcaaaatactacgaatattatatagtatatttgtactaaaaacaatcataaattgagatttttttagtgtttttttgtaataaaacaaccccggcatttgccggggctgatgatggtattgtatttatcaaaatcagaggttagatgtggtgaccgccgccgctgtgactgccgccactatgaccgccaccaccgctgtgaccgccacttgagcctgagctttgtggactgtagtgtcttgtctggctcataaagcgtgcgcgtgcattttgaatctctacctttgtaaatgctgcacccatgagctcgttgctcttagccttgcggccctttgacagggataatgcatatacaaagcaaaaaatcatgccggcagcgagagcgataaagatactggaaatgtatctgagaggctgtgatatatgtccgcctgcgaggactgtgttgacctggtctattgtttccatacagcaggtgaaatagtcgtaatcatgacttgaggtggcatatatataagtgttgtcacagatggagttacattttgagttcgggatggttctctgcgtgcttccctcacaagccagataaatctcgtctaaatctctgtctatcacgaaaatgacaccatttgcaccggttccgaaatagtcttcaaaggtattgactgcatagctttcagtgcttccgtaaggatgtgaggtagtggtgacaacggctatattgcagtagtcggttgtctttttcatctgtgagatgagcttgctctttgcggcatcgtcaatgaaattggcagagtcctcaaggatgtactcatagccggtagacttgtttgtaccgcttagattggaagctgcggctgtctcggtggcatatacatttgatgagctgctcaaaacaaggactgtaacaagcaaaaataatgtaaataaagctgagcatctgcattttatacaatgcaaaaaaggacttttaaaattatttctatgcacggtcgtcacctcccttatgtgtggcaaactgaggcagcttgcgagttgtgagcacattgaatgcgcggatgacattgatcagtgtgataagcactgaggcaatgatgataaaagcagcaccatagtaccatgcatctagcaccggctggaaaagtagcactgcatcgccaataagcatggataccatgccaaagatgagtcctgcaactcccttgtgtccgggcatacggtcaaagcttgagaaggctctgattgaaaaaataaatgatataatggtcaaaataacaaataaaatcaggctgccgtctgcattgccaaagccgcttccgatacctgcaatgattgtaaacagcgcaggtacaaattgaatgataaatataaaaagtataaagtaagctacaaacgatgtgtttgtctttttctttatggttttagtggctttttttgcagctttaaggcgtctgtggttgttgattgcaccaagagcctccggctgttcttttgcgatacggcccttatcctcggtgccggcttcctttacggcaatcatggtcagctcctgtgagtaacagatatttgcgataatcgcaagcacacctactatggtgagagtcatgccgggggtgaggactgtcagcaggcacaataaaatgtatatcggaattgccgcaatcagcgagcctagcaggaatttaccgacagatataggcagatctgcaacaaccttacctgtctggccgtttaccgtggcatatgccacacgatccttgttgcggtatgacaaaaaccataccggaaacattgagtagtcggtctcttttacagtagtgccaagacttaaaggcgaaagggcagcggagtcactgtcgactgacaagccggtaaaggctggctctttacttatttcgcttactgtgtttgtgcaggcagcatccattgcgtcacttgcgtaaaccgttgatggtaaatcagctgtatcagcgtaaaaaccacttaagaatgccggtgtaaagcgcttcattttcttcacatcatatggcgcaagtttttcgctgatgctgtcatcaaatgatgaagatgcatcgtaggacagtcccttgtagtaggcgtcgagatctccctcgagcctgtaatagtctgtaatgatgtaatctcctgaacggtgggatcttttcgccggaagtgaaataggagccttctgggttacataatatgtccagtaaggcatgtagatacctctgaatccgtcgataaacttaggagccttaagctcctttggcgcgaaaatagcctttttcatgaggctcatgtaggcctgcttacagtcatccttactctttgcaaatggtatgatataagccggcttgtgctccttttgcatgcggctgtagagcacagttgatgcaccgcagaagctgcagaagcctgctgcggtatcgtctgtgctcaggatttctcctccgcactgagggcatgtgaaaatggttgcgtcgaagtccttctggacctcggcatcagaggttttgtcctcgtacgcgtaagggtcgaaaagtgaatgacagtattcacaggctaactggcctgatttgatgtcaaacttcacatttccaccgcaatttttacatgcgaacattttgtttctcctttctattcccttttacttttttatctgcttgaataaataattccttccagattgacggatggaagaggatgagcagtggaaacagctcgagtcttccggcaagcatgtcaaacatcagtatatatttggagaaattattaaaaaagccgaaattgcatgttggaccgaccagagaaagacccggtccgatattgttaaatgtagctgcgacagccgtgaaattggtagtgaaatcatagttttcaacggaaacaagcagcattgaaacaacaaaaatgacggcgtacgtcatgaaataaacatttattgacctgataacatcatggtctacaggcttgtgctcaaaggtgagctttttcacactctttgggtgaatgtagccatttaattccttgcctattgtctttacagcgataacaatacgcgataccttgatacctccgcctgtgcttccggcacatgcgccaatgaacatcaaaagcacaagcagtgtctttgaaagctcaggccatctgtcgaaatcggtgcttgagaatccggttgtcgtgatgattgagccaacctgaaacgctgcctttgtgactgcgtcaaacacaccggtacacatatgcgcgatattcacgcttatgactacaacggaggctattatgatgccgaaatagtatctgacctcctcaaccttaagtgcgtcacggatgtgaccgaagaaaagcaggtagtaagcgttgaaattgacaccgaaaagtatcataaatatggtaacaacccactgcagataaacattgtagccgcaaaagctgtcgtttttgataccaaagcctcctgttccggctgtgccaagagaggtacagatggcatcgtaaagaggcattttcccgaaaagcaggaaaataatctccatagtcgtaagaccaaagtatattatgtataaaagtctggcggtatgcctcatctttggaacaagttttccgacagaaggacctgggctttcagcacgcatcagatttatgttgctgccgcctgaaagcgggatgattgccagaagaaatacaagcacacccataccgccaatccagtgcgtaaagcagcgccagaaattcatgcaataggagagtgattctacctcaggcaggatgctcgctcctgtcgtggtgaagccggagatggtctcaaaaagagcatctgtgaagcttggaatctctcctgatatgtaaaacggcagacagccgaatatactcagtacaatccagcccagtgcggttgttgcacagccctccttcaggtaaaaggtaaaatccctcggttttttagctgaaaaaataaaaccgatagctatgcttatgagtgcaacaatcaaaaagtagatgccgcttttttcataataaataccggcaacaatacatggcagaagcagcaaaaagccttcaagctttaaaatatatccaagaagatatcgaattactgaagtgttcatatcattcccccactattccataatatcctgaagattcgtaaagccggtatgggttgttataatcatgacagtgtcatttttttgtatgcagtcattacctgtaggtataataattttgccgtttcggttgatgaagcatatgagcagatgctttttgagctttaagtcgcgaagcggtatgtccgtcacatttgagttttctgatacaaagaactcaattgcttcaactcttgagtcatacatgtggtagagagtctctatattgcagttcatagagtttttctttgcacggacataggcaattatggcctctgaggtgatgtattttggcgagattacactgccaaggtccaggctgtttatgacattggtaaaagttatacgattaagctttgttatgacctttgcattggaaacctgcttcgcatagagcgtaagcatgatgttttcctcgtctataccggtaagcggtacaaatgactggcaggtctctatgccctcttcctttaagagtgcctgttctgttccgtcaccgtttatgatgacagcatccggaagcagtatggaaagttcttcacagcgctcgaagctattttcgattattttgacctttatgccacgtgatatgagctgctttgccaggtaatatgctgctttgccgcctccgataatcagtgtgttttttacgctgtgtgtattgactccgatgtggctgaaaaactcctttgtatgtctgcgttcgccgacaaatgacagtttgtctcccttgcggagcacaaaatcacctgatgggatagtgacctcatcatctctctcgactgcaccgataagtatgttggcatggtgtctggtgcccagatccatgagctttgttccgtcgaggatgctgccctcgggaatctcatacttgatgagctgtgcctgaccgtgagcaaagtttgttacctcaaggctggatggcagatgaagaatatgagccatctcaatagctgcctcaagctcagggttgataatgagtgcaagaccaagcttgtcgcgcagatatttggcctcctggctgtattcaggcgttctgactctggctatagcagcacagttgccgacctgtgtggcaatggtacagcatagcagattcagctcatcagagcctgtgactgcgatgattaagtcggcatcatcaatacccgcttcctgcagtatcttgtagctggcaccgtttcctgcaatacccattacatcatagatattggatacctgggaaatcctctctctgtttttgtcgacaattgttatgtcgtgcccctccttgccaagctgctcaacgagagtacggcctaccttgccgcatccgacgatgataattctcagtccctgggagggaaccactccttttttgaacattatttcctccgtatataaaaatataatgatatgagggtcaaaaggtattttgccccctcatttatgattgtgtggtggatagaattattatgactatcatatatcaatggattataacataacgcatatatatttcatagagaaaaaagtcccaaaaatatgagattgtaataaagtacaaaaagtgataaaatcaattttaattgtagtatttgaatagctgtttgaacagcaataagagatagatttttggagctttaagtaatgacgggatttttaaaggcaaactaccatacgcacacctataggtgccagcatgcatatggcagcgagcgcgaatatatagaggcggctatcagaatgggtatcgcagagcttggcttttcagaccatgtgccgtgtccctttaaggatggctatgtgtcgggcatccggatgacgatggaacaggcaccggagtatgtgtatgccatcaggaagcttgggaaggagtatgcatccgacataaagctctacgttggttttgaggcggagtacataccggagtttttcaaggagcagaaggctatgtttgacaggcttggctgtgattacatgataatgggccagcattttatgaaatcagagcagacaggcccgtatacaggcacaccgacagatgatgagagtcgtatacgcgagtatgtggatactgttatagagggcatgaaaacaggcatgtacagctatttagcacatcctgatttaataaattatcagggacttgattctgtctacgaatgggagatgacgaggatgtgcaaggcacttaaggagcttaacataccgcttgagataaacatgcttggtatcagtgcaggaaagcactatccgacagagcgcttctggtgtataccgcatgacatcggcaacaaagtgatacttgggcttgatgcacatacagtggacaatatatgtgatgtggaaagctatgaaaaggcacttgatatagtcagaaaatatgacctgaatcttattgaccggattgagatatagttacttacaaaatatcaaataccaaaagtgaggaatgctatgattattacagaagaaaaatataatgaggaattaacaagatatgttttgccttttatcaggcttaattttgaagatggctatatgaagagtgcagatggcacacgcatacattacggctatgtgacgacacctgtagcaaaggctgccatagtcatatcacatggatttacagagtgtatgcctaaatattatgagatgatttactatttcgcaaaggccggatactctgtatatatggtggagcatcgcggacacggcttttcggacagaagtgtatccgatataagcatggtcactgtaaacagctttgacgattatgtgagtgaccttgatatgtttatccgcgagattgtgatgaagcgtgaggggcgcagaccgctttacctgtacggtcactctatgggaggcgcgatagctgccctgtatcttgagaagcatcctgaggtatttacaaaggcagtactttcaagccctatgatagagatgctttatggcaatttttcacattttgccgtggaggcgatactgtttgtcgcaagtgtgcttaactggaacgataaatatctgccgagccagacacagtatacggatgagtatgattttgaatcgagctgctgtctgtcaaaggcgcgctatgactacatatacaagtgcaaggtggaggaggaacgctatcgtacaaatggcgccacctacagatggtgcagggccgggcgcaaggcatccaaatatataaagaagcatgcacaggaaattaaaataccggtgctgttatgtcaggcgggaaaggattatctggtttcaaataccgctgaggatgaatttattgcgaagctgcctcatggcattaagaaggtctatcctgattcaaagcatgagatatttaatgcggatgatgataccttggaaaagttttactcagatatccttgatttttgggcttgaacatgaaaatgaaattcgtcaagtgaaaaatgtgacataaaaaatcatttgttttgttagaaatgacatatggatttaaaatacaatatatagtataatcacaactgttgcggacaagatgttagtatttaagccgatggtaagagtacgtaaagtatagcccgtacagagaaaaataataaaatatatcaatattgtaacaggtaaatatactatcaaacaaatgtgaggagaaagagaatgtcagacgaagttttagacgatgtaatgattaagggttcatgtaagggaaaagcagatgctattgtaaattgccagtgcaatatcgagagtgcaccggtcagatgcgagcaggcagaaagatgtatgttctattcttattataagtgcagcaagcagtggaagaggcttgcatagttaaaattaaagattaaaagctccgggctgacaatgaagtcggcatggagctttttgcgtatatgcgtatataaagaaaaaaatattttacacgcggaaaacttatgataatatatataatatattatcaagatataggagagaagcgcatgaagagagttttggtactgagtgattcacatggtaatgtgggaaatatgattcgggcagtcaaaagagaggagcctgatatgatacttcatctgggagactgcgttgtggatgcggatgcccttaggagagagtttcctcatataaccatggtcaatgtgccgggaaactgtgatttttcacggggagatacagagagacttattgatatcgacggctataaggtactcatgtgccatggacatacatacggagtaaagctgtcatatatgcatctggagcttcatgcgaaggaaatcggggcagacctggcactctttggtcatacacacaagctgttttatgataagcacaatggtcttgcgatgatgaatccgggaagcatcggtgcaccgctttggggctgcatgccatcatacggtatcatcacatttgacaaagaacacgatgttatgaagttggatgttgattatattgagtattgacgaatgatttatcaaagcggtataatattggctaatacagttatttatataggaagcagaggaaaaacagacaaatggtaaaggtagtaaagtttggcggcagctcgctcgccagtgcagagcagttcacaaaggttggcgacatcataagaagcgatgagtcaagaaaatatgttgtgccgagtgcaccgggaaagagaaattccaaagacacaaaggtaacagatatgctttatgcatgctatgatctggctgagaatgatcaggatttcaaggttatgctcagaaaaatcaaggacagatatgattcaatcataaatggccttcatttaaagctggcacttgatgaggagttcaagattatcgctgagaatttcaaggcaaaggcaggtgcagattatgcagcctctcgtggtgagtacttaaacggaatcatcatggcaaactatctcggatatgagtttatagattcggcaacagtcatcttttttgatgagaatggcaattttgacgcggaaaagacagacaaggtgctctcaaagaagcttgagcagacagaaaaggctgttattccgggcttttacggagcaggacctgacggaaaggtagttaccttctcaagaggtggttcggatatcactggttcaatcgtgtcaaaggcatgtcatgccagcatgtacgagaactggacagatgtttcaggctgtctcgtagctgatcctagaattatcgacaatccacagccaatcaaggttgttacttatagagagctcagagagctttcatatatgggagcatcagtgctccacgaggatgctgttttccctgtaagaaaggcaggcatcccaatcaatatcagaaatacaaacgacccggaagcacctggtactctcatcgttgagagcacatgccaaaagcctgattataccatcacaggtatcgccggaaagaagggctttgttgcggtaaatatcgacaaggacaagatgaactcagaggtgggcttctgtagaaaggctctccaggcgtttgaggagaacggtatctctatagagcatatgccatcaggtatcgatactatgacagtattcgtacatcaggcagagtttgagggcaaggagcagcaggttatcagctcaatcagaagacttgctcatcctgatatcattgacctagagtcagacctcgcgcttatcgctgttgttggccgtggcatgaagtcaaaccgtggtacagccggcaggattttctctgcacttgcacatgccaatatcaatgtgcgcatgattgatcagggttcatcagaactcaatatcatcatcggtgtaagcaatgatgattttgacaaggcaataaaagccatctacgatatttttgttgtcacacagctgtaataagctacggagagattatccgttggaaccggaattgaataggataatttaaaaattaaatgtagaatttataaaatatacagggcttggcggaatatatgccaggctctgtatttttttgaataggtaaagctttgaaaaactttatgaggaagctttaagcgagaaaacaaaataccctcacataagctgaaaatgcgcatatattatagcgaaaggaagaagttattatgcaaaaagacactataatatatgttacggatcagaggcaaaagtacctcgctgatatgctgggaggagaacagacagattgcagaaatagcggcgggattgattatgagcgtgttgggaatattgtgtttcctacaccgttttcaaagcttaagcttataaatagtgatatagaaaaattaaaacataatataataattaacaatattgcagtgtggggcggcatgatgccggagtgctttcctggtattgacaggggatgtgactttatgagagatgaaactgtcatagagcagaatgccattgttacggccgaggccactgcgtccatagcaatacaaaaaagcatatatggtatatacggctcaaaggtacttgtgagcgggtttggaaaatgcggaaaggcaattgcccgcgttttttctgctatgggagcccatgtcatggtgatggcaaggagaaaacaggcaaggcatgaggccgctgaactgggatatgaaacggtggattttaatgatcctgccaaggcctgttttgaaacactgtttctcataaacacagtaccggatagggttatagatgaaagtttaatcatgattttgcaaaaagatgcgataattatagacattgcatctaagcccggcggctgtgattttgaggcttgtaagaggtatcagataaactgtacgcatgcgctcggccttccgggcatatactgtccgaaaaccggtgcaaaaatactttatgactgtatgaaaagaaaaggtatgacggagggcttatggttatttcggattgcaccgtaggaatgggaattacaggctccttctgtagttttgaaaagactaaggatgttgcaaagcggcttgtggatagcttcacacatgtgacacctgtatattcctataatgcacagatgatgaacacacgctttggaaaggcgggagactttatgcatactatctccgaaatcacaggggatgagggcatcaggacactgcaggaggcagagcgtgtcggcccgggaaaactgtttgacgtgatggtgatttacccatgcaccggcaacacagcggcaaagcttgcaaacggcatagtggatacaccggtccttctcgcggcaaaggctcatctgagaaacggcagaccgcttgttatcgggatttccacaaatgatgcgctcggcatcaactttaagaatatcggaaagctgatgaatatgaaaaatatttattttgtgccgtttgggcaggatgactgtgtgaagaaaccgaattcactcgtgtgcgatggaaaacaggttgtcgacacaataaatgaagtgatggcaggacgtcagatccagccggtaatcctctagagtgggaatattactttattgagattatagtacgggacgattcacgcgggcaccgcggtgggctgcatacactccggtgtccgctacgctgcgcagccaagatactgtgcaaattatgctttgtaggttttcataggatgacgaaaacgtcgaaactcgccatccatggctcgatttctccttgcctcggcgtccatgcctcggcatttctgtgtagcatgtgcataattcgacagtatctaagcagcttcgctattcgcggactccggagtgtatgcagcccgccgcggtgcccgcgcgaatcgtcccttacgttatggcgtaaatagtaaataaataagatttatgaatctgaatcgttgccggtcacactgttagttgtgaacagtaacttctgaattgaaaaactgagttggaaaatgtaaaaaaatagaggaaagatgtaaaaatatatgttataatcgtgtatacacaaaaatgaaaacacaggaggataaaatatgtcatatatttacaaaacaaaaggaacctgttcaacacagattgagcttgacctcgatggcgatgtagtacataacgtaaagtttacagggggctgtaacggaaatctccaagctatcccaaagctcgttgaaggactcacagtagcccaggtagaggaaaaaatcggtggaattaaatgtggatttaagaatacatcctgcggtgaccagcttgcaaaagcatgccgcgaagcatatgaagcccagaagtaatgaaataaccagtaaaatagcttccgtatataaacatgtagctccaaataaacatgtagctccaaaagctctcccataaggagagcttttgaattaaaaaaataattctgccatgcttcgcgcacaacaaagtggatccgggaagtacacagtgtgttcagaataaaaaatatgaactgccacggtgttccataaactcaaatagtatgaagcactatcaccaaaacacagcctgtccgggcaaaaagccgtggctgacttcatattttttatgaggaatatactgtgtgctcccccggacctcacagcctcccacgcgcgaagccccccattaaatctcgacactcccaaaaatatttttataaaatgtttacaaaacattcatccctttaggttgtgcaatcatcctcaaagtgttacaataacactattgtgagcctgtacaagggcaatttgaagttataggagaaaaatatgatcgcattttcaaaaatctttggttctcacagcgagagagagcttaagagaatttacccgattgctgacaaggttgagtcatataaggaagcaatgggaaagctttccgatgaagaattaaaggataagacaagggagtttaaaaagcgtctggaggacggagcaacacttgatgatattcttccggaggcatttgctacagtaagagaggctgctaagcgtgtgcttggcatggaacattatagagtacagataatcggtggtattattttgcatcagggacgtattgcagagatgcgaaccggtgaaggtaagacacttgtttctacacttcctgcataccttaatgcacttgagggcaagggtgtgtgtattgtcacagtcaatgattaccttgcaaagcgtgatgctgagtggatgggacaggttcatgagttcttaggacttaaggtcggcgtggtacttggcggtatggacaatgacgagcgcagggaggcttatggctgtgatattacatatatcacaaacaatgagcttggatttgattacctgcgtgacaatatggttatctacaaggaacagcttgttcagagaggtctccactatgctatcatcgatgaggtcgattcagtgcttatcgatgaggcacgtacacctcttatcatttcagggcagagtggcaagtcgacaagactttacgaggcatgtgatatcctggctacacagatgaagcgtggtgaggatgttcctgagtattcaaagatggatgccatcatgggcattgtccaggatgagaccggtgatttcatcgtaaatgagaaggacaaggtcgtaaaccttacacaggatggtgtgaaaaaggtagagcagttcttccatatcgagaaccttgcagatcctgagaaccttgaaatccagcacaatatcatacttgcacttcgcgcgcacaacctcatgttcaaagatcaggactatgtggtaaaggatgacgaggtgcttattgtagacgagtttaccggacgtatcatgccgggccgccgttattcggacggactgcatcaggccatcgaggcaaaggagcatgtaaaggtcaagagagagagcaagacacttgccacaatcacattccagaacttcttcaacaagtttgataagaaggccggtatgacaggtacagctctcacagaggagaaagagttccgtgatatctacggcatggatgttgtcgagatacctaccaataagccggttgcgcgtattgatttgcaggatgccgtatacgctacaaagaaggaaaagttcaaggcggttgtggatgcggttaaagaggcacatgaaaagggacagcctgttcttgtaggtacaatcaccatcgagacatcagagcttttgagcggcatgcttaagagagagggaattcctcacacagtattaaatgccaagttccatgagaaagaggcagagatagttgcacttgcaggacagcatggtgcagttacaatagctaccaacatggcaggtcgtggtaccgatatcaagcttgacgatgaggcaaaggctgccggaggtcttaagattatcggtacagagcgtcatgagtcgagacgtatagacaatcagctccgtggacgtgccggacgtcagggagatccgggtgagtcacagttcttcatctcactcgaggatgacctcatgagacttttcggttcagagcgtctgatgggtgttttcaatgcgcttggagttccggagggtgagcagatccagcacaagatgcttacatctgccatagagaaggcacaggagaaaatcgaggccaacaactttggtattcgtaaaaatctccttgagtacgatcaggtggacaatgaccagagagagattatctacagcgagcgtatgaaggtgcttaacggtgacaacatgcgtgatgctatccttaagatggttcaggagcaggttgagaagtctgtcgacagatgtatttccgaggaaattgacagagctgactgggatcttgtagagctcaacgagcttgtgcttccggtcattcctcttgatccaattacaaaagaggatattgagtcaatcaagaatgcaaagcagcttaagcagtacttaaaggaaaaggctgtcatgctttatgagcagaaggagacagaattccctgagcctgagcagttcagagagattgagcgtgtcgtgcttcttcgtgtaatcgacagaaagtggatggatcacatcgatgatatggcacagcttcgtcagggaatcggcttacaggcttatggacagaaagatccaatcgtagagtacaagatggcaggctttgatatgtttgacgacatgatttcagctatccaggaggatactgtcagactgctgtatcatgtacaggttgagcagaaggttgagcgagagcaggttgcaaagatttcgggcacaaacaaggatgagtcagcacagaatgcaccaaagcgccgtgcagcagccaaggtatatccgaatgacccatgtccatgtggcagtggcaagaaatataagcagtgctgtggacgtgtgaagtaaattttaaatggttgtaatcgttgctggtcacactgttaggtgtgaacagtaacataaaataaataaacaagaacgaatgttctaaaattgtggacaaagtcgattttttgtagtaaaataaagcacataagtgcatactataaatgattgactttgtctttttataattttacaaaagcagtatttaagatttttttggaggaagcgtgcgttatggaatttaaactgcattcaaaatacaagccgaccggcgaccagccacaggcgatagagcagcttgtgaagggctttaaggagggcaaccagtttgaaaccttacttggagttacaggctccggcaagacctttaccatggccaatgtcattgcagcactcaataagcctacacttatcatatcgcacaataagacactggcggggcagctctatggtgagatgaaggaatttttccccgaaaatgcagtagagtactttgtatcctactacgactattaccagcctgaggcctatgtgccgcagtctgatacgtacatagccaaggattcctctgtaaatgatgagatagataagctcaggctttcagccacggcagcactcacggagcgaaaggacgtcattgtcgtggcatcggtttcctgcatatacggacttggaagtcctgatgagtggacaggcatgagtatttcgctgcgcccggggcaggagagggacagggatgatctcgcgaggtctctcatagatttacagtacaccaggaatgatatggattttcaccgaggcaccttcagagtgcatggtgatgtgcttgatatatttccggcaaatgccgatgatacagcaatcagggttgagtttttcggtgatgagatagatcggatagtggaggtcgatgtgctgaccggcgaggtaaagtgctcgcttgagcatacgatgatcttcccagcatcacactatgtagtttcgcaggagaagataaatgaggcctgcctcaatatagagaaagagcttgatgaacgtgtgaagtattttaaaggcgaggacaagctcatagaggctcagcgaatagcagagaggaccaattttgacatagagatgatgagggagacaggcttctgttcaggaattgagaattatacgaggcatctgaactttgcaaagccgggggagcctcctatgacactcatagatttcttcccggatgattttctcataatcgtggatgagtcacatatcacgattccgcagataggcggtatgtatgcgggtgaccgctccagaaagaccactcttgttgactatggcttcagactgccctcggcccttgacaacagacctctcaatttcgaggagttcgagggtaaaatagaccagatgctctttgtctcagccactccgaataagtatgagaatgagcatgagctgctacgtgcggagcagattatcagaccgacgggacttttggatcctgagatatcagtgcgccctgttgagggacagattgatgaccttgtgtcagaggtcaataaggagactgcaaaccatcacaaggtgcttatcaccacactcacaaagcgtatggctgaggatctcacaaattatatggcagagcttggcatcagggtaaagtacctgcattcagatatagatacacttgagagagcggagataatacgtgacctgcgtcttgacgtatttgacgtgctcgtcggcatcaatctgctcagagagggtcttgatatcccggagattacacttgttgccatactcgatgcggataaggaaggcttccttcgctcagaaacctcacttatccagacgataggacgtgccgcacgtaacagtgagggccatgttatcatgtacgctgacaagattacagactccatgcgtgtcgcaattgacgagacaaagcgtcgtagaaaggtacaggaagagtacaatgaggctcacggcatcacgccacagactatacagaaatccgtgcgtgatctcatagctatctcaaagaaggtagcggccgacgagaatgctcttgacaaagacccggagtcaatgagcaaaaaagagcttgagaagcatattgcagatatagagaaaaagatgaaaaaagcagcggcagagctcaatttcgaggcggctgctgagtacagggataagcttattatgcttaaaaatacattgagagacgtaaaataaaagcttataacatccggaagcaatttggaggaacacaaattatggcaaaaaaagaaagaaaatacatcaaaatacgaggtgccagcgaacacaatctaaagtgcgtcagtctcgacattccgagagatgagtttgttgtttttacagggctttcaggctccggcaagtcatcactggcatttgataccatatatgctgaggggcagcgcaggtacatggagtcactttcatcttatgcgcgtcagtttttagggcagatggagaagccgaatgtggagtctatagagggacttccgcctgccatttccattgaccagaaatccaccaacaagaaccctcgttcaactgtcggaacggtcacagagatatatgattacttcagactgctttatgccagaattggaataccacactgtccgaagtgcgggcgtgccattacaaagcagacgatagaccagatggtggatactgttatggcgctgcctgagcgcacacgtatccagcttcttgcaccggtggtcagaggccgcaagggtgagcaccagaagctgttcgagagagccaaaaagagcggatatgtgcgtgtgattgtagatggcagcatgtatgagctctccgaggatattccaatggagaaaaatataaagcacaatattgacattgttgtagaccgtttagttgtaaagccgggcatagagaagaggcttactgattcacttgaaaatgtatttgaactgacagagggcaatgccatagttgacatagtagatggcgagcagatgacattttcccagaactttgcatgtcctgactgtggcataagcatagatgaggtggagccgagaagcttttccttcaacaatccgtttggagcatgtccgacctgctacggactcggctacaagatggagtttgacccgcagcttatggtgccggacacatcactttccatatctgagggcgccatacaggtgatgggctggcagtcatgtacagacccaaagagctatacctatgcgacactgcgtgcactgcatgagggctatgggcttcctctggatacaccgattgacgatttatctgcggatatgaaaaagctgctgttttatggtggagacggcagagtgctcaaggtcagatacaaggggcagagaggtgaaggtgtctatgaccttgtatggaacggccttgtggacaatgttgagcgtcgctacaaggagaccttttctgatacggcaaaggcagagtatgaacagtttatgcgcattactccgtgtacgagctgtaaggggcagaggcttaagccgtcgtcacttgccgttacagttgcggacaagaacatatatgagatgacctccatgtctgtgaaggagcttgtgaagttccttgctgatatagagcttacagagcagcagcactatataggagaccagatactaaaggaaatccgtgcgagagttggctttttgcagcaggttggtctggactacctcacccttacccgcgggactgcaagcctttcaggcggggaagcacagcgaatcaggcttgccacgcagataggatcagggcttgtcggtgtggcatatatacttgatgagccaagcattggtttacatcagagggacaatgacaagctgcttggtgcacttatgaatcttaagaatctgggaaatacgctcatagttgtggagcatgatgaggataccatgcgtgcagcggattatatcgtggatgtagggccgggagccggctcgcacggcggagagatagtggcggcaggctcgttaaaggacattataaagtgcaaaaaatcactcacaggagcatatctgagcggtaaaataaagataccggtgccacaggagaggcgcaagccaagcggatatatcacgataagaggagccagggagaataacctgaaaaatattgatgtgcagatacctcttggtatcatgacctgcgtcacaggcgtttcgggctcgggaaagagctcattgaccaatgagatactatacaagcatctggccaaatccttaaacagagccaggtgtatcgcaggtgaccacgacggtatagatggtcttgaacagcttgataaggtcatagacatcgaccagtcaccgataggtcgtacaccccgctctaatcctgccacatatacaggtgtgtttgacatgataagagacctgtttgcatcaacacccgatgccaaggcaaagggctataaaaagggccgtttcagtttcaatgtaaagggcggtcggtgtgaggcctgcggcggcgatggaatccttaagatagagatgcatttcctgcctgatgtatatgtgccgtgtgaggtctgtggaggcaagcgatataacagggagacactcgatgtaaagtacaagggcaagagtatatacgatgttcttgatatgacagtggaggaggcacttgagtttttcaaaaatgtgccaaagatccagaacaaaatccagtcgctctatgatgtcggactatcatacgtgaagctgggacagccgtccacagagctttcgggcggtgaggcgcagcgtatcaagcttgccacagagcttagcagaaagagcaccggaaagaccatatatatacttgatgagcctaccacggggctgcactttgcagatgtacacaagcttgtggagatactgcgcaggctctcagacggaggcaatactgtagttgttatcgagcacaacctcgacgtgataaagacagctgactatataatagatatgggacctgagggcggagacggcggcggaaccgtcatagcgcagggcacacctgaggagatatgcgaggtaaaacagtcatatacaggccggtttttgaaaccatatctggaaaaagacaaggataaactttaaaattttattaaatatgacctttttcaaaaaaaaagtttgaaaaatgggatttattgtatataataagagagtgtatgtgtaaatttaaagatatggcaggaaaggggctattaaaatggtcggatcagatatcggaatcgatttaggaacagcaagtatacttgtttatataaaaggaaagggtgttgtgttaaaggagccttcagtagtagcctttgacagggacaccaacaagattaaggcaatcggagaggaagcacgcctcatgctcggaaggacaccgggtaatatcgttgcagtcagaccgctgcgtcagggtgttatctcagattatacagttacagagaagatgatcaagcacttcatccagaaggcgcttggtaagaagagcttcagaaagccgctcgtgagcgtatgtgtgccaagtggtgttacagaggttgagaagaaggccgttgaggatgctacatttgcagcaggagccagagatgttaagattatcgaggagccgatcgcagctgcaatcggtgcaggtattgatatttcaaagccatgcggaaatatgatagtagatatcggaggcggtacatcagatatagcagttatctcactcggtggttcggtagtcagcacatcaatcaagatagccggagatgattttgatgaggcaattgtcagatacatgagaaagaagcataaccttctcatcggagagagaacagctgaggatatcaaaatcaagattggtacatgctaccctctcgcacagccggagacaattgaggtaagaggaagaaaccttgtaacaggacttccaaggactattacagtcagctcagaggagacagaggaagcacttcgtgaggcaactcttcagatagttgaggcagtgcactcagtgcttgaaaagactccaccggagcttgcagccgatgtcgcagacagaggaatcgtgcttacaggaggcggttcactgctcagaggtcttgaggagcttatcgaggaaaagaccggcatcaatacaatgactgcagagcagcctatgacatgtgttgctatcggtacaggaaagtatgtagagttccttgcaggcaagagagatgaagaattctagaatatacgttttataacaggcagccgtgagggcgatgatatgtccctgcattgcaggaatgtattgtcgcttttttgttaatattgttacaaatgggaatattacagtcagggggattagtgaacaaaataaaggatattgggagaggtgtaattaatctggtatttccaccgcgctgtccggtatgtgatggtataattggtccggttgagagatatatacacagcagatgctgtgaaaagctctttccggttgagcagccacagtgtatgcgctgcgggaagccggttttgtctgagcgaagagagtattgtgacgactgcgcacgggcactcgagcatcacaggcagatgagggaagatgacagctacaggcagggcaaggcgctttttgcatacaagggcagcataaaacagaccatgtacaggttcaagtattcaaacagacgtgagtatgcggcttattttgcacagacagcagtggaaagatattcggactggatacagagctgtgggatagatgttattattccggtgccgatgcaccgtaaaaaaatgcgccagagaggctacaatcaggcagagtgttttgcaagggcattgtctgaaaaaacaggcataaggatggcaaaagggcttgtgcgcagagtgaaaaataccagtccactcaagacaatggggtatgttgaacgcagaaattgtctcgagggggcttttcaagtggcggatagtattgtacaatatgaccaaatactaatagtagatgatatatatactacaggcagtacggcggagtcgattgggcacgagatagcaaagaaatgtcccggccgtgtatatgtgctgtgtatttgcataggacagggaagttaggagggttttatcagatgagaatatctaattgcaagggctgtggcagaatatttaatgtactgtcagatgagcagtactgcccgaactgccagaaaaaaatggatgagaaatttgatatagtaaagagattcgttgaggataatccaaatgtgccggttgagacagtggccaaggagaccgatacatccatgaagcagataaataggtggatacgtgaggaaaggctttcgttttcaccggattcatcatatggtataccatgcgagaactgtggcaggatgatacgtacaggcaggttttgtgatgaatgcaagactaagctcacaaacacactacgcagtgcctttgacacaccaaagagccaggataagcagctgtggcagcaggatgacaaaaaccgtatgagatatatcaggtaagaggatgatttatgataaacgaagaaaaagtaagggaactgtttaatattgctctttgtgacagcaaaagcgatgacagccgtgtgcagaagcagtccgcaagctactacggatgggactatatatggaaagagggcttaaaaagcttttttacaggtacattcgcatttgcagggcttgttgtgatgtgggtggctgtcaatgcaggagagcttttggacaaaataaataagcttgattttaagacaataggtgtcacgattggcatactgtatattgcgtttatggcggtttacatttttgtcacaattgtggtgtatactgcaagatataaggctggcagaaggcaagtgcgcagatacgcaaatcacctgaaggcagtgggcagaatatattctcgtgaggaaaaaattaagcgttagggaggctttatgaacaagttattggaaattaaggataaggcagtcaaattttgcggtgagtatgagcattttatacttccggttcttaagtttgccgttgcatttatcgcatttataacaatagatttaaatatcggctatatggcgaaaatcagctcgatgcttgtggcactgcttttagcacttgtgtgtgcactgcttccggtgaatgcaatactctggatagcttcgattatgatacttttagatatgtatgcgctgtccatagaggtttttgccatcacgtttgtactttttttagtattgtattttgtttattttcgttttgcaccgaaggatggcatgcttgtgatactcacacctatatgctttcagcttcacataccatctgtgttgccggttgcagcaggtcttttaagaagagcttattcggtagttgcaataatatgcggtacgttgctgtactattttcttgacggaatcagacagaatgcatcagcgcttgcagaggtggtagataaaaaggggcagagcactacaaagctcaatgtgacaatgggacagcttctggaaaataaagagatgcttatagttatggcaatttttgttatcactacactggtggtgcatcaggtcagacgattgaaaatcaacaattcatggactgttgcaaccattgcgggagggctcatacagtttgttgcacttgttgttgcctatctggtgcttggactgccggagaagataatctggcttgtgctcagtactgtagctgctatttttgcaggtgttgtcatacagtttatatttatgaatcttgactatgcacgtacagaaaacgtacagtttgaggatgatgaatattactattacgtcaaggcagttccaaagaagatgattgccaaggaggaaaaggttgtaaagcactttggcaatacaggaagccttggaaagaagattccgagacataatcaggaaaatatcagcaaagaggctattgcaaaagatctcgaaatagacgaaaatatatttgaggatgacaaatagttacatagtataagagaaaggagggcgctatggataatgtgagtggtgtattgatacgcttcaaggatcagttccttacattcacaaatgtgccgggcatcaaaatcggtgtgatagacattatagagatacttattatttcagtgctcttctatcatatacttttgtggataaagaccacgagggcatggaatctgttcaagggccttattatcatactgttgtttgtgcttgttgcagcattgttccagatggatacgatactgtggcttgctgagaaactctttaatataggtctcgtggcacttgttgttatttttcagcctgagcttcgaaatgccttggagaatattggtggaaagacctttttgggtgatttcttcaataccggcaggggcgagattgagaaattctccgacaagacaattgatgagctggtgcgtgcatgctttgcgatgggcagagtaaagacaggagcgctaatagtcatggaggatgagataaatctgggagagtatatcagaacaggaatagatgtggatgccatacttacaagtcagctcctcatcaatatttttgagaaaaatacaccgcttcatgacggagcggttatcgtgcgtggcaaccgtgtggtgtcagctacatgttaccttccgctatcagacagcctgtcactctcgaaggatttgggaaccagacaccgtgcagcggtcggagtcagcgaggtaagtgattcgcttactatcatagtttcagaggagacaggatcagtttctacagcatacaaggggcagattgagcacgatatagatgccgatcatctacgcacacagcttaagcttctgcagaacagacatagggagccgggtaaatttgaattaattaaaaggaggtttaagaatgggaaagaagcttctaaaaaccttcacaaataatataggctttaaaatacttgcgatagcatttgcatttatactctggcttgtggtctacaatctcaatgacccggtcaagacaaagacatttaccacaacagtcaccgtcacaggccgtgattcggttgttgacaaggggctatggcctaccatcaaggattcggaaaagaccatcagcttttcggtatcaggcaagagaagctatctgaacgagcttgatgattctgatttttacgcaaatgtcgaccttgcaaatatcatagtagataaggatgatacgaataaggcaagcgtaaaggtagatattggatgcaccaagtacagacattcgattaccttcaacggtggagaccatatgctcccgctttcggttgaaaaatatatgcagaagcagtttgaggtaaaggtatcattggatggaagtctctcaggtgcgaaagcactgggaaacaagccacaggcaaatccaaaggtagtaaagatcggaggtcctgagtccattgtttcaactatagcatcggccaatgtaaatataaaggtcgatgacaataccataatatcagataatcagataactgatcgcggtgatctcactctgattgatgataatggcgatgagatagatatatcaaagcttgatgtggacagccagtatcagtctatagcagtgacagttgatgtcctaagtaccaaggaggtgcctatcaagtgtactacgacaggctcaccggcaggaggaaagagcgtgctcggagtagaactatcagaggagtctgtaatgctcaaaggtaatgcagaagcattgaacaatatcacatctatagatgtgggaccaattgatatatcgggcgcaacagacgatataagtacatctgttgacctgacaggatatctgccggatggagtttttatagtgaactcatccaaggcaaagctcagtatagatataaagattgaaacaaatgcgacttcaaccatgacgctgaacagttccaatatcacatatgacggactggaagagggatatacgcttacatttgtaacagataagagcagtgtcatagtaagcggcaccaagtctgatatagatacactttcgggaactacactgaagggtaaaattgatgtgacaggccttggtacaggtacacatacagtgacggtaaagccaaatctggatgagaccaagtacacatggggcgagataaaggttcagatagttatcggaagggaaggtgacggaggcggcacaacgggaactgatggtacaggaacagcctcgggctcaacaacaggcggtacaacatcaggcgacaccggcacaggcggttcatcgtcatcgggcagcacatcgtcaggaaacaccggaaataacggctctaacagttcatcacattgatagatatataaccgaaaagaggtaataaaagtggtagcacaaaaaataataatcaagaatcctaccggattacatttacgtccggccggcaatctctgcaaagaggcaatgaaatttaaatcaaaggtaacatttatatatgacgagaaaaatgtagctaatgcaaagagtgtactttcagtgcttggagcatgcataaagtcaggcgatgagatagagcttatctgcaatggcgaggatgagagcgaggcgcttgaacaccttatacagtacatcaaggatggactcggagagtagtacacaaggaaacaggtatacatggagaaacatatatggagaagcttttaaccatagtcgttccggcttacaatgttgaaaagtatataaagaactgtcttgactcgtttatagatttgtctgtgctcagaagtctggagatactcatagtggatgatggttccacagattccacagccagcctggcacatacctacgagcagaaatatccatacagcttcaaggtactctctaaggagaacggaggccatggatctaccatcaactatgcgataccgcgcgcaacaggaaagtatttcaaggtggtggatggtgatgactggctggacaagagccttctgccacaatttgtacagcttttgaagcacacgcactcggatgtcatatccaatgacttcaacctggtcgatgataggacaaagaaggtcacaaagcgcagaaaggcagtgtccaactcttatcactacaacagggagtggggctttgctgaggcagtcatggatccgctgatcactatacattccatgaccatccgtactgatgtattgcagaagaatgatattcgtgtggatgagcactgcttctacgaggaccaggagtatatactctaccctataccatactgcacaagcatcacgttttcaccgctgccactgtatcagtacaggcttggcagaagcgggcagagtgtggacataaagatgatgatcaagcgccatgaccagcaccttaaggtgcttgatgcactgtttgagtacaacaacgtgcacggaaatctgcagacctacaagaagcagtaccttgagcgcggcatagccgaagcggtcgatgatgagtaccagatatttctggcaaagggcaatgctgcaaggaacgttgagcagatgaagaagtttgacgagatgctgcgtgaggagcacccgggagtgtaccaggcgtgcagcaggaagagcgtctggatgcttagaaaaacaggttttaagatatttccgatggcagcatgggtctatagcagactgcgtggtaattaatttcatgaataggcgttaatgagtatgcaatactctttttaataatagtaatcaggacggatagaacagttaatgagtaaaatattatcaatcataataccaacatataatgcagaaaagtttctgaataaggggctgtcgtcatttctggtatgcagggatacagatgcacagacagcacagcacaactgtaaaatggcaacggagggccgctttgaggaaatagatattgacaaggctatactcgataagcttgaggtgatagtcgtaaatgacggcacacctgacagaagtgttgaagtggcgcagaaatttgtggactggtatccggatacctttgccatagtaaataaaacaaatggaggacacggttctgcaatcaacacaggtgtggagcatgtgagcggaaagtatttcaaggtggtcgatgcagatgactgggtagatacgcttgcgttgaagcatctgattgaatatctcgagcgtatagattcggatgcggtggtacaaagcttcaggtattatgacatatcaaaggatgagtacagaccggcagatgtgaaggtacctgattttacaagagagtacaatttaaaggatatagtaaatatgtgggatgatgtatatgatggtctatcatttcacggggtgatatataacacagggttctataaagcacttggatataagctcacagagcatgtattttacgaagaccaggagtatgcaaccgttccgttttcgtatgcaaaaactgtcagatttattcaggaagagttgtacgtatacagagttggagatgtaaatcaaagtgtttcagcagcgagtcaggtgaagcgtcttccggatttggagcaggttatatttaatgtacttgaggcagagaagagctttgcaaaaatgccacagggtggaaaggaacactttatcagaaagacgtcgggcataatcacaagctattatcaaatagctttgataaaaaataccgacagacaatccggcagagcgatagtagagcagtttaacatgaagcttgctcaaaaaagtgcacttatgtatgaggcagtacagcgtaaatataaagtatttcggctgtttaataagctgcatgtgagcaacagcttttacgagaatcaatttgcaaagctgcttgagcttgccaaaagggttggcagagcagacagactatacagaaaataatactgactaccattgtcaaatatggtgacagacagcgatataagtggaaattaacatatagaaacaggaattagacaggatatggaaacagagaataaaaagatactatcaataataataccgacatataatgcggcaaagtttttggataaagggttatcatcatttattattgatgataactctcttttaaatatgctggacattattgttgtgaatgacggctctaccgataatagtgtagaagttgcacaaaaatatgtaaataaatatcctgacgtgtatcggatactgaataaagaaaatggtggtcatggctcggcaattaatgaaggtgtaaaaataataaaaggaagttattttaaggtagtagacgctgatgactgggtaaacactgatgtattgaaagaaactatctgttatcttaaagataatgaaaataaacatgagaatttcgcagatgcagtgctgatgagttatagatcatatgtgctacagagggaaaatactgatgaatatccgtacgacgataaatatataacaaaaaatgatggaccatataatgccggatatgtagatgagcatttatacgatttctggtgggggctgagtctgcatggggtgatatataatacgcagttttatagaaatacaggactgacactctctgagggggtattttacgaggatcaggagttttcaataatcccaatggcatatgccaaaagtatctatgcatatgataaggcactttatgagtatagagtcggtgacgtaaatcagagcgtttcgatagaaagctcactgaagaggcttgaccattatgagaaggttatcatgaggctgattgaggcaggccgggatgcggagcactttagtataggcggaaagcagctgtggtttgataaaacaagcaaatttatcaacgattatttgcagctttgcctgattagaaacactgataaaaaacagcttagaaaaaggatgaagctgtttgtcagtcaaatcgaaaaaaagaatacagatatgtataaatgtgtaaataagaattataaagtattttgtatgttgaataaaatgcatatgagcgataaggtttatcagaactattttatacgcctgttacatattgtgcgtcattaggaagctttttgttatcataatgatgaataatatgtttaaataatcggaaaatatgtgacaaatctcacttgaggcatatataagaaagtgataaaatatggtgctgtgagaataatataaaaattaagattaagataaagaggacaaagatgaagaagaaaagtataaaactcctggtagttttggcatgtgtgcttatggcgctgggaatggcgggctgtggaaagaaagcatacaagacattccctgaaaagtacaagcttgcatcagttgatgtaggtggaatgactgctgacgaagcaaagaaagccataaagactgcagtaggcaagtataagatatcagtgaagcttgacgatacatcatttgatatgacagcagaggatttagggcttaagtacaatgacaaagcagatcttcaggaactgataaatgcggccaataaggataaggaaccggaaaagcaggtgaagctttttaaaatggacaagtctgatgagctggagacggctcttgtagactcttatatcactgcaaaaacgcagtcacagtctgatgctacggctcagagcgatacggatacagatgcaaatgatgacgaacaaaagaaggctgcgacagacacacagacctttgatataaaatcaattgtgccatatcgtgctacaatagtctacaatgcagaggcaggacaatttgagggtgttgacggtgtatcaggagatgcgcctgtgtatgacaatgcagctgcaaatcttacaagtgctgtaaaggagctggaggataaggtggagcttacatccacaacaggatatgttgatggagaaaaggctacggacagcgagcaggtaaagaatgcattaaaagaagccaatgcatatcttgatgtgacggtgacatgtaatttcacaccggcaacaggtgaagctgctacagaggctgtaggaaaggatcagatagcccagtggcttatagtgggcaatgacggaatgtcagtttcgcttgatggcgagaatatggctacatattgtacagagctagccaaaaagcatgatgtgtcaaagaagaaaacaggacagtttaagacaacaggcggaagtataataaatgtgcctgtagcatcatcaggacagactgtagatggaaataagctgtatgaggcgattgctgaggcaataaataataagaagtctgcaacagtggaagcagtttacagtgaggcaaaggaagaagaaacaggtgaatatgtcacatatggtggcaactactgtgaagtggatcttactaaccagatggtatatgtatacaagaatggagaactggtagtatcaagtcaatgtgtgacaggatgtatttctaaaggacacggaacacctaccggagtgtattctatcttctcaagagataaggatagatacttaaggggagacggatataagtcatgggttaatttctttataccattcaatggtggaattggattccatgatgcttcgtggagaagtaccttcggtggaaatatctacctgtacagcggcagccatggctgcataaatatgccttattcagctgcaaagaagctatatgagaatgtaacattagatgaaaaagtaattgtatatggtggtgttgacaaggtggccggcaaggcacagagttttggcgggtctgactcttataatgtgacagagggcgacggagcattcaacctcggtgtgacagcagaggataatgcaaagctcacatactcaagtgataatgagggtgtagttagagtggatgagaacggtaatgtaacaatagcaggcgtaggaactgctacaatcactgttaagtccgaggctacaacaagctataaagccggcagcaagacgattacaatcactgtaaatgcaaagccacagccaaaccagacaccatctgtgacaataggatgcggtaataaaactgtaacagagggagatgcaccattctctctcggagcgagtgcttcaaacggagcaggactttcttaccagtcaagtgatccttcagttgcatctgtagatggtgccggaaatgtgactatctacagggccggtaccgtacagattacagctatagccggtgaaatggcaggctggaatagtgcaagcagctcaataaccgtaacagtaaatcaaaaaccacagccacagcctgtgacaccgactgaaccatcagagcagccacagcagaactagagcagacataatagagctggaacaatataatataacaaacgaaatacaacaaagaaaagtgccggaaacggcacttttctattatattgcataattatttacaaaatgtgacatattcttaatactttttttgtgacttctaaaaatagacaaaagaaatgaagtgtagtaatataacataggattaaaccgaaaaataatgttacgatatgtaaagggtaggaaaatggaaaacaacgaaccaataagagatcaggaaattgaaatcgatttagtagcgctgtttcacgaattagtgaagcactggaaggcacttgtggcatcaatggtgcttcttgcagcagtatttggattatactccaagattacttttgtaccggagtatgaggcatcagcagagatgtatgtactgaccaagtctacttccatcaccagtctggctgatatccaggtaggctcaagtctgacaaacgactatgagtatgtcatcacaggcaggacagttttatcacaggtaattgataatctggatatggatgagacatatgagcagcttagcaagagggtttcgatagagaatccgacagatacacgtgtgctcaagattgtagttacagacactgatttagaagcctcaaagacagtggcagatgagattgcaaaggtttcatcacagtatatagctgacaatatggatcagtcacagccaaagattatccagacagcatatgcttcaaagacaccggtgaataataatatccttaaaaatacagttatcggtgcagtactcggactgttccttgcagccggtatagttgtacttggatacatgcttgacgatacaatctccaatgcagatgatatggagaccagaacaggcctcaaggtgcttgcatcacttcctgttgatgagacagagtatgatggagtaaagtcaaagaaaagaaaaaagaagaaaaaccagtcatctaaatcagacgatagcaagagtaagaagagggcagtttaatggaaacagtagttattaatcagataaaagatcagagctatacaatgaaggagtctcttcgagctcttaaaacaagcataagctttagtggaaagggtgtgaagtctatcctttttaccagcagcgtgccaaatgagggaaagacaaccgtagttatggatctggctcgttcgatggcagattctaagaagtcagtccttgtagtagataccgatatgcgtaagtcagtccttgtaggacgactcagagcaaaggtggagggaggcggcaagatatatggcctctcgcattatctttcaggtcaggtgtctttggacaaggtaatatatgcgacaaacatcaagggcgtgttcattctttttgcaggacatgaggtaccaaatcctacagagcttcttgagacagaggagtttagagaacttatcaagtttggagagaaaaattttgattacgtgcttgtcgatacacctcctacaggtgctgcgattgatgcggccgtagttggaaagaatgtagacggagctgtaatagttgcagctcagaatgtcacaagcagccgtgcaatcattaatacaaagcgtacacttgaggactctggggtcaggattcttggagcagtgctcaataagtgtaagtttgaagagtctaagtatggtcattactatggaaactactatggtaattactatggtaattattatggcagagatgaggatgaaaagtaatagctacagacacaaatgaatgacggagaatggtgcagatgaaaaaaaagaaaaatataattattacggcagtaatgattgtacttattgccattatagcaataatacttgtaaggattaacaacagtaatgtcagtaagaaagaagataaagacataaagccgggtacagaggcggttaatacaaattccggtacacagactgtggatgacagcactacggacaaatcaggtatagaggagtttgcgctatttggtgttgacagccgctctgatcagcttgataaaggaacacgttccgattccattatggtagtcagggttgatcatgatgctaagaaaatccgcatggtatctattttcagagactgtatgatgaatattgatggtcatggataccagaaggtgacacatgcacatgcgtttggtggaccggagcttgcagtagatacacttaacaaaaatctggacttagacataaagaattatgttacagtcaatttcaatacagtcggtgaaattatagatgaggtaggaggcattgtacaggatatcgatgcttctgaggcaaaggtgataaacggatatattgatgaggttaataaggttcgtggaacaagctcatcccatattgattcagccggcacatatactcttgatggaactcaggcagttgcgtattccagaatacgttatacagcaggaggagactataagcgtgctgaaagacagaggacagtgctgtttaaggtttttgaatcagctaagcagatgaatacagcggcaaagattaagatggtatcagacctgattggacatgtcaatactaactataatactgatgagattctttcagtatttaaaaatcttgcagactatacagtagaggattctacagcatatccacaggtgttctatggtggaaaggttgatggtgcatgggttgaggtgcctactacacttgcagacatggctacaggagtgcatcagttccttgaaggtgatacaggctatactcctagtgcaactgtaaacgaatacagcagtgcattatcaggaaaagtaagtggaccaaataatgatttaacaaatacagattttggggattaaatatgaacttcagacaaaatggagataagtacctcatcacaatagaagcaattgcactgatagttgtgctggtatttggagcagtgcattttgtgatgccggggaacaatgcaaataagaaaataacagagagccagcaggaaacacagaatcctactcaggtgactgatggaactcagcaggtacaagctgatggacagcaggctgcaccggcatttactccgtcagattcggtcaaggcaaagctggcttctatgacaacagaggaaaaggtagctcagctattcattacgagaccggaggagattacaggtgtatcacagttcactcaggccggtaacaagacaaaggcagctattggtacatatcctcttggtggttttgtgttcaggcaggagaatttttcaggagaagccgcggttacaaagatgatgagtagtttacagtcattttcacaggagagactgggcgtgaatttgtttcttgcaatcgatgaagaaggtggagaaagacttcctcttgcttcagctaatggatatgaggcacagcaggcaccgtcacagcttggagatgctgatgcagcgggcagcagtgcagtaaagataggctcatatatggctaccaatggtcttaatatgaattttggaccgacagcggatatagcatatggtgataatgcggataacgatacatatgcatttggcagcgagtcagcgacggtaggtgactgtgttgcagcacaggtaagcagctataatggcgcaggaatcaattctgttgcaaagtgctttccgggaaaaggaaaggctactacagattcagctacaggaatgctttggatgacagataagctggaggatttagaggcatctgattttgtaccataccagaaggcaattgaagcaggtgttccggcagtcatgatgggaaatgtactttgccagagtgtgacaggagaggaaaccacaccatgctctacatcagccggtgccgtaaactatatgagaactactatgggctttaatggtcttttgattacagatgatttgtcagatgcatctcttaataaggtatgtacacaggatgaggcagctgtggcagctgttaaggcaggaatgagtatgctttatgtttcaacaggttttgagagcagctataatgcagtgttgtctgcagctaacagtggtgagataccatcagaaaaattagatgatgcagttggaagaattcttacaacaaaaggaatttaatatatgcaaataaaagtaaatccgttatactatagagtatagcggatttctgttatatattttgtatatttaaaggagaattgttgatatgtcaaattgtttcaatccggcaaatattcttttgccaaacgatggtatagatatggaaaaatggtcagttatcgcctgtgaccagttcacaagtcaggctgattattgggaggctgtggaaaagcatgtggctgatgcaccgtcaacgcttaatgtggtgtttcccgaaatatatctgggaacaattgagaatcaggagaatgattgcaattcgtcaggggctggtgtcaaaaatgacaaagaaaccggcaggaaaacaaaatatgcttcaatgacagatgatgagagaatcaaatatatcaataccactatggatacatacctcacagatggaaccttaaagcaggcagtgacagacggctacgtgctggtcgagcgtactacggagtcaggggtgcgtcttggcatagttggacttattgatctggatgactatgatttcgacccgaaaaagaagactctcatcagagctactgaggggactgtaatctctcgtataccaccgagagtgaaaatcagggagcatgctgccattgaactgccacatgttatgttgcttgttgatgatcctatagacggacaaaggattgatagatgtcatgaaactacacaggaagctgctgtaaatatagcagctgtaaagcatggaataatcgagtatgtgtatgccatcagggatactcttcgtaagctttacgatacagagctcatgcagggtggcgggcatatccgtggctatgctatcgagggtgaggcagcaaagcaggtgacagaggcattcgcagcaaaacagaatagctgtggaggctttttgtttgcagtaggtgatggaaaccattcgcttgcaacggcgaagacctgttgggaaaatatcaaaaaatcaggaaaattcacagaggagcagttgaaaactcatcctgcaaggcatgctcttgtggaaatctgcaatctgcatagtgaggcacttgagtttaagcctattcacagactgcttacaaatgttgatgtaaaggacctgctatcgtttttcgaagctgaaatcacaaaacaaggacttgcgagcactgagggcgatgagatagtatttgagtatgttgaatcaggaagaggtgacagtgcaaaaacggcaaatggcaatgaagcagtttcagaaaatagcgctggaagatgcacagcaccaataaagaattttggaattaatatcgcaaatagaggtgaccgcctcccggttgagatactccagggtattttagataagtatattgagacacatgacaatgtggaaatagactatatccatggtgatgaggcacttcacggactggttaaggagactaagggatgtggaatctttcttcagtcgatagacaagagcacattgttccctgcaatcaatgcgggcggggtgcttccaagaaagacattctcaatcggtgaagcgaatgagaagagatactatatggagtgccataagatagctaaataatttaacaaataatattgttttttactacacaaacatatttattaagtgtataatataagaaaaatttatttacaaggggacgacaatgggaaaatactttggaacagacggcttccgtggagaagctaatgtcaatttaacagcagagcatgcatatcagatcggtagatttttaggctggtattatggagagcttaagaaacagaagcagctcgacgagccggcaaagatagtaataggaaaggatacaagacgttcaagctatatgtttgagtattcacttgtatcaggacttacagcatcgggagcagatgcatatctattacacgttaccacaactccatcagtggcatatgtagcaagaaccgatgattttgattgtggaatcatgatttcagcaagccacaatccatactatgataacggaatcaagcttatcaacggcaatggagagaagatggatgaggagacaattctccttgtcgaggactatatagacggcaagctccgcctgtttgggcaggagtggaaggagctgccttatgcacataaggacgctattggatgcacagtggactatgtggcaggccgtaaccgttacatgggatatctcatctcactcggagtatattcattcaagggcatgaaggttggtcttgactgtgccaacggaagctcatggaacatggcaaagtctatttttgaggcactcggagcaaagtgctatgttattaacaatgagccaaatggtctcaacatcaataataatgcaggctctacacatattgagggcttacagaaatatgtagtggacaatggtcttgatgtaggcttcgcatatgatggagatgctgacagatgtctctgtgtagacgagctcggaaatgtaatcacaggagatcatatcctttacatttatggaaagtacatgaaagaaagaggaaagctcgataacaatactgttgtcacaacagttatgtcaaactttggactctacaaggcctttgatgagattggaatcggctacgcaaagactgcagttggtgacaaatatgtatatgagtacatgcagcagaatggctgccgcatcggcggagagcagtccggtcatatcattttctctaagtatgcgtcgacaggtgatggtatcctgaccagccttaagatgatggaggtcatgatggcgagaaaacagaagatgagccagctctgcgaggggcttaacatctacccacaggtgcttcagaacgtgcgtgtggctgacaaggcagaggcacttgcaaatccagaggttcaggcggctattgaccaggttactgcagagcttggcgatacaggacgtatacttgtgcgtgagtcgggtacagagcctgttatacgtgtcatggttgaggcagagagcgaggaaatctgccagaaatatgtggatatggttgttgcaaaattaaaataaaggataatgccaaggataatatacataatatacaaaagctgtgtgagaatatcatgcagcttttgttgttatatgtgttcataagtaaatgaattaagataaataaagtggatataattaaatctgaggagagaatattttatgcctgaaatcttaattatttttatattatgtgccggtattattgtaattggtataatattgtgtataattattaaagtgagtcatatgtcagatgacgaacagaaaaaggacgatgaacgacagctggagttcattcgtgcctacaaggagcataaaaaaagacattgagtttaaaggactatataataagagacatacaggaaaagttcaaatatcttccgtcagcagtatatctggcattaatctgcattgcgatgtatatttttgtttgtctgctgcgatatcttttcacaatgagagaggtatcacaggcggatgagagaagaaaaaagatagtgggcaaaatctggcatatgctgttctgtggcacatttgtggcttatatgtatacacttataatgatagtgtattattcaagggagccgggaagccgaacaggtgtcgccgatatggtgctgtggagcacatggggcatgacactgcagatgcacgcttattttatagaaaatatagtattgtttataccatttgggcttttgtttccgctggtttttaaaaattggatgagatggtttacaatacctgttggtgcttttataagcgcatcaattgagtatacgcagctaatcacaggcaggggatattgccagctggatgattttgtgaccaatacggcaggagcagcaattggattttttatttatttgatattatatgcaggggggctggtatggaaaagaataagataagcattgtggtaccatgctttaacgagaaagaggctctgcctcttttttataataaaataactcaggtgtttaatcagatgagtcaagagagtgagacagcgggattgtcctatgaactgattatagtggatgatggctctatggacgggacgctcgatgttgcaaaggagcttgccgtaagtgattccggtgtgaaatacatatccttttcacgcaattttggcaaggaggcagccatgtatgcaggcttgcagcatgcggtgggggaatatgtggcaataatggatgcagatcttcaggatccaccggaaatgcttccgaagatgtatcaggttcttatcaaagagggctatgatgctgtcggtacaagacgagtgacaagaaggggtgagccaccgattagatctttttttgccagaaagttctataggctgatgagtaagatttcaaaggcaaatatggttgatggggcacgtgactacaggctgatgaataggaaatatgtggatgctcttttatcgctaaaagagtacaataggttttcaaaaggattatttggctgggtaggatttaaggtgaagtggcttgagtttgagaatgtaaacagggtggcaggtgagacaaaatggtcattctggcagctttttttgtatagccttgacggaatagtggcattttccaacgcaccgctatacattgcatccatagcgggagtattcagttttattgtggcgatagcagccatgctttttatcataatcagaagacttgtgtttggtgatccggtagcaggatgggcatcaacggtggtcatcattctttttatcggcggcatacagcttcttagtatagggatacttgggctttatctgtcaaagctttatctcgaggcgaaggaccggccgatatatttaataggagaatcaaatatagaaaaacctacagaaaaatattaagactttcttaagagttcttaattcgatagcacatgacatttttttcagatgttatgtgctataattctttttggcaacgtttattattgcatgaaagaggaataagatgaaaaacgtactggagtggcttgaggccacagtagaaaaataccctgacaagcatgcattttcggatactgaatgcagcattacgtttgcacaggtgtatgatatagcaagaaatacaggagcatatctggtagaacagcttggagtggacagaacccctgttgcagtatttgccggaaggaaaatggtgacaccggcatacttcctgggagtggtatatgcaggcagaccgtatgcgccgattgacgcatcgcttcctgacaagagaattgaaaaaattcttgaaaatctctcaccaagggctattgttgcagaaagggaaagtcttgagcatgtggagagcatagtggatgagctggcaaagtcagaaggcttcgatagaccgcagatatttgttgctgaggatatatcgcgctttaagaaggtggtgtgcgatgacagctcactggatatgctcgctgcagtccgcaggcagatgtccatgacagatccgctgtatatcatctacacgtcaggctccaccggcaacccaaagggagtcatgacatcgcatctgtcacttatgacatacatcaacgcatattgtgatgtgatgcatattgaaggtgaagatgtgctgggcaatcagtcaccacttgattatatagcagctataagagatatttatcttcctctaaagaccggctgcagcacggctattattccaaaagagtattttatggagccgaatgtcctgtttgattacatgaatgagaagagggtcagcagtgtaggctggagcgtttcggcatttactattctcacatcgcttggagcatttgaggagacagggcttaagagtctcagaaaaatctgcttctcaggctcagtgatgccatgcagggtgttaaggaaatggcagaaaaatctgccggaagcgcattttgtgaaccagtatggaccgacagaggctacagcctcatgcacctactatagcgtggatcacacagtggaagaggacgaggtgcttcctataggaaaagcctatgacaattacagggtttttctgatagatgagcatggaaatgcaccggctgtaggagaaaagggcgagatatgtgtatgtggaccgattcttgcgcttggctattataatgatccaaagagaactgatgcggcatttacactcaacccactcaacaaggcttatcctgagcggatgtaccgcacaggggattatggaaggctcgatgaggacggcatacttcatttctgtggacgtatggaccgccagataaagcacatgggacaccgtgtggagcttgatgaggtggagcatgccgccaatgtggtcgagggagtagcagaaagctgcgttatatataataaatcaaaagaggtgctgatacttttctacacaggtgactgtgacaggagaagccttgcgctggcactgagggacgagctcccgggctttatggtaccaaggaaaatcaagaaactggagcagcttcctaagcttccaaatggcaaatatgatatgaaaaaactggaggaaatgtaaaatgagagacacgattttagagattttagaggaattaagaccggatgtggattttgagaaggagacaaagctcatcgatgacaaaattcttgagtcatttgatatagtttcactcgtatcggagctgactgatgagtttgacatcacaatcagaccaaaggatctggttccggagaatttcaactcagttgatgcaatcgagaagcttgtgaaagagcttgtggaggaataaagcatatgagacagacaccgtactatgtatttgatacggacgagtttgcaaaaagagcagccatgataagggctgctcttgattgtaaaggaggacgtaggataccgctttgcttttcgataaaggcaaacccatttctgcttcacaggctgccggagggcttagaccatgtggaggtgtgcagcccgggagagcttgagatttgtatagcactgggcgtgaagccggagagcatcatctattcaggtgtgatgaaggaaaaatgcgatatagagcgagcagtttcatatggcgccgggatactgacctgtgagagcataaggcatgcggcgctgatatcagaagtgatgtttgaatgtataccggaaggtgcgcatgaagccagatttgtcgaaacgaaagcacaggtcatactgcgcctgacaagtggcaaccagtttggcatgtcgcttgatgatattgagtatatcctctcacacccggatgagtttaaaggcatatctgtaatggggcttcactattattcaggaacacagaagagcctacgaaaaataaataaggatctggaaaaaataaagtctgcacttaccatgttaaaggacaaatacagctttgagccacagcttgtagagtatggcccgggactttgcgtggagtattttgaggatgactggcaggaaagggaaaaacaagcacttgatgaggcagcagaggcgcttagagaatttgccgaggaatatccgcttggcattgagatgggacgattcctcgcagcctcatgcggtaaatattacacacaggtaaaggaccttaaatcgacaggcgatgccaattatgcgattctggatggaggaatccaccatctgaattacttcgggcagaggatggctatgcaggtgccaccgattagggtatatggtggtgaagtatcagaaaatgaagaaaaacccggtgtggaattaacacaaatgccggacgcagattatacactctgcggaagcctctgtacagtagcagatgtgctggtacgcgaggtgaagcttaagaagcttgagcttggtgacattcttgagttcgcacactgtggtgcttactccgtgacagaagcaccggcgctctttttgtcaagacagcttccggctatatatgcatattcgaaggaatgcgggtatgagtgcctgagggagcatattcctgcagctgagataaatctggccggaaaaaaattgtaatttgtaactaaaaaaggcgcccatggcaatttgtcacgggcgcttttgatatgaaataaacaaagcctcttgtgggaatcctaattatcagcctagctccttatcacacatatcaagtacagaggcgatggtagtatccatatcatagtacttgtactcgccgagacggccgccgaatataacgccggtctccttatcggcaagctccttgtatctggcatagagctgtccgtttttctcatcgtttacagggtagtaaggctcatcgcctgccttccactcagaagagtactcacggctgatgatagtctttggcaggtcattgccatcctcatccttgccgaactcgaaccacttgtgctcgatgatacgtgtccatggagtctcacggtctgtatagttgacagcggcattgccctggaagttaggaatatcaagtgtctcattctcaaagcgtactgagcggtattccaaagtacctagcttaaagccaaagtatgcgtcaatcggacctgtgtataccaccttgtcagcaagagcatcaagctcagccttgtgctcaaggtagtcggtattcaatctgacctcaatgccgtcgagcagattttcaaccatcttggtgtagccaccgattggaataccctgataaagagcgttgaagtaattgttgtcaaaggtaagtctaacaggaagacgctttatgatgaaagccggaagctccttacaatcacggccccactgcttctcagtatagcccttcacgagcttctcgtagatatcacggccgacgagtgaaatagcctgctcctcaagatttttaggctcgccggtgatttgctttttctgctcctcaatctttgcagcagcctcctcaggtgtcaccacaccccacatcttgttgaaggtgtacatattgaaaggcattgagtacagctcacccttgtagtttgctacagggctgtttgtgaagcggttgaactcagcaaactgtgtgatgtagttccaaaccctcttgtcattggtgtggaatatgtgggctccgtacatgtgtacattgatgccctcctgcttttcggtgtaaacatttcctgctatgttaggacgcttgtccacaacaagcactgatttgcccttggcctttgcctcatgggcgaagatggctccgtagagaccggaacctactattaaataatcgtatttcattgtattctccaaattaatttagatagatttttaaaagagtgattgatttatcaaccactctattgtataatctactcaaaggtaatcggatgttattccgatttgccctcagtgattgattagtataaagattagcaccctcactttaggcggttggggtgctatttctttttgtggttgtctatatacgacaatgctgcaaaaactactagtaacaatgtaagtacttcaattgtattcatagtaacatcatcccccttctgtaaaactagagggatttatcagaattaacacccgagcttttttcgactacccaatgattatatcatagagtatatgggctatcaaggaggcaattagagaatatgaaactacccggctactactcctcaggagaatttgcaaaaaaagcgcatattacaaaaaagaccgtcaggtactatgacgagcacaatattttaaaaccatcctacgtaaacgaaaacggagccagattctataatgatgacgactttgcgcgtctacagcagatactgttccttaaatatctgggcttttccctagatgatataaaggaaatgacactcagaaacacggacagcaatgtcatgtctgagtcgcttcacatgcagctaagtcttgtagaggagagaatagagcagatgaagcttatgaaatcagcactgcaggaggcttcagaggtaatagacgaggggcgaagcgtggactggagccatatgctggagctggtcaatataaacgagatggagcaaaagctaaggcagcagtacagggatgcttcaaatatatcagccagaatcaatctgcacagggatttctcgattaatccggtgagctggtttagctgggtatttgatgagtgcagcttttttgagggggaaaaggtgcttgaggtgggctgtggtgatgcctctctctggacacagaacatagacaggataccggcagatatgcagataaccctgactgatatatcgtatggcatggtaagggatgcgacgagaaatgtaggcgcagatgacaggcgcttcacatatgaggtgatggatgcccacaggctgtataaaccggatgcatcgtatgactgcgtgatagcagaccatgtactgttctattgtgacaatctggatgctgtgtgcagtgaaatcctaagggtgctaaagcccggtggtgtgtttgtgtgcagtacatacagctcacggcacatgaaggaaataaacgacctggtgcagcagtttgatgaccgtatagagctgtcagcggaaaggctgtatgagcaatttggtaaagaaaatggtgaggcaatacttggaaaatactttggtgaggtaagctggcatggatacgaggatgagcttgtggtagaaaaagcagagcctgtgatagagtatgtgctctcgtgccacggcaaccagaacaggtatattgtcgaccgctataaggaatttgcggcatttgtcagaaagaagacagagggagggttccatatcacaaaggatgcaggtgtatttattgcacgaaaatgattcaaaaacaggatattataagcatatattttgtgaaaaatgctaaaaatataaaaaagtacttgaaggtgcccttggggcaccttttataatgcaggtaaatgatgaatcaggtcagtgtattctacagaccgaaagcatcaagtgcagcacgtagtttcagtttgaaggagaacaacatgaaaggtattatattagcgggaggttcaggcacacgtctttacccactcacaatggtaacatcaaagcagttacttccaatttatgacaagccaatgatctattatcctatgtcagtacttatgaatgcaggtatcagagatattctgatcatttcaacaccacaggatacaccaagatttaaggagctcttaggagacggacatcagtttggtgtcaacctcacctacgaggtacagcctagcccggacggactggcacaggcattcgttatcggtgagaaattcatcggtgatgatacagtagccatggttctcggagacaacatcttcgcaggacacggactcaacaagagacttaaggccgcagttgaaaacgcagagagcggtaagggcgccacagtattcggctactatgtagatgaccctgagagattcggtatcgtagagttcgataaagagggaaaggctatttcaattgaggaaaagccggagcatccaaagagcaattactgtgtcacaggtctttacttctacgacaacaatgtagtagagtacgcaaagaaccttaagccatcagccagaggagagcttgagataacagaccttaacagaatctatctcgagaaaaaggcactcaatgtagagcttttaggacagggcttcacatggcttgacacaggaacacatgagagtcttgtagatgccacaaactttgtcaagacagtcgagacacatcagcaccgcaagatagcatgtcttgaggaaatcgcttacttaaacggctggattacaaaggatgaagtattaaagacatatgagctcgtaaagaagaaccagtacggacagtacttaaaggatgtacttgatggaaaataccgcgagcaactgtactaattatagtaaaatcgacattgcgttagttagctggtagattaagttaatagaaataatttaaatctcgcttgcaaaaagcgggaatcaggaggaaattaaaatgacaattatcgtaacaggtggagcaggatttatcggaagcaacttcgtatttcacatgcttaacaaatatccggattatcgtatcgtgtgcttagactgtctcacatatgcaggaaatctctcaacacttgagcctgtaatggacaatccaaacttccgtttcgtaaaggaaagcatcacagaccgtgacgctgtatacaaattatttgaggaagagcatcctgacatggttgtaaacttcgcagcagagtcacacgttgaccgttcaatcgagaatccacaggtattccttgatacaaatatcatcggaacatcagtacttatggacgcatgccgcaagtatggtattaaaagatatcatcaggtatcaacagatgaggtatacggagatctgccacttgaccgccctgaccttttcttccatgaggatacaccaatccatacatcaagcccatattcatcatcaaaggcagcagcagacttactcgtgctcgcttaccaccgcacatatggacttcctgtaacaatcagccgctgctcaaacaactacggaccataccatttcccggagaagcttatcccacttatgattgcaaacgcgctcaatgataagccactcccggtatatggaacaggtgagaatgtacgtgactggctctatgtagaggatcactgcaaggcaatcgacctcatcatccacaacggacgtgtaggagaggtttacaacgtaggcggacacaatgagaagacaaaccttgaaatcgtaaagattatttgcaaggagctcaacaagcctgagagccttatcacattcgtaggagaccgtaagggccatgatatgcgttacgcaatcgatccaacaaagattcacaacgagctcggatggctcccagagaccaagttcgaggatggcatcaagaagacaatcaagtggtacctcgacaatcgtgagtggtgggagacaatcatcagcggagagtaccagaactattacgagaagatgtacgcgaatagataactgctattcgtaaaccttgaagaatcggaatgtgtgtttacgaatatttgtaaaaaggagaccccaaaaaaatgaaaatatttgttacaggagttgcaggtcagctcggacacgatgtaatgaacgaccttgcagcacgcggttacgaaggaatcggaacagatatagcaccacagtacagcggagcagacgatggcacagcagttacaaagatgccatatgtctcactcgacatcacagaccgtgatgcagtggaaaaaacaattacagagcttaagcctgacgtggtagtacactgtgcagcatggacagcagtagatctggctgaggatgatgataaaaaagcaaaggtgcatgcaatcaacgcagacggcactcagaatatcgctgatgcctgcaagaagatagatgccaagatggtatatatcagcacagactatgtgtttgacggacagggcaccacaccatggaagcctgactgcaaggattatgcaccactcaacgtatatggacagacaaagctcgacggagagcttgcggtttcaaatactcttgagaagtactttatcgtacgtatcgcatgggtatttggtgtaaatggcaagaacttcatcaagacaatgcttaatgtcggcaagacacacgacaagcttacagtagtaagtgatcagattggtacaccgacatacacactggatctttcaagacttctcgtggatatgattgaaactgacaaatatggttactatcatgcaacaaacgagggtggatatataagctggtatgatttcacaaaggaaatcttcaaacaggcagtggagcttggacatactgagtattcagaggacagactcacagtcgcacctgttaccacagcagagtatggtgtgtcaaaggctgcaagaccttttaacagcagacttgacaagagcaagctcgtggagaatggatttaagccactccctacatggcaggatgcgctgcacagatatttgcaggagattaacttttagaaaggacatagaaatcatgggacagattaaagtacagaaaaacgtaggtggaatcgaaggactttgcatcatcgagcctacagtacacggagacaaccgtggatactttatggagacatacaattcaaaggacatgcaggaggcaggcattgacagagtattcgtacaggataatcagtcatgctctacaaagggagtgctccgcggacttcatttccaaaaggaatacccacaggcaaagctagtgcgtgcagtaaagggctcagtgtttgatgtggctgtagacttaagaagcgattcaaagacatacggcaagtggttcggagtagagctcacagaggagaataagaagcagtttcttatcccggagggctttgcacatggatttttagtactctcagatgtagcagagttctgctacaaggtaacagatttctggcaccttggagatgagagcggccttgcatggaatgatcctgcaatcggtatcgagtggccacagctggtcggagagtatccgggaagcgctgacggaagtggatacacacttgaggacggcacaccgatcaatttaagtgataaggatcagaagtgggagacactggagaatacatttaaattctaaaataaataaaacttgcaataagctatggatggtttatactgttcatagcttattttggtatagaaatttaatatagatttaatatagatatataataatcagtggcaaatatattacaaatatgttaaaatatcttttatggacaaaaataaatcaatttcaacacagaaaattaacagatgggatatagtatactttatattgtatggcattgtgcttgcaaaatgtgtatacgagactaccatgttttcgcagcaggtgcttgtaggaacctttaagctttttcttgcagcgatggttttgtatacaggagccaaggtccttttttcaggatactacagcagaaaagagcagcttgtaattgctgtagctattatcatatttggaatagtaggcttacaaaccggttattatgagctgctacagccggttctacttattatcggggcaaaaaatgtgaggtttgacaatatactaaaggtatatacggtggtggtatcggtcatgcttatagtggcagctatagccagtcagacaggtgtgatagcggatgtgataggctattcacctagaaatgcagcagcagccagacattcatacggcatcatatatccaacggactttgcggcacatatattttatctgatattggcgttaagctgccttggtatatggcagagggtgctggaaaacgaaaaatacagatatctggcatggctcagatggcttatagtgatagcagcagctgtatttatatatataaaagcaggagcgtttacaggaacagtctgcttgataggatttctggttttagcaggactgatttatctgcttgagaggaaaaatctggcgcgcagagtgtgtgagatatttaaatatctgccgatagtgtgggcgagtctttttcttacactcagctatttttatagcgagagcaatgctataatggttaaaatagactctgtactgtctcaaaggctgatggtgagccacaaagtgtggagtgagtatagcatcaagccatttggacagtttatagaggagcagggatggggaggcgtcgcagacccgacagggatagaccctgcaaagtatttctttatagatgatatgtatcttagaatgctgtttgagtatggaataatagtgtttgctgtagtgctgatattattaatatttattggtcacaaggcaataggagcaaagcaatatgtgctttttgcagcaatagtcatgattggagtgcactcctttatggaacaccatctgctggagatggcatataatcctttcctgcttgtactgcttgccggtatagatactgctgatgaggaaaaatccgggagaaagatatgaactcaaaaaaatggataatccagtaccttgaggtacttcttgatataattgtgatgtttacatcttatctgattgcaaactggtacaagttcggtttctttagaacgggacttataaaccatacagagcactatcttacactttttttggtggagctcgtggcatatgtggtagtacatttcgtggcatttgcagatgataatctgataaaccgaaagctttttcctgaaatatataatgtcctgaagatgtatgtatatgtgggtgcaatcacagtcggctgtgtatatttcacaaaaacaagtgaatatttctccagagggcagatgggtatgaccttcatactgagtactatattcacggtgatagtcagacagctgctgaaaagactggtgacaaaggaatatcaccgctcaggggccaatgagaaaatcatgcttgtcacaacctcggaccaggtggagcgagtgataaaaaagataaagaccacaagaaactgggattttcgtatatcgaatattgcaatactggattgtgatatggtcggtgagatagtagacaagatagaggtcgtcgcaactgccgataacctgcttcaggtgatatcaacagcagagatagactcggtgtttgtacatctgccggacaattatccgtttaagcagagagagtttgtcacagtgctcaatgagatgggaaagacggtgcacctgaatgtaaacgagtatgaggccaaggtcggtgagcattatatggatttccttggaaaatacgcagtggttacatggaagaataagacataccgcgtaaggcatctgcttattaaaaagctgatggatctgctgtttggcgtggctggaagcatacttatagtgccggtgtggcttgtagcatttataggaaaaatagtcacgggcgaccatggaccggtgctcatatcgcttgtcagagtcggcaaaaacggacgaagattttattactataaattccgcaccatgtatatggatgcgagggatagatatgacaaatggatactcgatggaaagaaggggaaagacccgagatttacaccggttggaagaatgcttggggcattaaggcttgaaaatctgccatcagcctggaatgtgctgtggggagatatgagcatggtgggaaatcctgctccatcgctgcctgagtttatagaatactctgcatttcacagaaaaagtctatcggtaaagcccggaatcataggcttctggcaggtatacagcagggaacacaggctgcttaccgaggaggagcaaagcgagtacgaccaggaatatatactgaactggactgtgggcctagatctgaggattattttcagggcagtatgtcctctgtgcaggtcagtgtcaaagagagagcttgtcatgccggcacagctggttgatgagatgagatgtttgagcgagctagtgaaggatagagagcctttaagctatgacatccaggcatatcaggccactgaagacagcggaaagccggtatacagatttataaagcgtctggtagatattgttgcctcactgcttggacttatagtactgtcaccggtgtttatcatactcgctgtgataatcagaatgagtgatggcggtagcgtgttctatgggcacacaagagtcggctataagggaaagaaaatatctgtatacaagttcaggagcatgaagactaacgcaggtgatctggaaaagatactgacacctgaacagcttgagcagtatgtaaaggaattcaagatagacaatgatcctcgaatcacaaaaataggaggcttcctgcgaaagaccagccttgatgagctgccacagttaatcaacatacttaagggcgagctctccatagtgggaccgcgtccaatcgtggagaaggaaaccgagatatacggcaaggacattgcaaagcttttaagcgtaaagccgggactgacaggctactggcaggcatatgccagaaacaatgccacctatgagagcggagagcgccagaggatggagatgtactatgtggagcactgctcgctttggatggatataaagatacttttcagaaccgttttctctgtaatcagggaggatggagcacaataatcagaacatatgtgagaaatatgatgaagaaattggatttaaatagtataacaataagtctcataatacctactctcaacgctgcagagtatatgcccggtctgatagagatactgggcaggcagacacgtaagcctgatgagataatagtgatagactcagaatccgaggatgccacagtacgcatggcagagcaggcaggctttaggacactaaaggtcaagagaagcgaatttgatcatggtggaacgagaaactatgcggtagccatgtcgaagggtgatatagtgatgtttctgtcacaggatgcattgccttcggatgaacactatgtggaaaatatgctggcaggctttgaaaacgaagaagttgttatgatatcagccagacagctcccgagaatggatgctaagcctgacgaggcattagtcagggagtttaattatcctgcaaaaagctttgtcagaagtaaagaggatataccacgacttgggataaaggcatatttcttttcggatgtatgctcagcctacagacgtgatttctttgaagacataggcggctttgaaagcccactgctcacaaatgaggatatgctgatggcagccagggcacttagggcaggatacaagataggctattgtgccacagcgcaggtgtatcactcacacaactatacatttaagcagcagtacaagcgcaactttgatgtagcggtctttatggagacctataaggatgagataaagtgtgacggcaccacaggtgagggcgtcaggatggtgcttttcatagaaaaaaagcttctaaagcagttcaagataggggcagcagtgcactgcatatttgacagtgcggcaaagtttctgggcaacagggccggaagaaagtggaagaggaagaatgcatagcacagacaagatagccattctaatggctacatacaatggagaaaaatatatatgtcagcagatagactctatcctgtcgcagacctgcaaggactgggagctatatatacacgatgatggctctacggacaacacgatagctgctgtagaaagctatgtggaacaataccaggataagatacatctgatagatggtaaatcaaccggcggcgcaaaatataacttcttctacctgtttggtcaggtggaagcgccatactatatgacctgtgatcaggatgatgtgtggctggaaaagaagatagagctgacatatgataagatgctgactattgaggacaaagcagatattccgtgcctggtatacacggagcttcgcgtggtagatagcgagctgaatacaatagcggacacgatgagcgaataccagagtctagactgtcacaagcgtacaatcaaccagtttatattgcagaattctgtgacaggctgtacaatgatggtaaacagggctttaagagataagatgcttcgcatcactaatatagacaatactataatgcacgactggtgggcagcacttgtagctgcacagtttggccaaacagcatttatagatgagccaacgatactgtacagacagcatggagacaacagcctaggagcacttgggataaataagctctcatatattgtgcgccgtgtctggcagaaaaaacagatacaggagagcatgaggcggggacggcttcaggcgagagaatttgcaaagacatataatctgcccgatgacagcctggcggtaaggtatgcggcactggaaggtaaatccagacgcgtaagacaacggttttataaggaaaatgatatgtataagaccgggaccatgagacggctgggacaggctgtgtggggatgatttgacaaaagtatcagtagagagtataat

SEQ ID NO: 1456 - DNA, 6812 bp, Unknown
  gut microbiota DNA sequence
aaggcgccgtaagttatattgataagtctgcttctgctgacgagttggtaaaaaaactcacagctattagtaaaggtcacaagtccactacgccccctttattagatcccctgacagatcgtgaagcggaaattattaaggcgattggaacagggaaaacaaagcatgaaatagcgcaagaactgtatatcagtgaacggacactttacaaccatatccaaagcatctatgataagctgggggctaaaaatgctatcgaagcctataacaaggctattgcacttggatatatcacacccttaatatgagtttaggcaataagagggacagatatatcagaacacaagtgacaagtatgcacattatgtaagcagatagcaaaaacaagtatcattgaacgacttcatcaaaacaataaagaaaagctgggagcaaaattaagtctgcttccagcttttttgtatttgttattgtatgtggttgactaaggaatattgtttaagcgtgagtttgtgatattgggtgtggtatctttaactatgggaaactcctgtctcccaacgagatacagttcttccagatacatttagattttccgcaaattcttcctgtgtaattcccttttctttacgaagttctttcaaaaaacttcctattttcttttggttcatattagctgcctcctttcatcaacagactaacttaatgagcaaatatacaacacgacacaaagcgagagaatgccgtatttacgctattggacaaatctgtctagtattatttaatttccgatttttatatcagagggagtgatgaaggaacagttatcaacagggttgtgtttgaagggtatgttgatgatgcatgtaagtatggtagtttccttgatttcaaattgtaggttttgcaggtcttactgtaagctgtaaaccgagatgctgaaaaatattaagcagtgttccgaggtttggtgttgttttgcaggattcgattcgagctacggatgattgtggaataccacacatagcagcaagctctctctggctaagtccgagagaagtacgctgctccaccatggcacttacgatagaggaaatattttcaacttcatcgatgtcttttcctatctacatttccataatcgtggactatacgatttctcaatccatagattgcattccatggaacgtttcctctgtggagtttatattcatctgacaatttttttgcattctcagatatttgaatcatacgaaataacatggaatcgagaaggacttcatttgcattaagttcctcaatatcaacatttttcatatgtgtaacaacaaattctaaatcctgtttcaaccttttaatataataagcatcattcttaacattatccatatatttttactccatcttttagtatttcctgtgtcagctcaaaattatctttcaattgatttatatcaagtacatcaacttttttgtgaagtgcagttcttatatcctccactaatccatagaattttaagccggtcgcatctgttgaaattaaaagatcaacatcgctggttggttttgcctttccttttgagtatgagccaaacagataacagaaattaacattatatttatcaaatacatctgagcattttctttttatataatcaatatcaactataccattttcttcatcaataggattaatttcagatattttttcaatcatatatttgtactttatgctatctgcctttttttcatcattttcataagatttgtatgaacgcaaagaaactccgagtatatccgcagcttgattttgtgttaattttctctcaattcgtaaagattttaattctcccatgtttgcacctctaaatatagagtagtgcaaaaattgcactttgtcaagctggacagtgtaaaatttgcacttttgtttttaattaaacgtaactattctaacaatatgattttagaccatttggaatcatgagcttaatgtgttattacaaataaatattaaaatgaaacaacgtatactcttcttaatctgttatttttaacgagattaagaagagtatatttgcattttgacttgttttttgccacaaataccgttatactttacttaaagtgtataaaaaacagagattaagaaaagtataacgatataatatattttgggtgtaggtgcaggatgcttgtaggtagagaaaaagaattacatttattgcatgatatacaaaatgatgatagctcacattttgtggcagtatacgggcgaatgagagagggaaagacctttctgatacgtgaggcctttggctatagatttacatttcagcatgccggtctgtcagagggaggaatgaaggaacagatatatgcgtttacgtcatctctcaaagatgcagggtatgatatgaaaaagcagcccaaaaactggcttgaggcatttgaagcattaaaggatgtcataagattgtcgagtgaaaagaagaaaataatatttattgatgagctgtcgtggatggacactcaaaagagtgatcttatggttgctttggagaatttctggaatggatttgcttctgcaaggaaagatatagtccttatagtgtgcgcgtcagccacatcatggatgctctcaaaggtcgtacacaacaaaggcggattgtataacagattgacagaacagatacatctgcgcacattctgcctcagggagtgtgaagcgtatgtaaaagctgccgggctggcattaaacagaaatcagatattgcagtattatatgatttttggcggagtaccttactattggggatttttgaaaaagggattaagcctttcgcagaatattgatagtatattgtttgaaaaggatgcgcccctgcgcgatgaatttaagtatttatatgcttctgtattcaaaaaaccggagaactatgtaaaaataatagaagctcttgggactaaaaaggttggaatgacaagagaagaaatcatcacagcgaccaaaatccctaattcgggagatttgacaacgaagcttgaagagcttgaaagctgtggatttattcgcaagtacaatgcatttgggatgaaaaagaaaaatgcgatataccagttgatggattgctttacattgttttatttcaaatttttgaaatcagaacagacagatgagcatttttggacgaaccagattaatacgcccgcagtgaatacgtggctggggctggcgtttgaaagagtgtgcatggagcatgtagatcagattaagtttaaattgggtatttctggcgtgctgacagaggtaaattcgtggtactgcaaatcagatcctgataatggcattttcggctcacagattgatatgctgattgccagaaaagatcaggtgattaatttgtgcgagatgaaatattcgcagtcagaatataccataacggagaaagtggacaggagcattaggaataaaataagtgatctgagagtggtttacggtacaaagtatgcgatatacccaacacttattacaacctatggtgtggtggaaaactcgtattcgcaggagctgcagtcggttgttacgatggatgatctgtttgcctgagataaaactatacgtttaatatttttctgcataagatctgttgacaagtgaataataatagcataaaataaaagtactaaaaaacatacgattttttgtacggaaatgaggcgttaaatatgttagcagtaaagagcatggatgtaagagaaaattttaaatcgttatgtgataaggttttcagaggagaaacattgattgtatcaagaccaaagaatgaaaacatagtgatgatgtcggaatctgaatacaatgagattatgaaagccaagagaaatgctgaataccttgctatgctggataaatctatggctgaagccgaagcaggtggttttattacaaagacagtggatgagttaggagcatacgaataatgaatgttgtatttactccgactgcatggcagcagtacacagactggcagaaggaagataaaaagatcgtaaagcggattaacgagcttataaagagtatagatcgtgatggactattagaaggaatcggtaagcctgaaccgttgaagtataggaaagtatgtagcagacggataacggacgaacacagacttacatataactttgatagtaaccaaaatctcataatatattcctgtaaatttcattatgaagattagcaccgcattaggtgactttctttttactcaataagctcattatctaagagaatattataacagggcataaaaataaaatattaaaaaccccataaattcctgttgacagataggaattcatggggtatatttatatcaacaattaattcatacaaatacagtatgaatataggagattaaaacaaagcattaacattacaatgacatcaaggaggacacaaacatgtcaaacatttatcagggaacattaggacttattggaaatacaccgctcgtagagcttacacacgtagagaaggcatacggacttgaggcaagacttcttgcaaagcttgagtacttcaacccggcaggatcagtaaaggacagaatcgcaaaagagatgattgagcaggctgagagagatggaaagctcaagccgggctcaacaattatcgagccaacatcaggaaatacaggaatcggacttgctgcaatcgcagcagcaaagggatataagattatcatcgttcttcctgagacaatgtccatcgagagaagaaacatcatcaaggcatatggagcagagctcgtgctttcagacggtacaaagggtatgaagggagctatcgccaaggcagaggagcttcatgagcagattcctgacagcttcattccggagcagtttgagaaccctgcaaacccggaggcacacagaaagacaacaggtcctgagatctggaacgatacagacggacaggtagatgcattcgtagccggagttggaacaggcggaacaatcacaggaacaggtgagtacttaaagagtaagaaccctgatgtaaagattatagcagtggagcctgagacatcagcagtgctttcaacaggaaaagccggggcacacaagattcagggaatcggagcaggcttcgtaccaaacacattaaatacagaggtatatgatgagattatccctgtatcaaatgaggcatcatttgagtacggaaagattatcgcaaaagaggagggcgtacttgtaggtatttcttcaggagcagctctctatgcagcaatcgaggtagccaagagaccggagttcaagggcaagacagtagtagcacttcttcctgacagcggagacagatattactcaactgatcttttcaaagattaataaagtatattatgatagcgaataagacacccctgcggtgtctttttgcatataattcaattgattctttaaataccataaacttttcctttgtttttggattctcgggttactatttacctttacatttttgggttttggagttatgaatatttagggataatatattagttatatcttgataaaaatgccaaaaagggataatatattagcatgattaacttatatcaaaaaacatggggtaaatagtaacccgagaatcccctttgtaacccaagactccctctttgtaaatgaaaatcctgttttgtaagcgagattcccggtttgtaaatgaaattcccggtttgtaagcaagattcccgaattttcatttctatttcgatatgatataatacgttcagcaataaatttgcgtacaacaaccagagatcaattctctctcgaaatttttgtattcggagaatccatccctgtttttgattggatagagttgttctattctggctctggcggcactcagcaaatttatttgttactttttgagaagtttaggctttaagatgatgttctcggcggcaaccggtgagcatcccagtctcttaagcacatcttctccatagtaaaagctgaatgtttcgtatgggctacggttgttcagcttttttcttttataagaattgatatggttcatcatcagagtaatatcctgttgtgtcagctcatcgaaactgcttccttttggcaggatacgacgtatcaattcatggttgacttcacaggctcctttttgataaggagcacttggatcgcaataaaatatctttgttctattgcatggaatggtgctacgtttttcgatttcctttggatttgaaaactcacttccgttatctgtcagaataactggaaacaagctattaaatgtttttgccccaaggacttcatccaataagtttatgatctctattacagaggctgatgtatttgcgtcccgcaaaaaagccagcatgagactgctttctacaaagtgtatggtaagaagacattttcctcccacacgaccaatcacgctatccatttgtacaatggtcgtttccgggtttgctcccagatatttttgaaagtcagcgtagcttcgttcaatacggcagccccggtcaactttaaattcaggcttcttataacggggacggtatttcactttacggggcagatcaatgttcctgatatcaaagagctgggcatccacatagttatacaatgtcttttcactgcacatcagttcatctacatgagcaagatagatttgatgaagcgactgcccgtttttaactaaaggactgatgatcccgttaattcttgcaatatcatcttcgttggacatgataccggttctggcttccgaaaca

SEQ ID NO: 1457 - DNA, 34196 bp, Unknown
  gut microbiota DNA sequence
agtggacattcaagacaaaaaagtggatattaaaagtgtactttccgaaaaaggtagtgatttctcggtaaaaacgatgattcatatccatagactttttgaaaagtttggttttgatgaggtgtttggaagaagtgcagttatggaacttcttgggctgaaaggttcaggtgcttcaaaacttctttccaatttggtgcaggtagatattattgaaccggtatccggtcacggaaaagggaaatataaatttaagaagtagtttataagacttccttgaaattatcgacatggtgtgtagacaatctgatgttttgtcttcggcagtaggataaagaagataaggaaacagaacagaaatagattataaaaggtctgttgggcagtatagcctaatgaagcctacagaaaaaggttgcgtgaagccacataaaaatgtataattaagagtaatgaatttcatattcaatgatattggaggtactcatgtcacagtcggttacgataaagagtaataaatatggaatcaatttaattttagatgcggatatgtcatttgctgatttgataaaggcagttgtagagaagtttaaggcatccgccaatttttttaaaaacgcaaagcttgctatttcatttgagggaaggcatctttcagatgaagagcagcagcagataattgcagctattgaggaaaataccacaattgagattttgtgcattgtggagagtggtaccgagcaggaagccattatgaaggagcaggttgaggcatttaatgaagcagtgcagaagcagtgcgagaatgttgcaacagtcagtgttccggagcagttttaccgtggtacgctcaggtcaggccaggtgattaccagcgagtcttcggtcacaatcataggtgatgtcaatccgggagccaagattatagctcagggcaatatcgttattcttggtgcattaaagggcaatgttcacgccggatgtacaggtgacaggagttgctttgtatttgcacttgatatgcagccgattcagattcagattggtgatctgattgcgaagagtccggacgagcctcagccaaagcacagggtaaggcgcaaggaaaagccggcacaggagcaggcgcagatagccatcgcaaaggatggatatatttacatcgaaccaattactaaaaatattttaaatagcatttaggaacgtaggaggaagaaagttcatgagcgaagtaatcgttatcacatcaggaaagggtggtgtgggcaagaccacaaccacagcaaatattggtacaggtcttgcacagttaaataaaaaggttgttatgattgatactgacatcggactgcgtaacctggatgttgttatgggacttgagaatcgtattgtatacaatctcgtagacgtcgttgagggcaaatgccgtatccgtcaggctcttatcaaggataagaaatatcctgatctgtgtctgcttccatcagcccagacaagggacaaggatgctgttacacctgagcagatggttgagcttatcaatgagcttcgtgaggagtttgactatattctgcttgactgcccggcaggtatcgagcagggcttcaagaatgccgttgcaggagctgaccgtgcactcgttgtcactacacctgaggtatcagcaatccgtgacgctgaccgtattgttggccttctcgaggcaaatgagatgaagcgcattgatctgattgtcaaccgtctgcgtgtcgatatggttaagcgcggtgatatgatgaatgtggatgatgtaacagagatccttgcagtcaacttaataggtgcagtaccggatgatgagcagattgttatttctacaaaccgtggtgagccgttagttggctcagacagccttgcaggaaaggcatatatgaatatctgccaccgtataatgggcgaggaggttcctttacttgatttaaatcagaagcatggtgtatttgaaaagctaaaggatatgtttaagaaaaattaaagggggatacgtaccatgggtataatggatttatttaaaaagaaatcttctggtaatgttgcaaaggatcgcctgaagctggtgctggtttctgaccgtgcaaactgctcatcggagatgatggagatgatgaaaagggatatcattgaggttatttcccgctatatggatattgacgctgaagctcttgatgtgaaaatcacagagacagagtctgattctaacaacggaatggttccggcactcgttgccaatattcctatccgtgacatgaagcatcgtccggatccaagatagagtaaataaaataatatgatatgataagatatgagggtcaaaaggtgttttggccctttaattattgtattgaataaaaaagacttgatttgatattagagtgtgatatactttaatacgttacaaataaataaattttagcagagtagacacatgtgcgttaagtgccggatgaacagggagttgtcacccggacgaaaagaaaatcttgcggtacatgagtcgcatcccgctgcatccgaagatattaattatctcctgttgtagttcggtgaggtctgcaaaggaggtaattttttaatgaaaaaattcgttactttgttcaccgattctgcccgagagcttaaatcggtcagaaccatcacaactatggcaatgcttgctgcagttgccgttatccttggatatttctccatcgaatatggacagtttatccgtatcggtttttccggtattccaaatggtatcgttgattacctgtttggaccggttgccggagctgttttccacggagcgcttgacatcatcaagtatctgatgaagcctacaggaccattttgtccacagcttacacttgttgtaatgcttgcaggtgttttatatggctgcttcttttataagaaaaagcttaccatatggagagtacttgctgcgaagtttgtagtaatgctcatctgcaatgtcattctcaatactctgtgtctgcaggtactgtatggacaggcatttatggcaattcttccaatgcgtgcactgaagaaccttattatgtggccgatagattcaattgtctttttcggcattgcaaaggcactggagcagataggattgttccgcaccttccgtaaacaggagcttgtaaagaatgcatagcaacaggtcaatggaccgggtactcaaatgagagtacccggattttttatttaatggaaagaaatacgtataatgtggtatgtgtatcatgttctttataatatatataaatgatgaaaaggaacattgcaacagaataatgtacagacaatataatgcacaaaacattacattaaaataatattttaagtgttaaatgacagtttttatttataattttaagcataagtgtctttaaactgacaattatgaggtatttcgcatttttaatgaaaattgttgacacaatatattgaacgtgatattgtttacttgttcaaaataatacacaaaagaaaacgaacaaacaactacatattaattatgaatatttaagagcaaagacgctaaccggtgaagcactttgctcttttttatttatcaaaatcacaaggatattcaaattaggaggcaatatattatgagattaaaagacacaggattaacagcacaggacatcaaagacaaagtaaagaagtatatgattgagacatatgagcgtttcgatttcatagctgagactgctgagggcatgtatctatatgatgagaatggcacaccataccttgacttttacgcaggaatcgccgtaaacaatgccggcagcagaaaccctaaggttgttgcagcagtcaaggatcaggtggatgacatcatgcatacattcaactatccatacaccattccacaggcgctgcttgctgagaaggtctgcaagactatcggaatggacaagattttctaccagaactcaggaactgaggcaaatgaggctatgattaagatggctcgtaaatatggtatagagaaatatggtccaaacagatatcacatcgtaactgctaaggatggcttccacggcagaaccttcggtgctatgtcagctacaggacagcctggaaacggatgccaggtgggctttggtccaatgacatacggcttctcatacgctccttacaatgacttaaaggctttcaaggatgcttgcacagagaacacaatcgctatcatgattgagcctgtacagggcgagggcggtgttcatcctgcaacacctgaattcatgaagggacttcgcgagttctgtgatgagaagggcatgctcctccttatcgatgaggttcagacaggatggtgcagaaccggagctgtaatgagctacatgaactacggcatcaaacctgatatcgtttctatggcaaagggtcttggcggtggaatgccaatcggtgctatatgtgctacagaggaggtttcaaaagcattctcagccggttcacacggtacaacctttggtggacatcctgtatgctgtgcagcagcacttgcagaagtaaacgagctgcttgacagagatcttgccggaaatgcaaagaaggttggtgattatttcgcagctaagcttgagaagcttccacacgtaaaagaggtaagacatcagggactcttagttggtgttgagtttgacgatacaatctcaggtgtagatgtaaagcatggctgcttcgaccgtcatatgcttatcacagcaatcggaagccatatcatccgtatggttccaccgcttatcgtaagtgaggaagagtgcgacaaggcatttgatatcatcaaggagactgttgagtcactttcatagaaggcttgaattatatttgaagcaggcaacagaatatattgcggcagattttacgagccggataaaaggacaagggcgtcacgattagcttcgtgcgcccttcttttaaacaaagaatataggtaactaagcggaacaagtttatataacaacatatgattaaagtgtcaaaaggtatcgtcgatgcataccttagcaactttcatatcaacatagtataaagatgtatatataagaaaagcgaggggaacgaaatggcacatcttgttattacaataggatgcgaatatggcgctaaaggaaaccagattggcaaaaaggttgctaaagacctgggaatcaaattttatgacagggatactgtagatgaaataataaaagaggtcggtattcccaaggatatcatggaaaaggttgaggaaggtatcaccatcgccggaaaaggtgcagagggtgatgtcagaggctctttctccaaatatgcagacctcacagagcgtgcaattcatgtccagaaaactataatcagaaaattatcagaccgtgagtcgtgtgtgattatcggtcgttcagcagactatatactaaaggaacataaaccgattttacgtattttcatatattcaccggatgaagtgaggattgaaaacgtaatgaagagccacaatttgtcggaggatgatgcaaagctttttattactgaaaaggataagcgttatcataagcgtcatatggcgctgacaggaagcaaccgaggcgatagacacaacagggatatgcttatagacagcagcctgttaggagtggatggcacagcggagcttattgagtctctggcaagaaaagtggtagagaatgaaagtaagacagaagctggaggtgacaagtaatggaacagaaaaaatcagaatttaacaaagtcctgaatgcctgggacgtacttgtaattgcatttggagccatgattggctggggctgggttgtctcaaccggaggctggattgaaaagggcggagtgctcggtgccgcaatcggcttcgtaatcggcggtatcatgatatttttcgtgggaatgacctacgcggagctgacagcagccatgcctcagtgcggtggcgagcatgtattcagctacaaggcaatgggttcgacaggttcattcatatgtacgtggatgattatccttggatatgtcagtgtggcatgctttgaggcatgcgctttcccaacaatcatcacatatctgtggccgggctttttgaagggatatctgtatacggtagcaggctttgatatctatgcttcatggcttattgtggcgatagttgtggcatttttaattatgatgataaacattatcggcgcaaagacagcagcgattttgcagactgtgctcacatgtattattggtggcgccggaattttgttgataattgcatcggtaatcaatggaacagttgataacctggatggacagatgtttgcaggcagctctgcaggtctgaacgtaaaggcaattatcggagtggcagctctgtcaccattttactttatcggatttgacgtaatacctcaggcggctgaggagatcaatgttccggcaaagaaaatcggctcaatacttatcttatcagtagttctggcagttgtgttctacgcacttgtcattgttgcggtaggtcttgtcatgggcccacaggcaattgttgattcagagcaggcaacaggacttgtcacagcagatgcaatggctgccgcattcaacacaaagataatggcaaaggttataatagtcggcggaatgtgcggtatcgtaacctcatggaactcatttatgctcggtggctcgcgtgccatgtactcaatggcagagtcatatatgattccgaagttttttgcaaagcttcatccaaagcacaagacacctatcaatgcactgattctcatcggatctctcacaatgcttgcaccttttgcaggcagaaagatgctcgtatggatcagtgatgccggcaactttggatgctgcgtggcatattgcatggttgctctttcatttattattcttcgcaagaaggagccggatatgccaagaccttacaaggttcccgcatacaagttctttggaacgatggcggtcatcatgtcaggcttcatggttgccatgtactgtataccgggaagcggcggaacacttatcgtccaggagtggggcatcgtgcttgcatggtgtgcgctcggcgtggtattcttcgtcttctgtaaaaagaaatacaaggagtcatttggtacacttgttgagctcatctcagatgaggatgctgcaacacttatgccggaggcagatgaggttgaactggataaggttatcgatgctgcaatagacagggtacttgccaagaaagcaagctaggaaacagaaaggacagattatatatggaaacatttaatttctcggtgccacaggacatcacagtgggaaagggcagtctctcaaagctgccggaaatagccaaaaagcttggaggtaagcatgcactcatcatttcaggacctcatcttgagaagatgggacttgtaaaaaaggcagcagattatctggcatcagttgacataaaagcagacacttttacagatatagaggcaaatccatctgtcgcaacagtggagaaagccacagcaaaatatctggagtcgggcgcagactttatcgtggcatttggaggcggttcaccgatggatgtggcaaaagcagtgggtgtggttgccaaatatggcggaagcgtcacagactatgagggagcacacaaggtgccgggaccaatcgtaccgctcattgcgataccaaccaccgcaggaaccggctcagaggtgacagcattctctgtaatcacagatcatagcagaaactataagctcacagtattcagctacgagatattgccaaaatatgcgatactagatgcagagctcatcacaacagcaccggcaagcgtagcggcagcatgcggaattgatgcatttatccatgcagaggaggcatatgtatccacagcggcttcgccattttctgatgcactggcagaaaaagcgatggcacttatcggaaaaaatatccgcagatttgtagcaaacagaaacgatatcgaggctgcagaagctatgatgacaggctcactttttgcaggaatagcattctcatttgcaaggctcggaaatgtgcatgcaatgagtcatccggtcagcgcttttttcgatgtgcctcacggagtggcaaacgcagtgttgcttcctgcaatcgcagagtacaatgcgcttgcagaccatggaaagtatctgaccatctacaatgatataagcccgattcctgcgtatgcggacgaatttgagcctatgatgcttgtagatgcaatcagggagctttgcacagacatcggaatccctgagaatctgaccatcgcaatcaacaatgccagcaaaaacggaacagtcacaaaggaagagatagaaagcaagatagagccgatggctgtcgatgccatgaagagcggcaacattgctgtcaatccaagggtttcacgccagtgcgatattgagatgctgtatcgcagggcactgtaaacttataaaatacaaaaacggagatatgagtatggattatctgtcacacaatgtatctgaaaatttaaaaagaatacgtcagtcaaagggcatgagcttagatcaggtagcagagcagaccggtgtgagtaaaagcatgcttgctcagatagaaaagggcacagcgaatccatctatcggagtgcttggtaaaatcacaagcggtctgcgaattgagtttcaaagacttatagatccgccaagagtggactatgcgctcatatctccggatgatctggtcccgacaaaggagcttttgggacagtacagggtatggacctgcttcccatacgaggactcaagggaggttgaggtataccgtatcgatgtggagccgggcggcgtgtatacaagcggtgggcacggcgagaaaacacgcgaatatcttacagtcacagacggtgtgctaacggtcgagtgtcacgaccatgtgcaggaaatccataggggacaggtgtataagtttgagaccgatcagcctcatttgtatcgcaatgatggtgatagggtggcaagctgcatgtgcttctttttggattatactaatattcggtgagatttttagcctctcctcaccacagcacttttccctctaaaagcaataccgatgcttataattgaattcacaccattatcgcgcagctctgtgtcgtatttctttgcttctatctgttgcagggcgctgtcggctaatgcagataaatcggtatgttcatctttagtgtgtttaaattcaaagataaatccgggcattccctttgttaaaggcataagctgaatatcaaatcgaccgaggcctgattcgcggtttgagcgtatcttgtagcggtttccaagtatggcacaaagaccaagcatcattccgtgatagaagccttcattagctccatcaatagaagaaatgctttttaccataaaatcctccagcagagcctggagtttttgcgtgtccttggaaaagatagcctgactgatagatatggcaaggctattttggttggtgcggtttagaacctccttttcgtaaacaaaagtaatttctttgttcggaatagcaacatcacacatgaaatttccatcgctttgcggataaatattggcaaccttcaggtatccggctaccagaagaaagctgtatatactatatggattattctgaacctcgggatagataacaccggtatcaatataggctgcgattttttcaccacagagcagcttataaaggtctttggtaatttcaggcgtagctgtctggataatttctccgattatctcattgctgccggtggattgccagaatgctttcggaaagcagttgtcagagatataattgattacagaccatggattaaagatttctgtattgccaaaacgatatccatcgtaccattcgctgagctcattatatttatcgtcttttccatagtatcgcagcatgtcttttacctctttttcagtaaaaccaaaataagagctgtagccatcatctaggatagaataggttttcaggttgttcatgccgctgaagatactttcctttgctacacgcagtattcctgtaagaaagccaaaggcaaggtgtggattgtccttgagtcctcctgagaaaaaattgcgcatgaaatttacaatttccggatagaaattgcaggtatgcccctgctggatgggtgtgtcatattcatcaatgataatgatacattcccttccataatgcttatgaagcagtaatgataaaagctgcagacccatctgacaatcgacttcatccccgctgtctccggcaagaagatgatattgttctttttcgtaagcggttaaaacagaacttgtctcaagctcgttatgtcgtataaattctagagatataagcctgcggattttttgaaaggtttcttcccaggtcatgcttttaacatctttgaaggtcaaaaaaatgacaggataccgtccttgatgtttagtgtagtaatcgccgcattgccatatctgtttgtctttgaaataaacagatgtatcctcgtttgttttttcaaaaaatacgcgcagcatatccatattcagagtttttccaaaacgccttgggcgtgtgaaaagagataccatcggttttttatccagaaaatcacgtatcatcagagtcttatctacataataatagccggtggttgcaagcttaaaatcagatacacctattggcagagatttatttttcgcgaaatgattcatgtgcatggtttcgtcagggattaaccatttacgtccttcctttattgcaccgggcaattcaccgtttttgcacatctgctggattcttcgtacagaaaatcccattgcttttgatgcatctgagcaagataaatattccatgtggcacctccgcataataatttaatagcaatactttgattatattatatgtcattatgcgaaatataacaactgtgatttcacatggatttcgcataacaaggtggaaatttcgcatagatttcgtctacaaacgaaatgctatgttatttatcaggtgttatcctgtgttttcattggttatcctattgcatatataggtttacctatatataatgatgtacgttgagaaacaaattgttttaaaaagaacatcccaggagaacacaatgcaaacattaaagaaattcatcaaatactataaaccctacaaaacagtctttttcatagacctgctttgcgcaacaataatcagtgccatagatctggcgtttccgcagctgcttcgcacgctgaccaaaaccctttttgcaggagcaccgggaaaaattatttctgcgctgattcctattacaataggccttttggtggcatatatcatacagaccgcgtgcaggtattatgtgacatatgcggggcacatgatgggagcgaggatggagcgcgacatgagaaaggagcttttcgaccaatatgaaaagctttctttttcgtattatgatcagaataattcaggacagatgatgagcaagctcgtatccgatttgtttgatatatcggagcttgcgcatcacggaccggagaatctttttatatcgcttataaagataatcggttcgttcatttttctgtttatgataaaccgtatgcttgcggttcctatgcttattcttgtggtgcttatgcttgtattttcatatggacagaataagaaaatgcaggaaacctttatggataacaggcgaaaaatcggtgatattaattcgagtcttcaggatactctggcgggcataagggtggtgcagtcatttgccaatgagcgtatcgagcaggaaaaatttaacagaagtaatgaaaatttcctgatttcaaaggatgcaaattacagatgtatgggaagctttatgagcggaaatgcatttttccaggggatgatgtatcttgtcacactggtattcggtggttttttgatagcgcatggaaggatggaggcatccgaccttgccatgtatgcgctgtatataggcatctttatcagtcctatccagatacttgtagagctgactgagatgatgcagaagggactttcgggatttagaagattcttagaggtggtggaaactgagccggatatagttgatgctgctgatgcaaaaccgcttaaaaatgtaaagggaaatgtctgttacgaggatgtttcgttccactatagcgatgatgatacaccggtgctttcgcacgtatcctttgagataccggcaggaaaatcaattgcgcttgttggaccgtcaggaagcggaaagacgacaatatgctcactgcttccgcggttttatgacgtgacggagggcagggtcacaatagatggaaatgatgtgagaaagctcacgcttgagagccttcgctcgcagattggactggtttcgcaggatgtttatctgtttggcggaagtataaaggacaatatcgcctatggaaaaccggatgcgacgatggatgagattgtagatgcggccaaaaaggcgaatatacacgattttatcatggagctgccggataaatacgatacgtttgttggagagagaggtaccagattgtccggaggtcagaagcagaggatttccattgcgagggtgttccttaaaaatccgcctgtgctaatacttgatgaggcaaccagtgcccttgacaatgagagcgagcgctttatccagagaagccttgaggagctggcaaaggacagaacgactatcacaatcgcccacaggctttcgacaattagaaatgcggacgaaattctcgtggtagctgactgtggcattgctgagagaggcacacacgaggagcttttggcacgggatggaatatatgcgcgctattatgatatgagcaggtaggattaaggaaatttccactgattaatcataaatgaggggcaaaataccttttgaccctttaatcatgttattatagctgcataaactaactatataggagcagacactatgcaggcaatgttcatagacgtagacggcactttaagcagtccgtgctacaaggtaaacggaaaatttcagataggaatgtcagatgtgcagtgggcagactactgcagtaagcatggtgaggatacatatgagtggtgccgtcctgtgatgcaggtaaaggagtatgccatgaaggcaaaggaaaaaggcacgaagctgtatgtgcttaccacatcaggcactaaaatcgagacagctgcaaagcgcagatttttagacagatactatgctggtatgtttgatgacatctatgcggtggagcatgatgatgacaaggtcaggttcattcttaaaaaagcagcagagcttgggattgaaccgtcggactgtgagcttgtggaggatacataccgcatacttttgcagacagtgacagaggggattaaatctactcacatcacaacgattctcacaggcggatgcgaacggtaaccaaaaattttccacggtctataaagaaataaaaaaaacatccgataaatatgtcaggaagcaaaatttacatatttcaaggatgagatataatagaaaggagatcctgttatgcgtatagatgcatataatcagatagcccagttgtatggcgtatcaagaacaacaaagacagcaaagacacaaagcgcgtcgaggatgtctgatcaggtatcaatttcgcaggccggtagagattaccagattgcgaaaaaagcagtatcagaggcttcggacatcagggaagataaagtcgctttgcttaagaacatggtagactccggacagtatcaggtcagtggagatgatttcgccagcaagctgttagagaggtacaactctctataatatgataatcatatcatatatcaaaggtaaaagaggattttatagtggctagtttagtggaagagcttataaatgtgctcacagaggaagaaaaagtatacagaacactcgctgcaaatggggagaagaaacgtcagataatcatagatgccgatatccctgcgcttgaagcaataactgatttggatcagcaggcaggcgatgagcttcttattatgagcaataagcaggtttcacttctcacagatattgccaatgtactgggcaaatcagatgagaagatgacagtcacaaggctgattggatatctcggtacacagccggatattcaggcgaagcttacggcagcgcgcgacagtctgattgaagcagctgcacagatgaaagaaatcaacgatttaaactcacaattacttgctcaggcaatagagcttacagagtttgacatcaccctgttcaagagcatgaaacaggcgccggagaccgccaattatgacagaaatgcatataacacaggcgatatcttaggcagcagcggttttgatgcaaagcaataatcattaaccgggaggacaggaacatggcaaatggattcggaagtttttacgtaggtagttccggacttaaaaactcgcagaatgctcttaatacaacagcaaacaacatggccaatgtcaatacgacaggctatgtgcgccagcaggtaagattttcagacaaacattatatcaccagaaataaccctacagcgggcaccaacatccagcagagcggactgggtgtttccgtatcggatgtggcacatgtcagggatatattcttagataaatcgtataggcaggagaatggtcgaaagggcttttactcgacactttacagcaccacatcatatgtggaggatatcatgcaggagatgaacggtgctgagtttaaggagagtatatcagagctatggcaggcttttcaggagtatggcaaggatccgacgaattcgacgaatcagaaccttatcatccaaaagagcgagctttttctgaccagatgcaatacggtttattctgatcttcagaaataccagtcaaatatcaacttacaaattaaagaccaggttgacagaatcaacgaaatcggtgacaagatttatgcgctcaaccttgagattcaaaagacagagtcaggcggtgtagagactgccatgacagcgcgcgatgccagggacagtctgattgatgagctcgcaggttacgctaagatagaggctgaggaggattccacaggctacgtgcgtatcaagctcgagggacagcagtttgtacaggataacaagtgcaaccatataggcctcaccgaggaaaagggtacaggcttttatacaccttactggcctcatattactacacaggagagctatatgccggtgtttagcgacgttgcgctgccgtcagcgctggctgaaagagtcggctgcacgcagaccaccaacatagcaaccagcctgaataatgatataggaagcctgaaggcactccttgtatcaagaggctcagagtatggcacctatgatttcatgagcgaggagaattacagtagggtggaggacaatgtggtcatggaaacacaggccgagatatcatatctggcgcgaaacatcatgatggccatgaacgatatattttgtccgaacaccacatacacagcggcagacggtaccacatacacggttttggatacagcaaactgctcggtaggagctgatggcagcctgccaccgcatgagctctttgcaagagaaggatatgaccgttacacgcagatggaaatagatggcaaacagttttatgtatacaatgatgagacaaaggctaacaactcatcatggtacaagcttggaaatgtttcagtaaatccaaagcttgcggcacaggtgacactgatgccgtcatacaagcaggacggagccgcaaactatggccttgcagaccagattacaaaggcgtggtcagcagagaatctatacatcaacccaaaggatacgtcgaagtgcaattttgagggatattatgacaagataatctcgcatctcggaacaaacggcagcatatataaggcgtcatcagacactatgacatcgacagcagctgccatagataaccagagaaaccagataatgggtgtgtcgagtgacgaggagctgacaaacatgatcaagtatcagtcggcctacaatgcatcaagccgttttatcacagtaatcagtcagatgactgagctcatagtacagctcatatagttttaggatacgacaagagagtatgaacaggaggagtcgatatggcttcaacattttttggattacatatagggtcaagcgctctgagctcatttcaggtagcgaccaatacaacagccaacaacatagccaatgtcaagacgaccggatacaccaggcaggaggctaccctgcaggcaaaggatgcgataaatgtcacagcccgctacggaagcgttggcacaggtgttacagtcacctcaatcaaacagcagcgtgacctgtactacgacaataaatactgggaaaacaattcctgctatggacgctatgagcagaagctgtattacatggaacagattcagaactactttaaggataacggttcatcggtaaagggattttcaagtgttttttcacagatgttttcagaccttgatacactgcgcagcaagccgtccgacaagacagtgagaaatcagtttatcagcagcgcgcagagtctttgtacatatttcaaccagatgagtgacaatctctcaaagctgcaggatgactgcaacgaagaaatcagaaacaacgtagacaaaatcaattcaatcagtgagaaaatttcactgttaaataaggagattaaccagatagagacaggaaccggtgtcgaggccagctcacttagggatgagagggcgaatctcatcgacagcctgtccaagattgttaatgtatcttacaacgagacagaggtgcaaaacaccaatggagacaacctgggcggcacaaatttctcgctctatataaatggagagaaggttgtggagggcaaggattaccgaaagctcatctgtgagtcgtcaaagacgaaaaacaatcagacagacaacgatgatatgtacaagatatactgggaagatactaagatggagttttccgcgacagctggaaccgcagggggaagcctgaaagctctctttgaggtgagagacggtgataatctggagaatttcaagggtaaggtcacaaaggctgattcgtattcgctcacagtggagaatatatcaatagacaatataaaatcactcaacctgccggacaaggacggcaaaatcactgtaaataatatcagctacagctatgacagctgggaagcacaggtggatgcacagggcaatatcaagtctgtaacatttaatctgagcaaggacaaggccatagcagaccctgaaaagactgtggcagagggatatcttttaaatgcgggctctgcaataaatgcgaggggaatcccttactatatgacacagctcaatgagtttgtcagaaatttttcagagatgttcaatcagatagagagcaaaggacagaatctgaatggggatacaccacctacattttttgaagcaatcacaaacacagccaaggtatatgatttctcggaatcagaggcttacagcaagctgcctgatggacagactgccacaataaacagcagctccaacacgtattacaggatgacagcggccaatttctccgtaaacaaggatgtgatgaacgatgtatcgctttttgcgactgccacagactatgtcaagacagattcatgtgatatagttgatgagttaaagaagctgcagtcggagaaaacagtatacagaggcgataaagcggaatcattccttgagacaatcatctccaatgtgtcagtggatacggaaaaggcagagacctacaacaagctctatagcaatctggagcagactattgcaaaccaaaggacatcggtatcaggtgtggatgaggatgaggaggcattaaacctcgtgaagttccagtattcatacaatatggcatctaaaatcatatcggttatgaaccagatgcttgataagctcataaacgatacgggcgtggcatagaagcgggaggcataatatgagaatcacaaacaatatgataatgggaaataccaagacaaatatcaattcaacaaaggttttggtggacaaatacaatacccagatgactactcaaaagaagatatccaaggcatcagaggatccggttatcgcaatcagatcgcttcgcttgtcgaccagcctgtcgcatcttgaccagtacaaggacaacaatatcccggatgcttcttcgtggatggatgtcacagagacagcccttagcaacatgaaatcactcctcacagatatccgtacacagtgtgtaaacggctctacagatacgctcacagctgatgacagaaacactatattacagcagcttacagcgctgtcagagcaggtgtatacagagggcaatgcagactacgcaggaagaacagtatttacgggctaccgcacatcatcaaagctcacattccagaaggacacaaagagcacatatcagataacacaggagttttctgccgctgatttgtcagagaagcggtattatacaaatggcgtgactgttccaaatagtataaatgcggcaacacctgactgtaccacagatgtcacagagcacagcttccagagaatccgtctgggctacggtaatacgacagacgatgtgaagctttctatcgatggaaaagagctgacaccgggcacagattatactgtatacaagagtgtgtctgattttgacccatcaaagctctctgctgatgatacggcatatatacaggaaaccggtgaatttgtttttggtaaaaatgtggctgcttcaattaaggataatgacaagaagctgtctgtcacatatgtaaagacaggctttgacagcagtgatgcgagacctgagtattattacaactgcaaggatattacaaacgctgtgacactcgatgcaggtggcaatgtacctcatgatgcagcaggagatatcatatactccgatccatcaaaggtagttgattttaagttttcaagtcaggaaatcaaatacacagtggcaaacagcaccgatatcactgtcaatacacaggcgaaggacgtcatggatacaggcatcaagcgcgatgtggatgagttgattgatgtagtgcagaatgctgtcaatgctcacgacaaggtctcacagataaagaagatgatgcagcaacagcagtactctgacaaggattcacaggcaaagcttaagacatatttagaggctgcagagcaggaggctgactatgccgacaacaatttgcaaaagacctacagccagtacatcacacgctttgatgatcatttgaataaggtaaatctggcactcaccaattcgggaagcacaaagagccgcctcgcccttatcaagaacagagttgatgagcagcagacgaccatagaggagctcaagtcgaccaatgaggatagggatatttctgatataatcattgatttttacgctatgtacaatgcatatcagtccagcctgacagcagcatcaaaggctaattcacagacattgcttgattatctgtaaggattttaaaaacggtacacagctaccggattatataacgctcgcggagcgggcgaaaaggaggaagccatgagggcaaaaacgagaatatttggggaaattgacatcccacaggacaaaatcatcacaatggagaaggggatgataggcttttcggagctgaaaaactacactctgatatacaattcggagaaggagaatgataagaagtctatcatgtggcttcaatcgatggatgatggagatattgcatttcctgtcatgacaccggatatcatcatgccggactacaagccgacggtcaacgaggagcttcttgcacctcttggagatctgaatgaggagaatatgtatgtgatcgtcactgtaaatgtgcctagcgatatcacaaagattgcctgcaatttaaaggctcctattgtggtcaataccgacagcaacaaagctgcacagcttatagttgaggatgactacaaggtgcacttcccgatttatgacatcataaaagggaaaaaagaaagggcgggtgaatagtatgctggctcttacaagaaaaaagggtgaatctctggtgattaataatgacatcgagattactattctggaaatcagaggtgaccagattaagctcggtgtaagtgcaccgaaggaggtgccgatttaccgcaaggaggtttatacgcagatacagcaggagaacaggaaatctgcggatgcacagaatgcacaggctctcaaggagctgtttggatagcttaagacagagagttatatgtcgaaagttgcgaccgaaaccaattgaatgagagttctatcaaggctataattgaaccagtacagcgatataacttttttcgcagtgctggttcttttcgatgtgccaaaagcgtatagcgaataaaatataatttcagacaggaggacttcaatttggagaaagtacgttacatgatttccgatgcggcagctgccgtggatgtggagactcatgtgttgcgttactgggaggatgagctgggacttgatgtgcctagaaatgaacttggtcacagatactatacgagagacaatataaaacagtttttgaggataaaggagcttaaggagaaggggtatcagcttcgcgcaatccgtgatatgcttcattcggatgcaccaggtgagccgttaaatccaacgaatcctgcggctatggaaaaatcagtgcagcctgtaaattacacgaatatcacaaatcagacggtgaaacaggagatgtcagggtataatccggcatatcacgatgaactgccgggatacaatcatacatatcgaagccgcacggcagatgagcgtatggatgagtttcgcgagctgatgagcaatatcgtggggagagccatagcactgaacaatgaggagctgagtcagcagatatccactgaggtgcaggagcggatattaaaggaaatgaactatctgatgcgcgaacaggatattgcgcaggaggagagatataaaaagctggacgctgccatacgcggaaatctgcgtagaaaggggcttttttcaaggaaaaggaacgctgacatgcctgcagatacaaaaataagcgctgcagacaccaagggaaagaaggggcgcgacaagacgcatacgcatgagcttaatccggtgagactatagagcatgcatgacaacgcttacactataaaaataattactgcaaaaacgcttacagcataaaaatgattacaatacaaagacgattacaacacaaaaaaagacgacccataacaggtcgtctttatttcttacagtatgctaaaaattagccctggctgattgctccagttgggcaaacaccagcacatgtaccacaatcgagacaagaatctgcatcgattacgtactgtgaatcaccagcagagatagctcctactgggcactcaccagcacatgtaccacagctaacgcatgaatcagaaattacgtatgccataatgaaatcctccttataaaataatgatcattattcgccgttattggcttatctgcattgtagtacaaaacacagaataatgcaatgccaaataaaattgtacttacttttacacaatcttatataaaaattaccaaatattgagtaaaacttgaaatgctattgttactattgtataataaatagaaaacaattcagaacctccgggaacaaaagctgatacgtcatgtttacatgtaagcagcagattttcctgctctcgaggtggctctgaagtgttacaataaaaacacatgattatttagaaaaactggtgtttgcacatggtatattactgtagtatgtgcggtgaggatataaaatggaaacaaaaattataaaaatagatcaggacaatttagaccataagctcatgcaggaggcaggtgatttgattgcagccggtgagcttgtagcgtttccgacagagacagtgtatgggcttggcggtgatgctttagatccggaggcatcaaagaagatatacagtgcaaaggggcgtccgtcggacaatccgcttatcgtacacatatcagatttttcggatttggagcgcatcgcaaagacagtgccggaggatgcaaggaagctttcggatgctttctggccgggacctcttaccatgatagtggagaagggcgatgcagtgccgtatgccacaacaggcggcatggacacagtggctgtgcgcatgccgaatcatcctatagcgctagatcttataagaagaagcggctgccttatcgcggcgccaagcgccaacacatccggcagaccgagccctacagaggctgcacatgtggctgaggatctaagcggcaaaatagccatgataatagacggaggaccggttggcataggaatagagtccaccatcattgacctgacagaggatacacctatggtactccgcccgggatacatcacacctcagatgctttcaaaggtattaggcaaagaggtcgtcatagatccgggaataatagcggcagatgatactagaaagccaaaggcacccggcatgaagtacaagcactatgcgccaaaggctgacatggtcatcgtggacggtaccagaaagcatgtgattgcgaagataaatgagcttgtggcttcgcacagggatgatggcaaaaagatagcagtcattgcgacagaggagacaaagcagttttacgatgcagatgttgtcttgtcgatgggaagcagggcggatgaggattcgatagcccatgagctttaccgtatattaagggactgtgatgagctcgatgtggatgtgattttctcggagagcttctccacaccgcgtataggacaggccatcatgaaccgtatgctaaaggcggcaggccatcaggtgatagacacacatgtgaagtatgacaaaatcatttttgtcgcacagaccggcacatgcagggagcagatggcaaagggcatcatgaacgactttgtactcaaggtgccgatggagattgaggcgagaggacttgttgtccagtttccggagccggtcaatcagaaggcagaggcagtgctcataagcaatggcatttccacggagggcatggtgtcaatgcagcttgaggaatcggatatcacggagagtactatggtatttaccatggagtcatcacagcgcgagcgcattatagaaagctttgccgatatcgacccggagcaggtctttgtgctttcacagtatgtgggcgatgagcttgagatacttgacccttacggtggcacgcttcaaagctacggactgtgctatgaaagcctcagggctacgcttaagaagctggtaaagcgcttaaatgcaaatacataaaagacaaacaaatataacacaatataagacaaaggagaacaaatattatgggtaaggtagtagttatggatcatccgctgattcagcacaagattggaattatgagaagaaccgacacaggttcaaaggatttcagaacactcgtcagcgaggttgcgatgcttgagtgctacgaggcaacaagagatctggagcttacagatgtggagattgagactcctatctgtaaggccactgtaaaggaattaaagggcaaaaagcttgcagttgttcctatcttaagagccggacttggtatggtggagggcatgcttgagctcatccctgccgcaaaggttggacacatcggcatgtatcgtgacccggagacagcagagcctatcgagtactattgcaagcttccggcagactgcgcaaacagagaggtatttgtggtagatccgatgctcgcaacaggtggttcagcagtggcagcacttgatatgctcaaaaagcgcggtgtgaaaaacatccactttatgtgcataattgcagctcctgagggagtaaagagactcacagaggcacatcctgatgtggatgtatatataggagcgctcgatgatcatctcaatgagcacaaatatattgtgccgggactcggagatgcaggagacagaattttcggaaccaagtaataataatgatgataatagctgcaggttgccctgaggtgtaaacagtgatataaaactgtaaagtaacagacagtgtgatagaccatattgaatggaggtgtatatatgggagcttcggaaaagagaaaggattatatctcatgggatgagtattttatgggcatagcgatgctttcaggcatgcgctcgaaggatccgaatacccaggtgggggcgtgcatagtggacccggagcacaagatactctccatgggctataacggctttcctcttggctgctcagatgatgagttcacctgggccagagagggagaggataacaagtatttctattctacacacagcgagctcaatgccatcttaaactacaggggcggaagccttgagggagcgaccatatatgtcacattgtttccgtgcaatgagtgcgctaaggcaatcatacagtccggcatcagggaagtagtctacgactgtgacaaatacgagggcacggccagcgtgacagcttcaaagaggatgcttaaggcagcgggggttacaattcgcaggtatgagcacactgaccgtgaggtgacgcttgtgctgtaatcgccggaaatagtgataatactgcaattgttgtgtcaaattgacgtgatttgacatgaaacacatgtattttttatgcattttacacataaaaatgtagacaaaagcaataaaaatgatataataatttgtatatgaaaagagataataagaaagaggtaatgaatgcacttatcatggttttccagtttggaatcaacatgattgtgccgatatttctctgcacactggccggtgtgtggattgggaaaaagaccggagcggactgggtaactgttccattgtttttccttggagcatttgcgggggcaaacaatatataccgcatggttcaaaaattcctgaagccggaggatgatggcagagccgtcagacagacaccgggcaggcagagtactacggaaacagagatatcagacagtattagcagggtagagaaggatgttaaaaagaataaatgacgcattgccgggacttgtatttgggatagttttttacgggattgttgtgcagcttattggggtatggtttgtcacagacaaaatttcatattctatcggcttatggtatgggatagcgatagctgttggtatagctgtcaatatcgccacagtcatatatgacgcgaccgccatatatggacaaaaggatgccaatcgcaggatcgtagcaaaatcacttttaaggtatattgttgttgcggtcctgttatttatattgggactatttgattttggaaatctgataatggcctttgtcggtatgctgggactcaagatttcagcgtatttacagcctttatttatgaaggtgacagacagattttccgggagaagtgatgcatcttccgccggcgaaatggagacagagtagcaaaaccgcaggtaaacttaataaggaggaggtgataatgtgaatcaggcgattttactggaaagtaacgcagacaatatcgactttatgatccatggtattttttcgataaaggtattcggtcaggaggtctggattaccacatcgcatgcctgtatcctcatagtgatggccattatggtcatattcgctatagtggcaaacaggaagcttaaaaaagcaaaggaagtaccggacggctttcagaatatcatcgagctcatcgtagagatgctcgacaagatggttgagggaaccatgggtaagtgggctccgaggtttgtaaactacatcagtacgatttttatatttatactgatgagtaatatctcaggcttgtttggcttaagaccaccgacagccgactacggaaccacactggcgcttgcacttattacatttttcatgatcagattcaataaggctaagcatcaaagcgcaaaggatatctggaccggtatgtgttcaccactgccgccgtggctgcctatatgggcgccaatcaacattatcagtgagattgcaattcctatctcattatcattgcgtttgttcgccaatgtgttgtcaggaactgttatcatggcgctggtatatggtctgctaaggtttatagccatagcgtggccgtcagtactgcatgtatactttgatttgttctcaggagcaattcagacatatgtattctgtatgctgacaatgacatacgttacacaggcatgtgagacggatgagtaaaactataagatgtatttttaggaggattcaattatggatatcaatggacaggatttaatcagagcatgctcagcaatcggtgcaggtttggcagttatcgccggaatcggacctggtgttggacagggtatcgcagcaggacatggtgcagcagccgtaggacgtaacccaggagcaagaggacagattatgtcaaccatgcttttaggacaggcggttgcagagacaacaggtctttatggtctcgttgttgcattacttttacttttcgttcatccgctcggatagtatattacggtttgccgcagaggattaccgtgcggcgatacagccaacggaaaggagagtaaaagttgttagcacagggatatacatttttgtttaatctggatgcgcagttgctctttgatacagtacttttggcagttgcagtatttttccttttcatgctgatgtcgtatctgcttttcaaccctgcaaggaagctgttaaaggacaggcaggacaggatagaaagcgatataaacacagctgttgctgacaaggaaagtgccgcagcactaaaggcagagtacgagggaaagcttaaggatattgataaagaggccgaagctattctcacagaggcgagacagaaggcgcttaaaaaccagaacaagattgtggatgatgcaaaggaagaggcttcacgcatcataaagagagccagagaagaggcagagcttgagaagaagcatgccatggatgatatgaagcaggagatgatacagatagcatcgcttatggcacaaaaggctgtcgcagcttcgatcaccacagacattcaggatacactcgttgaagagacacttaaggaaatgggagaatcaacatggctaagctagtatctaaggtatacggtgatgcattgtttgaggctgcccttgaggacaacaggctatccggcctgtctgacgaggtaacagcagtaaaggaaatcattgctgcaaatgatgacctctcaaagctgatggatcatccgcagattgataaagaagaaaaggtcagaatcatcgaagaaatatttgggggaagagtttcagcggagctggtagggcttatgagaatgattatagaaaagaatcactacaaagagcttaccttagttttcgactactttcttgacagagtcaaggagtaccaaaatatcggaacagcatacgtaacatctgcatttgagctttcaaaggagcagaagcttgctgtggagaaacgacttcttgacacgacaaaatacgtgaaatttgagatgcattttgaggtggataccgcgctcataggcggtatgaaaatcagaatcggggacagagtggtggattcatctgtcagcagcagattagaaagactcacccgcgatttgacaaaaatacaattgaaagtaggtgaatgcgctccatgaatctaaagccggaagaaatcagctcagtaataaaggagcagattaaaagatacgcttcccagctcgaagtcgctgatgtaggaacagtcattcaggtggcagacggaatcgcacgtattcatggtcttgagaatgcgatgcagggagagcttttggaatttccaggggaagtatatggaatggtattaaacctcgaggaggacaatgtcggtgctgttttacttggacagcagcgcaatatcaacgagggagatacagttaagaccacaggacgagtggtagaggtgccggtaggcgatgcgatgcttggccgagtagtaaatgcgctcggacagccaatcgacggaaagggacctatccagtcggacaaatatcgtcagatagagagagtagcatcgggagttatctcgagaaagtcagtagatacaccgcttcagaccggtataaaggctattgactcaatggttcctatcggacgaggacaaagagagcttattatcggagacagacagaccggaaagacggctatcgcgatagataccataatcaaccagaagggacagggtgtgaaatgtatctatgtagccatcggtcagaaggcttctacggttgcatccatagtaaatgagctcgaggagttcggagccatgagctacacgacagtagtggctgcgacagcatcagagcttgcaccgttacagtatatcgcaccatactcaggctgcgctataggtgaggaatggatggaaaacggacaggatgtgctcatagtttacgatgatctgagtaagcatgcagcagcataccgtacactttctctccttttaaagagagcgcccggacgagaggcttatccgggagatgttttctatctccattcaaggcttctggagagagcagcgagactgtcagacaagctgggtggaggctcgctcacagcccttcctatcattgagacacaggcgggtgatgtatcggcatatatcccgaccaatgttatctcaatcacagacggtcagatatatctcgagacagagatgttcaacgcgggcttcagacctgccataaatgccggactttcagtttcacgagttggaggctcggcacagataaaggcaatgaaaaagattgcagcacctatccgagtagagctggctcagtacagagagcttgcagcgttctcacagtttggctcagagcttgatgcaagcacagcagagcagctcgcacagggagcacgaatcaaggagattttaaagcagccgcagtacaagccgatgcctgtagagaagcaggttatcataatatacgctgcgacaaagaagtatcttatcgatatcaaaatcgaggatattttaagattcgaggcagagctgtttgatttcattgataccagatatcctgagattcctgaagcaatcagggagaaaaaggtgatggacgatgatacggagcaggcacttataaaggcaatcgaggaatgcaaaaagcagttccgttagacggttggatattagtagaaggcaggtggtaaaatggcttcgatgcgagacataaagcgcagaaaaagcagtattacaagtactcagcagatcacaaaggccatgaagctcgtttctaccgtcaagctgcaaaaggcgagagcacatgcggaggcaacagatccgtatttcaactatatgtacaagacagtaagctcgatgcttgcaaagagcggcaatctggagcacccatacttaaaggccggtgattcgccaaggaaggcggtagttgttttgacatcaaaccgcggactggcaggcggatacaacagcaatatagtaaagctcatcacacacggagacttcaaaaaagaagaactcgacatatacgctgtgggagcaaagggcgaggagctgcttacgtcaaagggctatcatatagttgagagtgcatcggagatgatggaggacccgacctacgaggatgctgcggcactttgcaaaagagtgttaaaggcatttacagacggtcaggtgggggagatttatctcgcatatacccatttcaaaaacacagttacacaggaggcgaagctcataaagctattgccggtggagctggatgagagcggggcagatgagaaagaggactccaatattctcatgaattttgaaccgaatccggaggaggctttggagcttattattccaaaatatgtgacaagcctgttttacggagcactggtggagtcatttgccagtgaaaacggagccagaatgcaggcgatggattctgctacgagcaatgcagaggatatgatcagtgatctgacattgaaatataacagagcgcgtcagggctcaatcacgcaggagcttactgagataattgcaggagctaatgcgatagagtgatacatgcatatccggtcatgggaaggcaggcatgtgtgtctgtgaatggccaagaaggcgagtgtatcatatgaattaaaaaagaaggagaaactataaatggcagataaaaatgtaggtaaaatcatacaggttatcagtgccgttctggatatcaagttttcagagggtaatctgcctgagataaacgatgcagtcgaggtaccgctgaaaaacggcggaaagctggtcgttgaggttgcacagcatctgggcgacgatacagtcagatgtatcgccatgggacctactgatggtctcgtccgcggcatggacgctatcgcaacaggagcacctatttctgtgccggtgggggagaatacacttggaagaatgttcaatgtgctcggagagcctatcgacgaggttgagcctccaaagacagaggagaaatgggcaatccacagacctgcgcctagctttgaggagcaggctacatcgcaggagatgcttgagacaggaataaaggttgtagatttgctctgcccataccagaagggtggaaaaatcggactcttcggaggtgccggagtaggaaagacggtgctcatccaggagcttatccacaacatcgctacacagcatggtggatactcagtatttaccggtgtaggagagcgtacacgagagggaaatgacctgtactacgagatgaaggagtcaggtgttatcgacaagaccaccatggtgttcggacagatgaacgagccacccggagcacgtatgagagttgccctggcaggacttacaatggcagagtatttccgtgacagaggcggcaaggatgtgcttctctttgtggacaatatcttccgtttcacacaggcaggttcagaggtatcagcacttttaggacgtatgccttcagccgttggctaccagccgacactgcagacagagatgggagctcttcaggagcgtatcacatcaacaaagaacggttcaattacatctgttcaggccgtatatgtgcctgcagatgaccttacagacccggcaccggcgactaccttcgcacatctcgatgccacgacagtccttgagcgttctatcgcagagcttggtatttatccggctgtagacccgctggcatccacatcgcgtatccttgatccgcgtatcgtgggacaggagcattttgaggtggcacacgctgtccaggagatactccagaagtacaaggagctgcaggatatcatcgcaatcctcggtatggatgagctctcagaggaggacaagctcgtagtaagccgtgcacgtaaggtgcagcgtttcctgtcacagccgttcttcgtagcaggacagtttacaggactcgagggcaaatatgtgcctatcgccgagaccatcagaggctttaaggagatactcgaaggaaagcatgatgatgtaccggagagctatttcttaaacgttggaagcatagatgaagtccgtgccaagatgtagtaatgtgaggtgatttcatggcagataacatttttgacatagaaataatcacaccggacagggtgttctacaagggagagacagacttcctcgagttcaatacccaaaacggagagattggtgtatacaaaaaccatataccgctcacgacagtgcttgcaccgggaatcgtgactatccataacggcgacgaggagaaaatagccgcaatccattcaggctttgcggaaatacttggagacaaggtcacatttcttgcagagcttgcagagtggcctgatgagatagacatagaccgcgcacaggccgcaaaggagcgggcagagcagcgcctttcaaaccacacagcagagattgatgtaaagagagcagagtttgcactcaggaaggcacttatcagaatagatgtggcacatcatatgtaattataaaatcccggaatctgcaggtaagcggatttccgggatttttaatataagaccgattaataccttccattttccttccggaattgtaatttttgccttgtcagtgtttgcattaaaaagaagatacatctctttagcactttcacctttctgaacttaataagtcccttatagtattcaaatacatctgcgtacttcttgtcggataatgtatcccacttaatgctgtttacttcgtctcctgcattgtatgagtttgaattaaatgttccattatcattgacatagctccacatcattgggaaatttttagaaaattattttttaatgtaaaaaatgaaacatggtcatgtcctgacacggtgggatttgcggaactgctgtggcgattcatgaaaatttttctggaaggactgcgaaaaatagctggtagaggaaaacccgatacatccggcaatctcttcgatactgtgattggttgtgagcagcaggtcacgcgcagacgccagccgaacttcgttcaggtaagcgatgggagatttcccgtacagctctgcaaaacggtgtgaaaggtaatattttgagagactgcagttttcggcaagcgaatccagagagatcatgctctggtaattgtgctcgataaagcgttttaccttgtggcattcgcggctgctgttctgcgcatccaccacttcataggatacatggtctttccggcagaaatataaaattaaaatatccagataatgctggcagatctctgcgtagcggtcctgtttgttatgcatttcccgcaggatattttcaaaacactggcggataaaaggcgagtttgcagaagccgggacatgaatgtattccggttctttgtcagtattcagttttaatccttccaccccgagcacataataatccagtggattttccggatcggaaaactctgtgtgtgttacctgtgcaccgatcacgacaaggctgtttgaggagacaggaagagattcattttcaatcagcatgcgtccggtgccgtctttaataaagaagatttccgtaaaatgatggctgtggggaaacgaagtccagtcattttcaaatttggatgctgatatggaaagcaggcggaaatggatttccggctgtacctcattatccagattaaatttgcggttactcatggaaaatacactcctttcatgtcataattgcaatgatttcctagttaaaatggaacgatgttgtacttagtatacaatgaaaaaaacaaaataacaagatttttaaaataaagcaagaattataaaatatagagcaatatatggataggaaaaagagatggcgtactctataataacaaatgtaaggaaggaaacataagaatttatagtaaaaaataacaaaaatgggaggttactatgaagaaaaaaattttatgtacaatgatgagtatggtaatggtagcatctttatttgcagggtgcggtacagattcaggaaaggagaattctgcgtcagataccagcaagacaaaagaagctggaacaacaatcagtgtagctgctattgagacagcttatggttctgaaatgtggcagaaagtggcagatgcatttacagaagaaaccggaattaaagtagaacttacaacagataaaaaattagaggatgtaattggaccatccatgcagggaggcgaatacccggatgttattcatcttgccacgggacgtgaagctgcgttgacggaacagtttattaagggacatatgattactgacattacagatgttttatctatgaaagttccgggagaagacaaacttgtttcagagaagattgcaggaggatttacagacacatcattgacaaatccttatggtgatggaaagacatatcttgcaccaatgttttattctccatgtggtctgttttataatgcaggtcttttagaagaaaaaggatgggatgttccaaagacatgggatgaaatgtgggaattaggagataaagcaaaagaagagggaatttacttatttacatatcctacaacaggttattttgatgcattcttctacgcactgatgt

SEQ ID NO: 1458 - DNA, 4417 bp, Unknown
  gut microbiota DNA sequence
ataaaaatatcctccctcagaagtatagtataattatattatactcccacaggaggacattttcaattcatatttatattttacacatcctaatttccgcactcaatactgatctcattgaatgttccaaggatatcatcaacctgcatagccttcttatcggcaccggccttgtcgattatcgccttgccctgatgcatcatgatgagacggtctccgtattcaacagcatagcgcagattgtgagtgaccatgattgttgtaaccttcttctctgctacaatcttgcctgtgagctgcattacgatctcagcagtctttggatcaagggctgcagtgtgctcgtcaaggatgagaaactcgattggattcatcgttgccatgagaagcgcaagtgtctgtctctgaccacctgaaagtgcgccaacctttgtgtgaagcttatcctcaagtccaaggtttaactcggcaagcatctccttgtaatgctctatcctgctgtgattcgtaccacggcccagaccgtatgtctttcctttattgtcagctatggacagattttcaaggattgtcatggaaggacaggttccctttgccggatcctgaaatacacggcctatgcggcggtgtctgataaaatccttctgctttgtgatgtcagtgccgtttaccacaatgctgccaccgtcaatagggatagaaccgcagatgatattgagcatagatgtctttccggagccattacttcctacaacggaaacaaactgtccatcatctattttcagattaaaatcatcaaagaggcatatctcgttgactgttcccggattatataatttgtggatatggttgagctctaacattatgccaccttctttcttttgtttctatccattccaagcaccagaatgatgaggaacaataccgctgtaatgagcttcaagtcgctcgacggcataccaagctttatagcgattgccacacatgccttgtatatgattgctccgataacaacactcgaggtcacacggataaagcttacttttttaagaaggctgattccgataataacgctcgccagtccgataaccattgttccggttcccattgatatatcgaaatatctctgctgctgtgcaaaaatgcatccgcttaagctgcaaaggccgttggcgattgcaaggccgatgatttttgtgatgcccttgtccacacccatagatgtaacgatagtctcgttgtcacctacggcgcgaagcagatatcctgactttgtgctcatgtaccagtcgagcaggaatttcatcacaagtgtgataacaaggatgataatcacatttgaaaactgtgctaagccgcccttaaatacatttctgacaaaatcattgtcaaaaagtgtggtcatattgtatattggcaggtttgctcttcctgcaatacgaagattcaccgtgtaaagcgctgtcatcatgataattcccgataaaagatcacgcaccttgagcttcacatggatgattccggtcagcattccggcaaacgcacctgccgcaaatgtcacaagcagtgtgagtatcggattaacgccctttgtgatgagtaccgccgaaagtgccgctccaagcggaaagcttccatctacggtcagatccggaaaatccagtatggtgtatgtgatatatattccaagagccatgatcgcataaatcatgccctgctctaaaacgcttaaaactagtgtcacggtgtatcctcccctgctttaaaaatcaacgtaactattttacttcaatcttatcaaatgtctcggctgcatccttgatataatctgcatcaagtgtcatgccaatcttgtctgctgctgcagtgtttacataaagctctgcctttgaagctgtgataaacggagtgtcagaggctttctcctcaccctttaaaatctttgctgccatctttcctgtctcgattccaagctggtagtaatcaattcccattgaagcgacacagcctgatttaacctgctcaatttcacttccgaataccggaatctttgctccatttgccttgtcgagaacagtctggagtgcatttactactgtgttgtctgtgaggttgcacaggcagtcaacctttgaaacaagatctgatgctgcaatctcaatatctgctgatgtgtttattccggtgtcaacaatttcaaagtcgtatttatcagcaagctttttgtactcctcaatggtgctgcatgagtttgcctcacttgtggtgtagagaatacctattttctttgcatccggcatcatctctctgatcatcttaagctgctcctcaacaggaagcacgtctgatgagcctgtgatgtttccgacacttgagccgtcctcctttgcaagacctgctgtaacaggatctgaaactgctgtgtatactgttggaatatctgcattcatagctgaattgtaggcgctggctgcacatggtgtggcgatggcacaaatcatatcaaccttctcagatacgaagctgtctgcaatagtgcttgctgtaccggtatctgtctgtgcattctggtaatcaaccttaaggtttttaccttcctcgatgccctcttccttgagcccctctaagaagccctccctgcagttgtcaagagagccatgctctgcaaactgcgaaatacctactgtgtagctgtcaccctttgcgccactctgtgtagagccctttgaaccctctgctccacagcctgccataaggcccatggtgcaaactgctgctaaaattactgataatactttctttttcatattgaattcctcactttctttgtgaagtgtttgtttcccgatgttcgcgattttctcataaacctgccgcaacaagccagatgtcatagcctcaaatcaaatttgcgctaacgacatttcatcatgtgggtgtttatgcaaaaaaccgcctcaagctaatgcttgagacggtaataaattcttattatcgcggtaccactcaatttgacgaattgtccactctgtcatgtactaatatacatgccgaaatgataacgggttcggttcccggtgacgcctactgatttaatcgttaagaaactatgctctgtacaatcaaacgcttcggatcaccctcgaaaggccattcaacaaatccatccatactgcaatcccaccatctgcagctctctgagatatccggaaaggtctactcttctttctcatcggttttgaaacactgttaaattaatctttttatatactttatgctctttttgtcactttgtcaaggtaaagtttgaaaatttctgtatttaagaggtgataccccatacattttcttgaagctgcgtataaaatagctcacattctgatatccactgcacatcgcaacctctgtaacggaagctgctgattcctccaatagctgcctggcgtgctccagcctgagatgattgacatactgtgacagagtaatatgaaaatgctctttaaagtagcgtgatatgtatttttctgacaaatggaactgtgcaccaaattccttcagtgaaatttcccttgtatagttttgccggatatacgttatcatttctttttctgttgtgttggtgccgtttgtgccattttccagaatcagaccatttctccacattttcttaataaatttgatgagagttatttttgtctcaaattgcgcctctatatctgcagcatctgtgctttctgcgtttttccctgatatttgtgcatttatctctatcagccgctcgcatatatctgctgctgtatcatttatctgaggactaatcataagcctgccgcgcttgagcggagataggattgatttttccatgagatcgtccgtctgaaatgatatatattcaagaggaaacaaaaacgtgtaataatctgcatctcctgtcggcgagcccatcaaatgcagactgcccggagataccacaaatgcatcctttgggcttcctatatagttttcacctgatatggtcacatgcagcttgccctgctttacatatataatttccagctcatcgtgccagtgtaccggaatctgaaatgcacgctttacatcactgatatggtattggctgaacggattttccggtgtgccgtgtggtcggttttcttttaattcaaaatacatttttctacctgctatttacttacaaaataaagctatatctactgaatccacccataagtttagtagtttagaattgttactttcattttacaataaaactactgatttttgtaatataaaatgcaaattgtaatctattttttattaaaaggctgattttaatctgaataattcaatatttcatttcaattttgcaggttttattttctgtgactcattatagatgaagtagaaatagtgcaat

SEQ ID NO: 1459 - DNA, 28567 bp, Unknown
  gut microbiota DNA sequence
tcttctatttcatttatatctgtagtaagacttattgcattattatcgaaatatacttttaagtttttaactcttctaaaatctatatttttatcaacggcatctatatcatataattctttattgttttttatatcctcatttactaataccatcaaatcatatcctgcatcttttaaagcaaaagctactacatcagtacaaaccccatattcatcatctggataacctgtgttgtaatatttgcttttatattttggattagtttttatgtaattatttgcattatttaatatatctgtttggtcatctatgccatcattgtctttatcaatattgctcttgtaagcttctatattgaaatctgcatttgtatattttttatgtggaatataattaaaacaatacaacacatataaagcaacaattattagcaccgaaaaaacaataagcgttattctcttcttcatacattctccattaaacaacttgcgagttaccaatttcattaaataataaattagctactttttcctctaatgacagatatacatctccaccaaacacactctgataaactgctgccaaaataccttcaacatctaatccaccatatagtcccatatatccggcattttgaaaaatcgcaaattcctcattcgtaataactcctgcattatgtgctgtctctgccaacatttgattccactgtttgatgtctcccctgacaacaagtcttctgttatcttcgtccagttcattaaaatggtcagcaacctcctgcctgtatgtctggattactgtgcccgctgttttcacatgcgatcattgctcttttaattacttttgcaaagttctcccattttgcataatcaattgcctcatttttatagcttttattgtgtgcaaaataatatcgaccacaaataaaaataacaacagttatagatactattatgaaaaaccaaaaagtgttcagaaattgaatacattaagtcctgtttcttcatcataaactctgtcaacttttccatcaattactgtaataacgagctcgcaagttgcacttacaacagctctgttcagatgtcctccaaacacttcacctttttcattaccggcactcaaatgaagatgtgcataatattctccatccattgtattgattgtacctgtcagcgatgttatttcataatagcctttaaaactgtttgaataatatttcttctcatctgtcttgtatactccgactgtgaaatcattgatagctccaagagcattaatactggcaagctttatattctcagttatggcaattgctttcagttgctccaaaatctcctcccctttgtcaattctcgctattattatattatcaaattttctgtattccattatgtttcctccgtaactttcgaattgttattctttattcgtgaatttccaagggtagattgtccggatcatgaaagaatgtcattcttttgcctgtgtaagtatcgagtctaatcggctcagttatgatgccccttttattcaattctcttacagtatcatcgaccgaatctacagcaaaggcaagatgcctgagaccgtaagcctccggataactgggacgcttcggacaatttttaatgataaaaagttctaattctatctcatcgagttgaagatcaattttataatcatcacgttccggtctgtaattttctcgaataatagaaaaacctaacagatccacataaaagtgctttgatttctcatagttgctcccaataatggcaatatgatgaactttttttaaattcatggtgtatttacctctctcctactttatttgaatacatgaaatttagtatcacaatgatgctattttgtaatatattttttcaaaagcttataggtattctccacgccatccatatgtgagcgctcatagttatgcgatgcataaactcccgcacctataagcccatgacggatatcatatccgctgtgcagtgtagcctcgacatctgagccgtagtgcggataaacatcgattgcatagtcaagcccctcgctctttgccagatttgaaagctctgtgacaagctcgtagttgtaaggtccgcctgaatccttcgcacagattgaaaccatatgctctgtacagccgaggtctgctccaacgcagcccatgtctacggaaatcatctcctctgtatcagccggtacaaagcttccgccatggcctacctcctcataaaccgtaaagagcagtgtgaccttgcggtttatcttccagccctcctcctttacggcatgagccacaccgagtaagatggcggctgacagcttatcatcaaggaaacggctcttgatatagccgctctccgtgatgaccgtacgtggatccatggcgataatatcccctgtctggatgccaagtgccgctacgccctgcttgtcatttacattttcatcaagcaggatttccatattctcttcctttgtctcaaccttttcgtctgccacatgtgccgatggctctgtatttagcaccacgcctgtatacattctgccatcacgagtaaaaaccatgcagttttctccatctgctgtgctccactgatgaccaccgatagttgtcgggcgcaaacgtccgttatcctttattgagcgaaccatggctccaagcgtgtccacatgcgctgccaataccaaaggtgctccaactccaccgatttccacgctgacatttcctttatttgaaagctgtggcgcatatcccatagcctcaagctgcttcatcagatagtctgtggcattttttgtgaaacctgtagggcttgctattgatgtgagtgctttgagctgtgttccgatatattctttaatctcttctgttaacataattgttatctcccgttttgttgtctttattaattcaattgcattataacatctcatatttgcgcatgcaatccgtattaacccttatttgtagtactctattcgcaagccgcgggtaccatggcgcacacactattccacgaaagcgaatagcgaagctgcttagagactgtagaattgtgctatgtaacgcagaaatgccgaggcatggacgccgaggcaaggagaaatcgagccatggatggcgagtttcgacggtttcgtcaaattaagaaaacctttggcacaattcgtacagtctcttagctgcgtagcgtagcgaacgtgggatagtgtgtgcgccatggtacccgcggcttgcgaacaacagacaacaatttatggtcaatccacttgcgatcaacctgcaacaatgctattcttaggatatgaatacacagaatatatataataataaagatataaatacaaaaataaatttagatacaaattccagcaccaaaataaaaatctgcggtctgacttcacctgctgaagcacggtatctcaacgaaaatcacgttgattttgcgggtatggtgttattttttccaaagagtaagaggaatatatccatcgaacaggcaaaggatattatggcagcccttgatgcttccatcaaaagggttgcggttgtcgtttcgccatccatagagcagataaggcagattgaggctgcaggctttgactatgtccagatacatggggaaattccggagacagaggcggaggcagcaaaagctatcccgattcttaaagccttcaatgtctctgatatggacagctatgaaaagtatcacaacgattcacgcatcgcaggctatgtgtttgatgccatcgaacccggcagtggaaaaacctttgactggaagctggttgacaatatcccccgcgatgaaaagctgctgctgctcgcaggtggcttaaatccagacaatgtgcgcatggcaattgaagccgtgcatcctgacggagtcgatgtatcatcaggtgtggaaaatgatgacaaagcggggaagaatccggaaaagatacatgattttgttgcggcagttaaatcataaaatatgacaactgcacgacactaaatacctccctctatatagttgtaaacggatggctcatgcgagccatccgccactatttatctgccacttcttctaatgccttaaaatcacaacagaacttaaccacctttccggttgccatctgtttgtcgtacaacttgttagcccttccgataacttcatcaattaccttcaagcaaaaagaatattctttatttagcaaatccttatatttcttgacatcatcggtatctgtgtcatctggattaatatttaccctactgtaaacaccatccacaatcggaatcattttcttaatatccataacagaaagaatatgctttacatcatcctcttctgctgccacccaaatatctccttgcgccatactggacttctttgccatttcataaaccaaatagcattctttatcgacatttttccatgtcttatgcttctctttcgctgaggataatggaattacatattttctgtcatttttgtttatcaaaatccctatgtatggtttattctcataaccgcttggcttgtaatacacctctgagcatgcatcatgcagctttttggggtaactttgttcaatgttgataaatgtcaactttccctctagtataaacataatactgctcctttatattttagattaaaaatgtgggaagcctaagcttcccactcgttaatgctcatctctttacggattgattaccgaaggttaatggagaccttctttaatgttcatctcttctacgattcaagaccataaggttaatggagacctctctataattataatatgacaattaacaagctatgtcaactgcagtattatatattgattatatattgattatattttgtccattagtattcacacgtcagcttgtaacgaagaaaccgatggtataaacttatttcagctactctgtcgaatatatttgtattttcatctcgtctcatcataatcaggttttaatgctaaatattatgtaactattatttttctttgccaatcttgaaaaacagatttgccttgatgagcaccggtctcagtgccacatacacgattgttgcagcaatcaccgatatcactgcattgactcctgttgtggtcacgctccatgcgattttgagctgtgccatcggctttccgaggataagcatatcgtagaaatagcttataatcgggtcaaaaataaagttgaagagcattcctgcacatgctgcaaggactgtccatttaaatacatgcttcttgtcggttgaatatgtaatctttccaagcttgtgtgctacaagaccggtgataacaccaatcataagcttgaggaaaaatgtctttggtgctccggtgatatatatcgggtcaagtaaatcaccgattgtcattccgattgctccaccgattcctccatatactccgcctaagagcaaagctgcaagtactacgactgcgttgccaaggtgaaaggatgtggcgctgccacccggtaatgtgaccttaatctgtaaaaatgtgaatatgacatatgataaagctgccataagtgctgtaagtgtgagtttttgaactttttcgtttctcataaaatgcctcctaaatattacaattaaactatataatactcttatgtggcatcaagtatatatccaattttatataaatttatatatccagtttatctaaagtccatttacacctatggtttaattccgctatagtgttttttcagcatttctattatcacctgctggctctgcttcgaatgggtgatagcgtaatagcttccaccaaattttgccttgcgctcttcctcatctatccctacgcttcgtcccttttcggtgacacgctttatcttgttcccgtcttctgtaacttcctccagatatccctctgcaataagaagctcgtttataaacgaggctgcaagctttttgtgctccttatccgcaggacacagctcatttattttgttcgtaagctctgtaagcctgcatttgtcggtgagctctacctcatcaagcctctgtggctcgatgtaaaacggaagcttcttttttctcgtgctgccggtttcagcagcctcctcatcgcttaaaacagtctgtggtctttcacctgtcgtgctgcctgatggatttgggttatctgcaacaaatgaatttaccgccgtcacaaacgcttcaccataattttgtatcttctgctcacccatgccgtacacatcggcaagctgttccttatcccgcggcagcttcgcacatatatcctttaaagtcttgtcggaacagatgatatacggaggcaccgacttttctgcagccagctctgtacgcacgctgcgcagcttttcaaacagcgcagcaccaagctcgttaagccctgcaagctgtgctgcctttttacgctttttgccggtttcaacgtatgtctcctcctcttcatcctccacaaccacacagttgctgcatttgttgcagatgcatggcgttgtatctccgaaatatgaaagtataaactctctcaggcatttgtccgtctcacagtaatttatcatctgctgcagctttctttggtcattggctgtcttttgcatgtcggatgccacatcgcctgctgaagccttattttgcagaaggaacttgtttatcatgatatcctgctttgagaaaaacagcacacattccgcttcctcaccgtctcgtcccgctcttccggcctcctgatagtaatactcgaggctctgtggcatgttgtaatgcagcacatatctcacatttgacttgtcaattcccattccaaatgcgtttgtggcaaccatcacacggattctgtcatatgtaaaatcctcctgattctgcttacgttcatcatttgaaagccctgcgtggtaacggcccaccgaaatgccctgctcatttaaaagagtatacagcttatccacattctttttcgttgcgcagtatattattccactttcgtcctcatgctttttcacatagttgatgatactgttgtccttctgactgcctccccttcttgtaacaaccctgaaaaacaggttaggtctgtcaaaccctgtcaccatagtaaccggattgttaagtccaagcgaagccactatatcatttttcacgcgctccgtggcggtcgctgtaaacgcactgactatcggtcgtcttggaagtctcgttaaaaatccggcaatttccagatagctcggcctaaaatcctgcccccactgcgatatacagtgtgcctcatcaactgtcagcattgatatgtccgcgttgcaggcaaaatccagaaaacgtggcgtgttgaggcgctccggagcgacataaattatcttgtagcgcccctgtgaggcatatgaaagtgctatccttatctggttttcggtcagtgagctgttgatataggcggcatgcactccagcctggtttaaagccttgacctggtctgacatgagcgagataagtggcgaaatgacaagcgtaattcctttaagcataagcgccggaagctggtagcacagcgattttcctgcgcctgtcggcatgataccgagcacatcgtgccctgcaagtatgccgtttatgagctcctcctgccctgttctaagactgtcgtagccaaagtattgtttgagtgtctggtttatgttcatttatgcttgttgtcctcccttagctgcacgataatcctgtagacctcaggccttctctccttcagatgcttatcaagcaggtgtctcctctgtgcaaaccgctctgcaagctccggatgctctcttgctatacgctcatgcacctcgcgacggtgcatctcgatatctgccgcaagcgtgtgcacatcctttcctgatatgttgacgatttctttcagatgctcctccagatgctccagccactcatcctggtcaaactcatccatatgcgcccagcggccatgcatgatttcctctatatcctttgtctttttgagctgttctatctgaagctttatctgcttttcaatctgctcctcactctcggcgccaaacgcccagacaaactcctgcactctgttgtcagcacgctttcttgaggcactgcgctcctcgttatctacgccaccctcaagcggataaggtctgtttattcccatatcctttagcgcaatatgtattgtccttctgacacagccctgctcaattaaataacctaagcccagcttcctgagttgctcgttgagctctgcaatgtgctctgttatgtatagctttacacctttttgtttcagtgagcggtaaagtgactctatgctgtcagctcctgtgatatcaatacttccgatagctccggcatcgattatgacagcttttgtatcatgctttaggtggtcctcaatatcacgcacaagtacctttgcatttgcaaaaaacaggccgctcgaaaatctgtaaataatcacaccgtcaatctcgtggatgtttgtgctctccctgatatcgcggaaatgactgtgtcccggctgcacaccgagaaagcaggtggccggctttgcgcttctgattatcatctcggcaaaagacaaaatgattcctatcaaaactccgtttatcgtacccagaataagtactccgaaaaaagcaccaacaaatatgaaaaattctgtcctgctgaccttccacagtctctttgccagatgaaactccgtggcacccatgagcgctgatatgacaatcgccgtgagcaccggaaccggcagatatcctataaagcctgtgcaaaaaagaagcactgctatcatggaaacgcctgcaacaagccctgtgagctgtgtcttaccctcgtactgctcgctcatcgcagttcgtgacactgaaccgtttatcggacagcagcccgtaaaagccgcagccatatttcctatggaaaatgccaaaagctccgtgttatcatctattctgtatccgtttttctgtgcgaaattgttttctgccagaagtgtctctgccatgatgacaacagcaaccgaaagacttaaaactattacctctgaggccttttgaactgaaaaaactgcctcgaaatccggtatataccaccgcggcatgccgggctcaactgctgaaagagtcggcactccccactcctttaccggtccaaaatatgtaaaaagcgcgcctgttaccatgagcacaaccgccataggaaactttggaacaagcctcttactcacaaccaaaatggcaagcgctacaatccccatgacaagtgcagctgcatttatgtggtgtaaggcctcccatatatgctcagacagttcaaaaagctctccggttcctgccgcagagcccatgagctttggcgcctgcatcagtatgattgtagtacatatgcctgtgataaatccgcccataaccggcgcagatatgtagttcaccagctttccggcattcatgaagtaaaatgccaaaagccacagtgccacaaaaaatgtaaacaccggtacaaccgtcatggcctctttgcttcctgcctctattcccatgccaagcactgctgctccgacaagcgccgccggagcagcatccacaccgaatataaactgcggtgatgtggaaaacagagcaaacaatatgattgggaataccgagccatacaagccatataccgccggtagcccggatatctgcgcatagcccatcgatataggaatcgaaaccgccatgatgatgattcccgcaagaatgtcctttgggagatttttcttgtcgtagtttttgagtgttggtgcaactgataatttttgtttcatttagatttgtgccttctttatcaatactttctttccttcaaatgcgaaaccataatgttgaattgcttctcttttatatcctcgttccaaaagctttgcatcataatttttctcttcaatctgcttcaaagcactatccgcagtcatatccagtgatgtctcctcttgcgaatcaataaccttaaattctattattacagcctgcgaatttttatcacgtggaatgatcatcacatcatatctgccatagccactttcacggtttgactgcacttcatatttatctctaagctcgaccagcaggcctaagacaaaaccatgataaaatctctccggttcagattttcccgaaggatgctttccgctgtcaaagctgctgaaggtagataaagcgacctcattcatgtatatgttcatttcctttacattgcctctaagcaatgcccttatgaatccattataattcgaaacagaggcattaaaccatcctctgaacatatttgaaaacatacttacggtttcaagatttgtaatgctcagatgataccacggttcaagcgtaagacctcttttttctaaggaatcaacctttaaataaccgctggcaagcaaaagactccaaatggcattttcatcgttatcgagctgttcaaacaccagttgttcgtcaatgctaacctccacagaatcgccttccagaagtgtttccatcatagattttatttctgcagatgctgttctgatcaaacgatttaccagaccgtttgagctggtagatgcccagtatggacttatctgtttttcctttagaaaattcgttatagaccatggattataaatatcactgtgatttccaaatttaaaaccgtcataccatttttttacagtatctttttcaccggacagaccatactcttccattgcatcaaaaacttcattctctgtaaatccaaagctcgttgcataactgcttgaggtcgtggttattacattcagattattgaggtctgaaaaaattgattcctttgatacacgcgtgattcctgtcataatagcacgctccatatacggatttgtcttgaacgttgcattaaacaggcttcttatatatgcagtaaactcattccaatatccatgaagatatgcctcctgtataggagtatcatactcatcaaggataattatcgtcttctttccccagtaacgatgaaaatactcacacaaaatatttaattttaatccactctcagcatcacccatcctggtatttgttccttcaaaatcagctatttcgtctgctgtcagagtatccccctcaagcagatatctgtgccttttgtaaacagcctctatctgtgcttttatctggatttttgcatctcccagattgtcggccttaaccgaagcaaagctcataaaaatcacaggataagtaccctgaatttttcgatagtcctcatcctcccatatagacaatgaatcaaacaaatcgctcctgtccttatactgatttgaaaaaaagcagttaagcatgctcatattaagtgtttttccaaaacgcctcggacgcgtgatgagagtcacatcatcctttgaatcccaccattcctttataaagctcgttttgtccacaaaaaagcaattatcttctataacagaagcaaaatcctgtttcccaataccaatcgtttttaccatatctgactccctgtatagtctcaaatcattgttttatatatgatattatagccaatacaattatgcactgcaagaaacaaatatactcttcttaatcacgtttttaaacatagattaagaagagtataatctcttttgtcgtattaaattataactacttaattacagcctcaacctcacccttctcaggcatcacgcgaagtgcgccctttctcgtggtaataagcgaagctgctgcatttgcgaatgtgagcatctttttcacatcgtcatccttccggtcattgataccatgctccagcacatcgtgaagcaggcatgcacagaaagtatctcctgcacctgtagtctcgacagtgtcatctcgcaggaacggagctgcctccacgatatgtccgtcaaaaaatgccatacttccgtttttgcccatggtggcacagataaacggaatgtgatactcatctatgagcttctttacacctgtctttatgtccttttcgcctgtcatgaattcaatctcatcatcagatatttttaagatgtcacactgactcaggccccagcttatcttctcttttgcatcgtccatgctcttccagagcggtttgcgcagattagggtcaaaggaaatcagtacgcctgcctcttttgcggcagctattgcatgctttgtcgcattctcacagatcttatctgtcattgaaagacttccgaagtggaaaatttttgcgtttctcacaagggataaatccacctcatccgctgtcagcatcatatctgctcccggatttctgtaaaatgagaaatctctgtctccgtctgctgcggtctggacaaatgcaagagtggtatggacattatcatcatagcgcacgcctgttgtgtcgatgccctgctcctttacggcatcaacaagcagccttccgaacgcatcctgtcccacttttccgatgaaagcagtctgatgaccgagcttttgaagcatggcaagcacgttacatggagctccacccggattagcctcaaaaagcttattgtcctgcgcacttgtaccgttttctgtaaaatctataagtaattcacctaatgcaactacatccatattgtacctctttctttcctgtcaaaatatcctgtatattattctacaaataaccggaccaataatttgtccggttattatttgtatgctctactgatatgctttcatattataaaattatatcatattatatcatatttttcaatatccacaacagcacttccgtcacaattaaagctgattccgtctgcctgaagaggtgtacagatagctgtggttgcgacctgctgtccgtcattgataaagagctctatagactgtctgtccatgatgaaacgaagctttagctttctgtctgtatctgcgattttaatttttctgacacagacgacatcctttgtgacgccacagcaggtacgatcaatctcgagcacgcctgcgactctgttgtaggtaaacgctgtactatactcatcatcgcatgccatttcaacagtgaagtcatggtactcctcgcctgaaagctccactgtcatgtcgagagtgcggccctttatgccatcaaaggtcgtgtagcagtctatttttttatctgtataatgacacttgtttgcacgataattttctatttccttaaccggcttctgccagatgcggccgtcctttatttcaagctcacgaggcagtgtcatcattccctgccaatcctgcgaatcaggaacgacacatgcatcccatgacttcatccacgcaatcatcacgcggcgtccgtccggaagcagtgtagtctgtggcgcataaaagtccatgccatagtcaagtgtgtgcggctcttccttgataaatacatgattttctttatcataatcccccagaaaatatacagagttgtgtccgttatgaaactcatatttgtctgccttcatactctgcggtgaacagatgagcacatgcttatcctccagcccaaagaagtccgggcactcccacatggtacctattttgccggtgctgtttgccgcaaggattgtctcaaactgccaatcggtcaggttttttgaagagcagagcactacctgtcccacattgtttaagtccttgcttccaactataagataatatgtgtcatcctctttccatattttagggtcacggaaatcgattctgctgcagttttcaggaagcatatcgcctgtcacaacaggattattctcatgcttcacataattaagtccgtctccaaatgcgatgcactggttctgtctctcctgctcactgccgtcaggaagtttaatccttgtgacacctgtgtatacaagcacatgcttaccatctgcctcaatggcacttcctgagaaacatccttttttatcatattcctcgtcaggtgccagaacacacggaagctgctcccatttaatcatatcgcttgtcgtactatgcccccaatgcataggtccccactcacgcagatatggatagtactgataaaacagatgaatttttccgttatagacagaaaatccattcggatcattaatccatcctgccggtgcactgatatgaaacaaaggtttactctctttatctgtagcagctattttttttgcctcgtagcttcttgctttttccaataattcgctcattcaaatcctccaattctgtttgctttgccggtaatacagaattatgaacagtaacctatttgccctctgacgtactctcaagggatttctgatagctgtcaaaatatttctgctttatcttcagataatcctgtaaaccatatttatcaagtttcttaaggtatgaatcccattccttatcaatgccgccgtttaatatccagtcggcctttttctgctcagcatatttcttgatgtctgtgtcgtactgtgacaccttgttggtgtcatctatgctcatgaacacgtttggatagacatacttactgttcatgtccttcagataagcctcatgcatgttgtcaagacgccacttggcatctgcaggctctgtcacataaacatcatagtactcgtttaaaacagcaagcggtccgtttacagactgcgcctcacgcacctcaaccggtgactgatcgcccagatccatatgctttaacatctgtccaccctcatcgtttgtgctcatctcaaagatgttgaacgaatctttctcgccgtatgttccccagttattctgtggtgactggattggagcgtacatctggtcaatccatgccgctgccaaagccgtattcctgcagcttgatgtcagtacgcatcgtcctctgtcgaaaccactcgtctcactgttgttctgtctcgtgatatttctgactccgtcaggtcctgtgagagcaggaagcatgacgtaatctgtgttattgtcaatgtttgcaatgtcccatgtaaagcagagcccgtatctgtggtttttaccctttgctacatatgttgaccactcctgtgtaaatgcctcagggtcaatcaaatcctctgtgacaagcttgtgaagccactcgataccctccttgtagccctcctgtgtaggagtatagatgacttttccctcatctgttactgcaaagtggtcacctgtatcaccataaccctcaccaaagccgttcatgaggatggctggatcctggtcaccgttgtttataataaatgacataggaatgacaccgccctcaatgtcaaactctttctcaagctcgtctgcatgatctctgaatgcaataagcacctgctcgagctcgtctgtagtagtcggcacctcaagtcccagataatcaagccatttcttgttgatataaggtatatctccgattgcctgaattgcctcttttcctgcaccaagctgctctatccaaggaaatgaatagatatgtccgtccggtgcggtacacattgtcctatattcaggatatttctcaaaaactgcctgaagattaggcatatatttatcgatcagattctctaccggaataatgataccctgctttgcatatctgagcaggtcgtaatcactcatacctgcattaaacagtccatccggcagattaccaaactgcgccaatgccagattcttcttgtcagagaactggtctgaaacgaagcatgtccagtcgatatgcacgttggtctgcttctccattctcttgaagatagtcctctcattaggatcctgtgtggatgtggccggtgcacttgtgataaatgacagctcagccttctccttcagagggaactgcacatctgataccggtgtgtccggatttgtctcagcatttaagctctgctgctttccacagcctgccacacctgtcagcattgcaagtgtaagcgaaagtgtaattaattttttgaagcttctttttttcatatccatactcatcctttctgttagcccttaacagatccaaccatgattcctttatcaaaatatttctggaaaaatggatacataatcaaaagtggtaaacttgatacaacaattgtagcgtacttgagctgctctgcaacctttgccatctcagctgtactctggatatctgcaatcatgcccggctgaggtgtattctgcacgagaattgaacgcagtacaagctgtaatggctggagatttgcgtcattcaggtaaatcattgcatcaaagtagctgttccacattcctacaaatgaccaaagcataagcaccgcaataatcggcttacaaaccggaagcataatcttaaagaaatgctgtatttcatttgctccgtcgatggctgatgcctcacgaagctcatttggcactgactgataataggttctcgccaaaatcatattccacacattgaaagcgcccggaatgaggattgcccatacggtgtttaccatatggagctgatttataaggatgaatgtaggaatcattcctcctccaaaaaacattgtgataataaaaatcacattgaaaaattttcttccgacaaattcctttttagacataggatatgctgccaggattgtgacaaatactgagattgccgcaaacgctattgagtaaaaaaacgaattaaaaaatccgcgccatatcatgtcattttccagaactcgtctgtatgcatcaatagtccagtcctttatgttgaagctcagtccctgattgttaagtactgtcggatccatgaaagatgccagcactacatatactaacggaacaattattgcaagcacaaacaacccaagaagtgtatatccaattccaagaacaattttatcagtccgtgaatatttgatttttatcgtcatatctttttccattgcactttcctcctagattccttcaccatcgtttagcttctttacaaccgcattgactataatcagcaatattacgttgattaccgagttgaaaagaccaaccgctgttgaataaccatagtctccattcaaaagtccgattctgtatacatatgtagaaagaatttccgatgccggtaagttcatatctgtctgtaacgcataggctttctcgaaaccgatactcataatatttcctgcctgcaggatgaactgtatcactataatattcttaatagccggaagctcaacataccacatctgctggaagatgtttgcgccgtccattctcgctgcctcctcaagctccttgctcgcattggataatgccgctgtatacatgattgaagcccagcctgctccctgccagatgccgctcgctatgtagattgtcctgaatgcagccggcattgtcatccagtttgtgctgataccgagcagcttgttcataggtccgattggtgataaaaacatacgaaccataccacaaagtacaataactgagataaaatttggtgcgtaaatcagaagctgtatctttttcttgatgccctctttgcgaatacgattcagaagcagtgcaagtatgattggtaccggaaatccccataacaatccgtaaatacttacctttaacgtattcataaggtagttcataaaatcaggtgatgataaaaatctcttgaaatattcaagcccgacccatggactccccagcacaccctttatgacattgtaatccttgaatgctatgagcagtccgcccatcggaacatacttgaatataattgtcagtaaaagtgccggcataaggaaaaatatgtacaacatccagtttttcttcacatatgtcactttgcttttcaatgactgctttttttctttcatttgctgtgacctccactctctttcacattttgtcttttttacttaatttacgctcttgtgtaaccggtaaagtaaccggttactttataatttgataatacaatatcatttgtgctgtgtcaatacttttctcaaaaaaagtaaccggttacttttttgttgatattttggaaattgcgctgtatactgtttataaacatttgtaatataagtaatttttataaggagacatcccatggaaaaaaaacaggttacatttgcagatattgcggaatatacacacttttcaaaaacaacgatttcaagatatttcaatcatccagactctctgacactagagaatcaggaaaagatttcccgtgcgcttgatgagctcggctataagaaaaataagctcgcaaaggttctcgcaaacggtaagagcgagtttgtcggcataatagtgccaaacctttacctgcactactactctgagatgctcacacagcttttagccacctacactgactatcactataagtttctcatctttatgagtgacaagggggcggctgaggaagaaaactacattgatgaacttttagcttatcagatagagggtcttatcgtgctaagtcacactctctcatctgaaaagcttgcttcataccacattccaattgtcgcaatcgagcgagaatccatgcatataagcagtgtcacctccgacaactatatgggtgcgcttcaggccacatctcttttaatacgtgacaaatgtgatatcctcatccatatcaatgtagatgtaccaaagtatgtcccggcatacgacagaatccgtgcgtttgaggacacctgtaccgagcacaatattccctatgagctcagcctgaacgtatccggtgattcgtacaacgatttattttctcagatgaaggtgatttttaacaatatagatgagaaatatcctgataaaaagaaaggggtattcctggcaaacgacacatatgccaacatgtttttgaaccttgtcatacaaaaatacggctgcctgccggacagctatgagatagtcggcttcgacaattcaccaattgccaacgaagccataattccaatcaccaccatcggccagcagatagatgtaatcgcaagaaccgccatggatttgctcgtcaagcagatggataaccgcaagcaaagaaagcctgagcccgatttggcgccaacgcacaaaaagatagcgcctgtgctgattcgcagggagacaaccagctagtacatcgtttatgcgacatgtaccagcctaattttctcctgttgcgtcctgatattccctgctgctcacaccaccccatgagtttctatctgctgagaaaacctcatttgtggttttatttacagcataaaatcccagtagccttgtatctgagccactaaccaactgctcataaacaaacaaatcacactgtccattttcagaaactctgtcataaactaacctattctcatacgtatttccatcagcctcgccggtttcgaaaacagcataaaatgtgcctttggcagtgtaaccattgcgaatagtaccggcatccctggctgagagcatccctgcagctgacatgtaatcatatacggccatgctttctgtatccagactttcgtcagcgttctcatttcctgcattctcattttctgtattttcagaagcgtcattgtatgactgtgaattattatcagtgctgttttcactgtcatttgcaccactatcaccagcatcatttccactgtctccggtgctgtcatcatcgtttataagtccaaactttattgtttccttaaatgtcaaatttcgtctcaggaaaggtccaaccttgatgttataatattcatcagtattatatccatccgaagtactcatgcagataagaccattcgcatatacctttttctccgtatccatgccgatgaatgaaattatcagattaataaccatggcagccatcaaacacagccacatgactatgagtattacttttctgaatagccttacgccttctaactttttagatacgctgtcactgaataatatccacctgattatccagtaaagcgacaagaccatacagcctgcgtatgttatcagaacagacgacagctcgaaccagcatctatagtgatatcctcgagacagtaagcctcctactccatagaaaattcctgcatacaacaccaatatcgcagtaattacaattgctgtcggccacttatgctttatcctggtgtctgcgtaaattgcctgacacaaatccatttttgcattttctgataaaaacaatgcaccaatctgcatgtccgtcatctgcttttgattcgccggcacagcatagcacttatccagccactcctgccagcccggcttatcacataggaacaaaactgcagcattgcaaaaataataatctcttaaatatggcagcttcacacaattgatatcaaccattgcaagagcctgtgcggccagatcatagtttgacataagaagctgctgcttagccatcactatcaacacaactgactgaagctgcctattattcctgtatctggttctgtacatagccaaattgtaatcatgcctgtcctgaaggctccaattctctgtccttttcgctgatatattaacaacagcgatcagcatcaacaccagaaaaataatacctgcaaaaaagagcaataaacatgatttaatcattcctgaactatagtcatccctatggaacattccaaacaacaagcataatgtcaaaacactccatacaacagtcaatactctgtaaatctgcacatatcttttctgccataagccatttttgtatccaatggtatcaggggtgacagtgtttgaaagctcataataattcatgcaatccgcctctttatctctgtaaatgaaattgatttatccgtggcttaattgtaccacgaataaaccaatttgtgtgaaatctattttatctgtatcttcttcctcatgcgcatctcccacacatagtaggtcacaataagcagtattcctgttgtaagccaggctgccggatctgcaaagcacacaccgacgtaaccaaatggctttgacagagcaagtattgcaatccatctcgacacaagctccatcccaccgctaagcataggcacaagtcccttgttaagtccctgcagaccgtttctgtatgcaaaaatccatgcaagcggaagcatgaagacactcgcgattttcagatatttcatagcacagtcaatgtcagttgccgtaggcgatgtgataaaccagcctatcatgtacggtccgacaaagcagttaattgctgccgctaaaactgcgcagcctatacatatgaaaaagcatgacttcatacccttaaatatcctgtcgtatcttcctgctccaagattttgtccgcagtaagtcgcagcggctgttccaagtgtaggcatggtctgtgtcgcgatattgctgaccttggatgcggcggtatacgcagctaccacctgcgaaccgaagacattgaccgcagcctggaaaatcatcgttccgatagcagtgattgaatagttgagtgccatctgcagaccgattgagagcatgcgccagattccgttccaatccatgtaataatcctcacggctggtgcgcagcaaatcatacttcttaaacatcacgataaatgacaaaactgcagcaattccctgcgagataactgtcgcataagctgctcctgctgtgcctgccttcaccaccacgataaagaatatatccagcacaatatttaatacagatgaaaaaatcaaaaaatacagcggagtcttgctgtctccgatgcttcgcaaaagaccggaagccacattgtaggacatggtgcagaaaattcccgcaaaaatgacctttatgtacgcatcagccatgacaagtatatcatcaggtgtattgagccagataagaagctgcctcgacgcaagcactgtcggaatcgtgagcaccactgaaacaatcacagtaagaatgatagctaaagccacataatgcttcaaaagcttctcttttttcgcaccaaacgcatggcttgccataactccaaagccctgtgctattccatttgcaaagccaagcaccagaaacataatacagcctgtcgagccaaccgccgcaagcgcctttgagcccagatactgccccacgataatcgtgtccaccatattatagaactgctgaaacagatttcccatcagaacaggaatcgagaacagtagtataattttcattggattgcctttggtcatatctgtcttcatgtgtaaataccctccccaaaaattaaattcataataacttttcccagcaggttcacccctgcagaaaatccattaaaaaaatgtgtgaacaagctctttttcaaagcctcgttcacacattatatacacatattttccagtattcaagtactattttcaaaatttataacttattttttaacagtacgtttattctttcttcctcacacgataattcacatatctctttatcaggtagtacacgacaccccatgtcggtactccgatgaacagccccactactccaaataatccatttccaaggaagattgcaaataccacccagaaaggtgagagtcctgtggactcaccgagtatctttggtccgataatattgccgtccacctgctgtaagataatgataaacagcaaaaatatcacaccctttgacgggctgtcgagcatgatgagtatggtgcttggtatggctccgatgtacggtccaaagaacggtatgacattggtcactccgactatcacgctgatgagtgccacataaggcatgcgcagtatcaggcagcacacgaaacagatagctccgattatgagtgaatcaatgattttgccactgataaaaccaccgaatatcttgtcgctctcttttaagatgcttgaaagcacctgtatatggcgctccggcagaaatgcgctcacgagttttttagtctggcgtttgaaggtatccttgctaagcaggacatagatggcaacgatgaatgcaacaaggcagtttaccgctgtgccaaagattcccataataccgtttatcacaaaggtaacctgtccgagcatattgtcctttacccattcagtaaaatagcttatgccgttattgtatagctcagtgattatttcctttgccctgtcattgtttttggcaagctccgtgatttttttcacaaggtcctgtatctgatccggtaaaagactgaccgcatttgtgatattgcttacaagctgtggcaccaccatcatgatgagcactacaataatggctattattatggccagacttataagtattgacaaccctctcatagaaggtctctttccacacttcttttctatggctttgccaagcgaattgcttagctttctgtcataaaactctaccatcggatttatgagatacgccagcacaatccccatgatgattggcataagtatgtttattattctcactatctgtgccattattgcatcgaatttaaatagcacaaacactagcaggattgctcctgctagtgctaaaaactgtgaaaaccctttggcccatgcgacctttatggtgtgcttcatcttattattcacttccatgcgcgattcctcctcgtttattgtatgtccggaatgtaacaagctgatattatatagtctttaatcaattctagcaacactctcgccctctgtcagctcaaatggtattatctcatgacatgagcctttatgcaaatctatcatgttaaaaagaagctccacgctgcgtgccgccatatccttgtgcggctgtctgatagatacaatcttgggattgtagtactctgcaagtgtcgaaccatcaaagcctgtgatagatatatcttccggcaccctgagtcccttatcaagtattgcccttaaggcaccgattgccatgacatcggaaatcgcatagactgcggtgatttctatatccttttccaaaagctttttcatcgcacgatatgcgctgtcatatgagaatcgcgctctctcatagtaacgctcatcaggtgtgattccatgcttttttaagctgttgagatatccgttatgtcgcagacgagctgtctgtgaaagctccagattggctccaatctctgctatctttgtatgtccatgctcgatgagatagtcgacgattgtttcccctgccttctcatcatcaatggaaacagatgacagctcctccatgctccagttttctgccgatgtggtcacgataacacacggcaccttaaacgaagatgtatcctccgagaaatcctccctgctgcctccgaggaatatgatgccaagcggctttcgctccctgcatatgcggtctgtcacactgcttagattactgtcctcatccagatatgtgatgctcaaagagtagtctgttctgtctattatcgactggatttcctcgactacgtttgcaaacagcatattagaggtaccctttaccaacagataaatatttctggaaatggtctgcttgagcctctttgcattggtatttggcacaaagttgtgtgcctcaactattttcattatggtttcttttgctgcaggagaaacatcctgcctgttatttaaaactcgggatacagttgttactgagtatcccgattcttttgctatatctacaattgtcattgttttccccgtccggacagcgatacgtccttttacattatatccatgtgatataatttctttcactcgttatatcatatatccacaactacaaaacctgctaatttagcttaagccccacatgttttcttaacaagtgtggggcttaaaataacataaactatatcctcttgtaagctatattaaccctttacagctcctgcgagcacaccctctataatgtacttctgacatacaatatagaagataacaattggcagaattgcaagcacgagcatggccatcattgcaccccagtcaatcataccgtggctctgctttaagtactgaatagcaattggtatggttttgtactggttgatgtttaaaaccagtgatggaagaaggtaatcattccatacccacattgcctcaagtatcgctactgttaccgctgtaggacgaagtattggaaatacgaccctgaaatacatctgtaatggtgtacagccatcaatcatagctgcctcttcgatctctaatgagatactctttacaaatcctgtaaacataaacacagcaagtcctgctccaaagccaaggtatacaatgatgataccgagtggatttgataaatgaagcatatttgcaaattttgataatgtaaacattaccatctggaatggtacaatcatagagaaaaggcaaagtgtatacataagctttgtgcccttagtctttacacgaactatgtaccatgcacacattgagcagcagagtacaataagtactactgagccgactgtgatgaaaagtgaatttccaaagcagtcccagaaatgtgtcattctgagaccattcttgtagtttaatgtgctacagaaaagccttgacataccatccttgaaggcttcaaagccctcagtgatagatactgtgctgattccaaacggatgcttgaatatgtaggcttttctcttaaatgaattgagtaacaccataaagattggtgaaatccaaagtattgataaaacagcgaataataatgtgattatccaaccgtgcttggcctgtcttacggcactgacttcctgcgcttttttctgttttgccattagtcctgtacctccttgcttgtagtaatcttattctgtgcaagtgcgataattgcaacaattataaagaatataacagcctttgcctgacctacgccctgccatcctgttgttccatacatggtgttgtagatatttaaggcaagcagctctgacatctttcccggattaccgcctgtaagagctaagttctggtcgaacagcttgaagccgtttgtcaatgtcaggaatgtacagattgtgattgtcggcataagcattggaagaataacgctctttaagagctgccatctgttggctccatcaatctttgctgcctcaataagctcacccggtatattctgaatacctgcgatgtagataatcatcatatatccaatctgctgccagcatactactgcgataagtccccagaatgctgaccactctgagcttacgattgtctttgaatagttctgcaggatagagttaaaaatcatcagccatacatatgaaagtacgattccaccgatcaggtttggaaggaagaatactgtacggaaaagatttgttcctctgattccttttgtaagcgccattgctattgcaaatgatacgatattgataatcagtaccgaaactactgtaaatagtgctgtgtaccagattgaatgaataaaggttgtatccacactgccgtttacaacaaaaatccttgtgtaatttttaaatcccacccatttccagtctgtaacagtggagaatttacaaaatgaaaggaagataccatatacgaacggtacaataaatcctattgtaaatgctgccattgtcggtaaagcgaagatccaaaatttttttctaatcgacttttccataacaaatatacctttcttaaaaaaatatggggtgagtgactgccactcaccccacttttactactttttactaacttttagagaattttactgctcgttctgaagatcccagtaataagcccatttctctgagaatgcctttgcaacgtcatcccatgaaccattacgctctgtgtactctgtgagtggagcaaggaaatcagctctccagtcatctactgaaggtgttgcgttgaatgaccatgctactgatgtcttgccttcctttgcaagttctgatgctacattagcaaaagcgttctttgactcatagtcgcctgtgaatgtatcgaatggagctgaaagacccattttattaacgattgcgtcacgtccgtcatcacttgtgattacccagttgaggaattcaagtgttgcatcaatatccttctgatctgccttagcgtttactgtccagtggttctctgtaccaactgcaagtccctcgttcgcgtcatctacaccgaagtagataggcatcattgaaaggtcagactgcttaactgtgtatccgttctcgttgtcatctgcgaagttagcatactcccagtcaccattctggtagaatacagcctcttccataccaagctctgactcagcatttaagcttcctgaatcaagtgtagccttgtctgctgctgatgtatttgtgtacatatcccaaactctcttgaagttgtccatgtacttacctgtaacttccttctgtcctgctgtgagatcacatcctgcatccttgaactcatagtagagttcgagacctgcgagatgtcctgtgaatctccagttagatccgctgtcaagtcctgctgaagcaaatgcctctgtaagatgtaagtcacaagctttgttgatgtcatctacatgctcgttgatatcagttgcaaccttctctaatgtatcaagatccttgatatcatctactgacttgataactgctcctgagtagtttttgcagtaattctcaagaattgccttgttgtagatgattccgtaacactcatagcagttagctactgatgcaatcttgccattatactcaagtgcaagtgacttatctgtaaggtgcttgtaaatctcgctgtcctttaagtcatatatgtatttgtcatactctgcgcagtctgctgtgcttccgatattgaagattgttggagcctccttcttagcaagctcagacttaagtgttgtcttgtactgtccatcagctgctgttactactgtaacctgtacgcctgtctcatctgtgtacttctctgcaagatcctgccatgcctgatctgtctccggcttgaagtttaacatgtaaactgagccatcgccgccctttgcagatgagcctttctctgttccgtctccgcttcctgatccacatccggcaagcattgttgctaccattgaagaagcgagtaatactgttactaatttctttttcattttaaaccctcctaaaagatttaatattaaaattgtctttgcaaacattattggttgttttcggtaatgtttgcggtaacgttttcacaagaattattatagacagtttcatgtagtttcgcaagaggattttgtcttttctgtatatattaataaaaacaccaggtattttttggcaatttttcacaaagaattgcaaaaaaataagtattctcacactggcgtttggtcattttagttattttcgactatccgttttgtgtaaaaatacttttgttatttttattcatttcatctatcagagcctgcttttgtgcgcgcttgagctgttttatatgatactccctgctcattgcctcctctttcgtggcaaagtgctcgaaatagaccagctccacaggtctgcgtgtctttgtatatttggcacctttcccggagttatgcgcttttatgcgctttttcaggtcatttgtccaacctgtgtaaagtgtgccgtcagcacaccttacaatatatgtataattttcatccatatctgctctgtcgaccactctgcgccttctccagatgatctat

SEQ ID NO: 1460 - DNA, 1952 bp, Unknown
  gut microbiota DNA sequence
ctaatcattgataaactgttgtataatttcatttaaaatgctaatattgtctcataagttaaaaaaccaaagtaataacaataatttatgagaggtgattaaaaatgaagcagggggcaaataaaaaaagaggtacatttgcaaccaaaatcatagcgatggttattttagcaattgtgacttcaaatgtaatttgtatggtattcattcttgaaagctctaaaaaacaaattacagacagtgtcaagcatacaatggtagatgttattaatacaacgtcaaaaattatggaaaatgagattagtaattcaggtgttgatgatctggattatgatggttatgccaataatctttcaggtgtaaagcttgaaggcatggacagtgcatacatgtatgtggttcaaaatgatggcacaatgctttatcatcctacaaaggaaaaggttggacagcctgttgagaatgctgtaattaaaggcgttgtacaacagcttcaggatggcaaaaaaccgggcacgactgttgtagaatatgatttcaatggaacaacaaagtattcggcatatacgattttgaacaatgaaaatatacttgtgcttacagcagatgagtctgaggcacttgcaggaatcactactgtaacaggggttgccgttggaatcagtgctattgttgtgctgcttgctattattatatgcttcatactgggacgcaggcttatgagtccgctcgtaaaggtcagcacaataattgaagaaattgccaatggtgatatcaacgcagattttggcatggtcaaggagacaaatgatgagataggcctgattatagaaaagatgaaggagctcacgcagtcacttggaaatatagtcggaaagataagaaattccagtgacacaatgtcagcaaacagctatgagctcaatgatacaagcagccagacacttgctgcaaataacgagatatccaaggcagtagaggatgtcgcagaaggctctaccggcatggcatcatctatctcaaagattaatgaaaaccttgaggagatgagccgtgagacaaaggatataaacgagtctgtcaatgaaatcagaaatcagacggcagcagtgcaggatagcagtaaaatcatgaatgataagattaaatccatgcagaacagcagccaaaagatggatgacggtatctcagcaatttcaaaacgcatagaaaccgtaaatactacggttgacaaggtgagcaatattgtctctgtcattgaggaaatatccagtgaaaccaatcttttgtcgctcaatgcatctatagaggcagccagagccggagatgcaggaaaaggcttcgcagtggtggcacaggagattcgagtgctctcagacaataccaatacggagcttgagaatatcaagcagataatatcatcactggttgaagagtgcaggtattgtgtacaggcatccggcatcatcgtcgaggacaatgccaagcagaaggaagaaatcaaggcagtgctcgaagaattcagcgcacttgatgagcagattcaaaagacagcagaaaaagctgatgaaatagaagaacttgtcactgcgatgattgagctgaacgatgacatcacgaagagcagcaacagcctgacagacgtcagcgcagcaaatgccgcagcaactgaagagatgaatgccaacatcgaggagctcaatgcgatgatgcacggagtttcagaaatggcagaacacatgaataatgagtctgatggattgaaggaagcattatcgttctttcgtaattaattgtaggtattcataaatgaacattgacctcctttgcgctttgagtttatcattaaagcaaaaaggaggtttttgtcaggtttcaatgtaaatcagtcgtaaaagcagtaaaatgcctttgtggctgattttggttatatacttatacaaaaaatctta

SEQ ID NO: 1461 - DNA, 145399 bp, Unknown
  gut microbiota DNA sequence
gcatcatgcctgtaatttcgatacatacaacaatattatgattaaagggtcaaaagacaagaataagccaccgaaacctctatttgcatcagttccgatggctttaaatccatagctttctatacaacaatacaattatttattgtgacttctcatgcattccctgtatttaagtataagctcgattgagtcctcaactgatatctggcttgtgttcaggcacaaatcatagcttcttgcgtctccccattttttactggtgtagtaattgtaatagcttgagcgctctttatcttttttcttaattatgtccttagccttgttctccgggacatctagtctttcacttattcttttaattctgtcgtccatgttggaacgtatgaagatattgagacaatgcggctcgtctgctaaagcataatctgcacagcggcctacaataacacaggattcatttgctgcaatctttttgatagcatcaaactgtgctaaaaataccttgtgattcagaggcatatcaagaaacggtgctgtggaataagagccacctgtgtaggtgtccatgacaagcgaatataaaaagctgtttgtaggcttttcgtcatgcgactcaaatatttcctcgcaaagtcctgattccttagctgccttctgtaagagctctttatcataaaatttaattccaagtcttttagctaaatcttgtccgacctgttttccgaggcttccaaattctcttcctattgtgtaaatttcgtttgatcccataattcagacccccttatataaataattaatacatcactatgtgataattcaatttatttgttatttatattatataacacttcaagcaaattggcaaagtattttggtaaaggtgcatcaaattccatgtattcgccggtttttggatgaacaaaccctatagttttagcatgcaggcactgtccttccaggcctttaaaccggtttttggtaggtgaatagctcgaatacagcatatctccaagcaagggatgattaatacttgccatatgcacgcgtatctggtgtgttctgccggtctcaagcttaaactgcatatatgtgtagtcaccaaagcgttcaagcaccttataatgtgtgacagccggctttccgtttttctcattgatcgccattttcttgcggtcattgggattcctgcctatggcgccctctattgtgccctcatcatcctttacattgccacagacaatgcccacgtatatacggttgcagctatggtcctttatctgttccgatatctttatatggctttcatcgttcttgcagacaataagggagccggtggtgtccatgtctatgcgatgcactataccgggccgtatttcgccgtttatgccacttaaagagtccttgcagtggtacattatggcatttacaagagtatcgctgtaatgccctgctgaggggtgtacaaccatgccctttggcttgttgactaccagtacgtcatcatcctcgtagagtatgtcaagaggaatgtcctgtggcaggataggtgtctgtacggcatcaggaattgtgacatctactatgtcatcagtctttagcctgtaatttgccttttggggcttatcatttaccaatatttgattttcttttagtatccgttgaaaaaaggagcgagaaatatccggataaatgctgcttaggtatttatccagtcgttctccctcctgttcactctggacttcaaatgtatctctattcatagtgaagctttctctttttttattttagtaactatttaaaactacattgcacactttaaaaagcgcattccgcactaattttcatgctttccatcatgttttttgtcagggaagattaaggaaaaatcctcctccttgtagtaaaacagcccgagtatgataaacataaatgccgctacagtgacatatatatcagctacattgaatatcggaaaattaatcaggctaaaataaaagaaatcaaccacataattatttacaatacggtctatcagattgccgagtgcacctgcaacaaacagtattacaacaacattcagcagtctaaaacgttttgagacaggtattttgcgataccatacacacaaaagtataacaactgcaatagtaatcactgagaaaaaaatcattttggcacgcaaaaatgccaatggattctcagaccaatatgtaaaatgaaagatattctgtattattgaaagcagatcaacaccaaatgcagcactctggttttccaggtatctgaactcgaaaactcccggaatgagaacaaacacacccgtggatgattgctttagatttataacagccagatattttgtaagctggtcaattgctacaagaatcaatgcaatgatgcctgctgtacacatctgtttttttgttttatttttcttcatagctgattagagactccgcttaataagatgaacccgggagatcaaatgaatccatgagactctggatatctcctgagatatctactccgtgtggtgtggcgatgaagataaagttggatatcttctgcagattaccgtgcagggcatatgctgagcctgatgtgaaatctatgatgcgctgtgccacatcgacattaagtccctccatgttgatgacgactgtacgtccgttaagtaatgtgtctgttatttctatttcgtcttcaattgaacttggttttattacgcaaacttccatgtctgatgatacctgctttctggatgattttgatattggtgtaatcttggatgtagtcttaacaggcttctcctttggtgttgtatcacgccttgtgctttttatggccggttcctcttcagcagcctctttttttctgcggaaaggatttcttggaagctcttcttcttcctcatcatcgaggtaataatcctcgttatcgaactcctcatcgtcctcagaatttaaactcattttgtcaagaatcttatctatgaaactcatttctatattccttttctatttttattttgtgtatagcatatgcaaagtatcagttagccttgctgtagtcgcgctctccaaatattccggtaccgacacgtaccattgttgcgccctcttctattgctactgtgtaatctcctgtcatacccatggacaaaacattcatactgacattatctatgtttttctgtgctatgtcaactgataattgcttaatatctctaaagtattgtctgttatcctcaggatcatctacaaatggtgctatagtcataagtccttttatatggatatggtccagtttagcaatttcttcaactaaagagatagcctcatctcgtgatgtgccaaacttagattcctctcctgcaatattgacctcaaccagtatatcgcagctgcagtcatgctttatggcctgcttttgtatctcctttgccagatgcagtgaatctacagagtggataagtgatgtttttccaactatatacttcaccttgttggtctgaagatgcccaatcatgtgccagtgaatatcttttggcataacctccatcttttcacacatttcctgtactttattctcgccgaactcacggatgccctcatcgtatatctcactgagcatctcaacaggtttggttttgctgactgcaattagtgtgacatcactatagtttctgtgagctctgtcacatgcagcctttatattttgctgaacctgatgtaagttgttttttaacataaaatctgtcctttctgtatattttcaataatatttattaccaataattatttggttatggtctggttttccttcacggatttgccatccagggctatatggtcataaagcgaaatgccatatggcgttttggcttctacaattgtgtagtcatcgtttgatgcaagtacctttatctgcttaaacacagcgtatcctttgttgatattgtagacacctgtgagcttgtccttatctgttcccaccctgtaggttgaggaagaatcaggctttacaatgatatcgccgtccttaagatattcatcatctacgaaataaaagtcatcattctggctgaatatggttggactgactatattaactgaaccactgcttttatcctttatcatgagcgaggaagcatcggaatcgccgcttgcagtgaaataatccttaggaatagtgaaaaattcctttttggttatagctgaattaggtattttaagcccggtgtctgctccaagcacgagctctatattggtaaaacgctcatttatatagcggatgagcgaatttttcatattcagcttcaggaaaaaagcatcatccttcttcaaaaggctgaacgataccgtggttgtatagtcatcatcgcagaatctgatttttatgactgacttgtcattcaggctcttggcaacattgtcaggaacatttatgagtatattccagttctcacttgtaatcagcttataaacaggatccagctgattgatggtgctgttgtcggttaaatcagtctcttcataattagtgttgttgtactgatccagagtgaagctgtctgtagtgacatcctcatagccgtctattccgtaatagactattccgggagctgtcggcttatatgtatagaaggtgttgttagcctcagcagtactgatagtatctgccaggcttgtcagtgcattttgactgagaacctgtgtcagctgtgcagacaagtcgtttttgaaggtataaacctttgaaaagtatcgtctgttgtagccggatgaaaagctgtttatgtcagtgataatcttcccggcagcctcgtcagtgatggcggaagcatcattttgagcaccggtaatctgggttgcaatggagccgtctgtatcaacagagtagacaacatcacttgttgcaacctttgagccgtttgacacaaagtagttgaggtttcctgattcctcagcatacactacactttcctcgcggattatcatgcccttatatatgttgttggtcgctatagtaccctgttgtacctcgtattcagataccgggtttgaggtgaaatatgtaaatatgtgaaaaatcacatagattattattacaaaaaacactataaaaccgatattcagattgaagccggtgtgatatttcagtatttttttattcttttgggacacaattttactccttaaaaaagggatgtgaaatacacatccccctaattaatcatttataaagaaatgataacctttgccttggcacattcaggcaacttgtcaatattccttgaaacacttaagatgaacttcaccttaaacttctcgctgatgatatcaagcttttcgattgccttggtgatatccccctcatcatcaagtgatgcaattgtaaggaagctgtctaaatacatctcctccagatcatgatcctgcgatatgattccgcatataaatcctaaaaattcatcacaattgtcaataggatagtccataacattgattagtcgaacctggttattaagctcatacatgtgcttctggctcttatcaagaaaaactatggaaccttcatttcccttaattgatgaatttaccttgtctaacagctcttttgtcttgcccttgcccttgtctccacaaataatttctatcatggctcattcctcctatggataaatattgtgattattaataaaaaataattgtatttttatattattatagtataaataaccataaaactcaatatttaattagcaaatccactaagtatttcattcatgaagctataaagatcctttttaccatctgccttgtaaactatgcttatgatgcgctcatttttagcattctggcttagcagtacgaggcaatggccggcttcccccgtagtgcctgtctttcctcctgtcactgtgacgttttcaggagctgtatatgctccggtcagatagccgcaggtattcttaaaggtctttgaaacagccgcgccctgggcatttgtatatgccacatcatgggtctgtgaactgatgattgaaacaaagctctctaaggatatggcattggaaaaaatgagatacatgtcatatatggtagtgtaatgattttcatcaggaagaccgcttgggttgacaaaactgctgtttgtggcaccaaaactttttgcagtgctgttcatcagcttggcaaattcttctacagaaccactgcagtactctgccagtgctattgccgcatcattgccactctcaagtaagagcccatacaataagtcctgcactgtaatgacatcgccttcctttaggccgcataccgatgatgaatgacccgggtttgcagcgtcatggcttactgtgactgtcgcatttaaatcacagtttttaagaattatgtatgcagttaaaatctttgtagtgcttgcaggatatagcttttcaaacagattctggctatacagcacctgatgagtgtcaatattaaaggctccggctccctctgcggtttttgcaaactgcatattgtcctgaccaaaattgacatcatttgtgacgcaaaggttggacgcaaaaaaattacttccgttatatccatttatataatctgtggaataagtatcatatgcattctcaatctttgtaccacagccggtcataaaaaccgctgctatgcatgtcagacatagcagtcgtttaattctttgtttacttgtacatctcacgccagtcaagatctcctctgtccaatgataaaatgagcagctctgctgtagccagattggtggcaagtggtatattatgctcatcacaaatacggaaaatactgtttacctcaggctcgtgtggcttaggctttaatggatcacgcagaaagatgacaagatctatgtcattgtgctcaatctgtgctccaagctgctggatgcctcctaagtgtcctgcaagatatttgtgcactgagaggtttgcaacctcctctatcagacgtcctgtggtgcctgtggcgtacaaattatttttgcttaagatacctctgtatgctatgcagaagttctgcatcagttttttctttgaatcatgtgcaactaatcctatgttcattgctaacctccctatgaatatttcttcggctgtaatcctacattcaggacaattcccattcccatgtacagtgaaacaagtgacgtaagtccatagctgacaaagggaagagtcataccggtattgggcataagacctgtggctacgcacaaattgataaaggcctgaaagcctataagtgctcccatgccacagcatatgagctttccgcttgtgtcctttgccttccttgctataagtatacactcaattacgataagaagcaaaagaattattatactgattgcaccaataaagccaagctcctctccggcaacagcaaatataaaatctgtttgaggctctatgatgtagttggtgttcttcatagaggttacaacagagttgttaagtcccttgccaaacaactgtcctgagcctatagcccagatagagttcctttgctgtgctgctgtatcagcgtaatttgtcgggtcgagccacgacattatacgtgtagcagggtaaaagccttttttgatgagtgcatcggcatgtgtatatatgtagctaagcactatcaaaactatcggtactgaaactccaagtaccggcattattattttataacttaatccgctaataaacaagagggcagcgaaaattaatgcagtaagaattgttgttgagttgtcaggctgcttataaataaggaataatggtattcctacaaatatcactgacagtactatcgtctttaccgtgtttatggtttcctcatatttggcaaagaaataggcaaagaacaaaatcagtataattttggcaatctcagacggctggaatctgatacctgcaatttcaaaccagcgctgtgcaccctttgcatcatcacctgcaaacagaacgagtaacagcagtacaaccatgccggcatagtatatccacacgaatttgagcagaaatgagtaatctataagggaaagcactatcataatagtcagtcccattacaaagcctattatctgcttgctttgtacggagtgcttggcactgcctatcagcaggatgcctataatcgacaaagctattatgtatactactaattgaaagtgataattctttagtctgtactgtttgagcattttgttacttcctatctgttatctttgtaatcttaattctaatactaatgatatgatggtcaaaaggtattttgttaaaggttattaattgaatttttgtcgcgcatgataatccggacctcataagcttcatcgtttatattcatatgtctttgtatcacgctttttatctctttttttatctgtgtcatattgtccgaagcagatattgtgctcctatcttctgcaagtgctattttaagccttttctttgcgtattctcctgttttggaaaatttatgcatcatacagcggcacctctcatatcgtcagaggaatggattatctgaccggatatacgggcaaatacaggaccaagcctgcttttggcctcacggacaggtattcctctgttctggcaaatgataacacttttgtcatagggaatagtgccgataatcctggtagaaagaagtgctgtaatatcattatctgatatcatctgatgccttcttaccatatgcttgtcatatgcattaacaatgactgatatatcgtcaaggtgtgcgctgtcgagcaggcttatgcatcgccttgcatcgtgtatggcagatacatgcggtgtggtaactactatcgcacggtctgcaggtgaggctgaaaaccaaaagccactgtcgatacccgccggagaatctatcagacaataatcaaagcttgctttaagctcctctataagtatcttgaagcgtgcctcatagctacatagcgtatccatggaaggtgctgcaggaattacatacagattgggatactttttattgcgtatgattgcctgtctgatacggcatgagcggtttaggatgtcgaggatattgtaattgaccttgtcctctattcccattaccaggtccagattgcgaagccccatgtctgtatcgagcatgatgacttttttatctaactgtgaaagttcaactccgatgttggaaataaccgtagtttttccaacaccgccttttcctgaagtgaaaactattgcttcactcacaaaaataaacctcctagtctgttctggcacttgagcctgatgcgttaacaccctcagccttgactgcgagtaaatcgtcaagtgactccagattataataatatgaaattatatttctggatgcagctgcagcattgtgtgagctgtatccatatgatatacgtgtagctattgtaatttcaggatcgcttgatggagcgtatcctacaaacagcgcatggtttggtcttgtctcaacctgctgtgctgttcctgtcttaccggacacctcaacgcctgtaaagccgccaaatacatcgtgcaggtcttcgaccaccatacgcattccctgatggatggcatcccactggctttgagtgagtgtgcctgatatatcggttgattttgaatcatactgcttgactgttttgccgtctgcatccactattttgttcatcagcttgtagtcataaagctttccggaagcaaccgctgttacgtaccttgaaagagaaatagtcgtatagttgttattactctgtccaatagctgccattacaggatactgtgtagcaatggacggcgtcttttctactatctcaacacctgatttctggtccagtccgtatatagatgcatatttttgtatgtatttcataccgttttcatcgtcatatgaaccggtgtccttgctcgcaagcctgaagcctgttgtgtagaagaatacgttacatgaatcccttaaagcttcagatacattgtccataccatgcgcacccggataaatccagcattttggctgattgctgatttccgtaaatattccggtacaattaatctttgacgaagtatcaatgactccctcggcaagacctgcggtgcttgataccatcttgaaggtagatcccggtgcagtctgctcctgggttgcataattccatagcggattagacttgtcctctctgagagactggtagtaatcagcatctacagtgtttgcaagcttgttgttgtcatagcccggatagctgactaaagcctttagctgtcctgtctttgcatcagttatgacacaggagcctgtacatgggtcaagggcaagctgtgcaggtgttatctctatattgtttattttgtccataagaaatgcatatggactgatggagccgttggcaatgttgcttactgttgcatcgtcataatcgagtacaccctggtcaaaaagcagaagacacagctgctgtccagtgaccgccccggaatttaccatgtatttgtaaatgattttggcaaagtctttattgtcagtcatggcatccctgatatatgaacacagtgctgtgtaaatttcacttgaatcagcatatttctgatttacatcaagctttgtgatgtctatccactgctttgagatgcagtatttgagataatcacgcggcgagagcgtgcctgccttccatgaggcatatgtggaatcagaggtatctatctgtttgctcaacagcagtccatcatcgtttagcactgacataacacatgtaaaataatcaagtgtctgctccgacatggaagcagtgcctgaggtaccactttcaagctctctgtcaatagtggataatgcatcctgcagctgaccgctgaaggaattgtatatagcctgctcagttgctgatgcatctgatgcattgaaatgtgtcaggtcaactacattgttgttgatcagtgcaaagtaaacatcacctataggtatttcaccggattttattttggagtaaacaattccggctatctcctgctctaacagcttgtatgtggcctcctgcagcttgatgtcaatacttaagtagacatcatttccggaaacaggattctcctgacttattacctcgtttatcttaccgacattgtttacatagacctgtttttcaccgtttttgcctcgcagatagctctcatagtactgctctaagcctgacttacctaccatatcattttgtgtatatgagtcatcatcctttgacagctcattatactcgtcggtagatatcttgcctgtgtatcctattagcgatgaaatatattcaggatagttgtacttgcggatggtatcctcttcaattgatatgccggtaagagtatctgaatgctcattgacatatgcgactatagagtcatttacatccttggcaatggtagtggttttgtatttagtgaatcggttctgctttatggcatatctcatcactacaatatcataagtggcctgtgtatcatacttgctgcttatgtcaaagcattcatactggtcagagcttaggaaatcaataatattctgggcgctggcatttgcctcgtcaaagccaagtgatttattgtattcgagcttatcatatttctttccgaacacatctgacagaaatctcttttttgaggtttcagatgtgaatgtaaagctgtatgtaccatcatcgtttaaaacaaccggaaaatcattgtatatggagccgccattgttttttatcacattgataatttcattaagctctttgtttaaaagacgattgtgctccttcgtagatgaatagctgccgttgtcagagatgactacagagtatgcaagctgattgtaagcaagcagctcaccatttacatcgtatatattgcctcttgatgcctctatggacagcggctttttaatcagcattatgaagtttttctgataatctgcacctttaataatctgaagggtaaagactctttcggcaagcagggcaaacatgagaatgattactgctgccaagacaaaaagtcttgagctgaaaaatttcttcagaaaatcttttatatcataaatcaaatttctttgctctccttttctcgtgtgcttccagcttctggtttaacttaagaaataccagatacaaaagtatactgataaccattgtgtatacaaattcaggtatgataattgacttcagatagtacaaaaagctaaacctgccacgcagtaaaaacatgaaaaagtatactaccagattgtaaaacaaatcgctgcctcctataagaagcataggaagctttatatcgtcaggataaaatcttttttggaataatccattgataaaaccgatatacatatatattaaagcatacagtcctatataatttccgcaaaatatgtcaataagcaggccgcaaaagaagcctacccacagtccttcctttttgccacgcataaagccaaaggatgatacggctataatcaacaggtttggtgagatattggcaaaggaaagagtcttaaacagcgtggtctgcaatacaaagcataaagttattattataaataaaacaattctacgtctcatgctgctccttacttattttcagttgaattttcagtctggctgtcaccggctgtttttgtactttcggtgtcgtcagctgtcttagtttcaccggtctgcttaagctgtgttatgaccatgacattttcgatatgctcaaaatctacaaccggtgtgatagtgccggattttgtcagattgttggaattattttcgatttttgccacatagccaatcagtatgccctgctggtaacggtctgacacgtatgaggtaacaacaggatcgccttctttcaccttgttgtcgtcatcctttaactctgtaaaggtaattaccttgtcatcgttcatggtttttatattgccactgacggtgaggttgtcctccgtggtggaaaccatgccactgaccttgctggcatcatctatgatacagcgtaccttggcaaaattatcgccagcatcggtaacaatacctacaagtccgcttccagcaagcacattcatgcctacgtccactccatccttttttcctttgtcgatagtaaaggtagaaaaccagtttccgctgtcctttgctatgacactggcagcgaccttgggatatgatggatatttggcatccaaatcaagaagctgtctgtaattgtcaagctcatactgttcaagtttggttgttgtgagctgtgttgtaagctcttctacctcggccttgagctttttattctcagccttgacattttttaatgtgcgtatttctgtaaccttatctgaaatgtggattccaaagctgtttatacccttctgcattgggatgaatacatatccggcagcagtctttaaaggaccaccggagatatttaaggtaaggcttaacagcatggtcacaaagcagattgctgtcataatcaacagtgtgtatcttgcaggcagctttttattgtgctttctctttcgattgcgaaaattcttactcatgttaacctcggttattattttttgatgctgaacggaagtctcttatattttgaatcagaaactatttgtacgagcccgcgtactgcactctcctcaggacattctgagcagatgacctttatacctgtaatctgttcaaagagctggtcaagtcctgtaagctgtgagccgcctcctgtgatataaatgcctgaatggatgatatcctttgcaagctcaggcggagtcttctcaagaatcatttttattgatgtgcatatagactcaaggtttgacttcatagcctcgtaaacgacctttgaaccaatttccatctcaataggcaggccgcttaccacatcacgtcccactatgaccatactgtcctctcttcccggaagtgcagagcctatagtctccttcaacagctttgcagtcttttgtccgattacaagattgaactcctttcgcacaaaggagataattgactcgtcaagtctgttgccaccgaaatgaagcaggtcactaagcaccaggccaccgagtgaaataacggatgtctctgttgtgtcagcgcccatatctactatcatgacaccggttggctcgtttacatctattccaagacctacagcatcagcgataggcttctcgcagagcatgacctttttaggctttgatttgcttttatagaagagctcgtagaatgctcttttctctacatctgtgatatctgtcggcacagcgatgatgaactcggcatttttgatacgtgcctttgtcttgtgctccaaaaagtcaaaaatcatagtctgaagcaaattatagtcagcaataactccctctacaacaggaaatatgacgttgattgtctcaggcgccttttcatacatggcatatgcactgtctccatatgcatatatctgatttttgtctattacggctattgtgtttttctcaagcattgtcttgcctgtagcctttgagtataccttgaaattgtttgttcccagatcaattccgtaaacgttgttgctcataataattctacctcgtcttctgtttatataagtttattttcatagaagctataatattcgttatctccgattatgatatggtcacaaagctctatggaaaaaatccctgagccctcaattaatctgtctgtgacagcaatatcatttctgctgggagtacaatctccgcttggatgattgtgcaataaaacaagctttgatgcatttttgtccagggccgtcctgatgatggagcctatgtccactacagatgagcttagtgaacccttggatatgaacttgtctcctaagaatctgctttttacatcaaaataggcacaaatgacgacttcatttgtgagatgcctcatctgctccatatagtagtcagctattgtctgaggattattcattctgatgctttgaaccttttttgtctttgctatgcgaagcgacagctctgctatcgccttaagctgtatagcttttatctgccctatcccggggatactaagaagctcctcataggacatctcatagagattgagcagattgccatgcctgccggaaagtatgtcctgcgcaatatcaatcacagtcttgtcccttgtgccggtctttataatgatggcaagtaaatcagcgtctgacaggcctgatgctccaagcgataaaaatttctcatagggtcgctctgaagccggcagatttttaattgttttgttattatgcattaatccctttcgcttctcccaggcgattgataacggatttaagcaaagttttcagttaattgtagcacacctaatcaagcttaacaagatttctctcataaagtttttgtaaagacatcaaaattccaagctttgcatggtaccatgtgagtcctccctggaaataaaccgcatatggtggcttcacagggccatcggcagaaagctcaatggatgagccctgcacaaatgcgcctgctgccatgatgacatcactgtcatagcccggcatagcccatggctcaggggtcacatagctgtctacaggtgctgctgcctgaatgccctcgcagaaggctatcatggcatcgcggttattgaactctacagcctgtatgatatcgtggcggctttcagtaccgtcaggaaccaccttaaaaccaagcttttcatagatttttgcggcaaagattgctccctttaatgctccgcttacgacagtcggtgcaaggaaaaagccctgataaaatgactggatgactccgagtgaggctccaacctccttgccaagtcccggagatgtgagacggtatgcggcattttcaacacattcctttttgccgacaatatagcctccgattggtgcaagtccgcctcccggatttttgatcagtgagccaaccatcatgtccgctccaacctggataggctctgtatcctcgacaaactcaccgtagcagttatcgaccatacagatcacatcaggctttatgctctttacaaaggcaatgagctcgcctattcttttgaccgaaagtgtaggtcttgtagcatagcccttagagcgctggattgtgacaagcttcgttttttcattgatggctttctttattccgtcatagtcaaactcaccgtcaggcagtaaatcaacctgtgcatatgtgatgccgtactcagcaagtgagccctttgaagggcgtatgcctattacctcctcaagtgtatcgtaaggctttccgacagggcttaaaagctcatcgcccgggcgcaggtttgacatgagggcaagtgcaagtgcatgtgtgccgcaggtaatctgaggccttacaagtgcatcttctgcgccaaaacagtctgcgtacactctctcaagtgtatcccttccgaggtcattgtagccgtagccgcttgatgcctggaagcactctgcgctcaccttgtttttctgcatggcggctatgaccttaagctgattatactcagcatttgtgtctattttgtcaaaacgctccttaagctccttttctacagaggttccgaaatccaaaacctcctttgatattccaagtgtctcatactgcctgtaaatggcttcattggtatctaacaaattataatcctcttttctgctaaaatttcttgtattttatttaatattttattatcatcatatgaatattcatttttttctatccatatggtatctttttctctcctaaaccaggttagctgtctctttgcaaaacgccttgattcaagctttaccttgtccacagcctcatcaagtgaatattctccatcaagatatgcaaggatttccttatatcctatgcccttcatggataccatatcgcttgtacagcccattgcctttagctttttcacctcatcgacaagtccgtttgaaaccatgatatcaactctcttatctatcctctcatagagtctttgtcttacatcatccagtacaaaataggcaaagctgtatggagactgcttggctctttcagtctcattgtgctttgaaatcggctcatggcaggtgtgatagtattcaattgccctgatgacgcgctttacgttattctcatggatgctctcgtaggatgcagggtcgatatccttgagcatttcatgcagtgcatggtttccgtgctcgttagcaaagtcgtaaaggctttttctgtatgcctcatccacatcctgctctgtgaaatcaatgtcatacaaaagtgcctggatataaaagccggtgccgccgacaactatcggtatctttcctgcttcgtatatctcattaagtgctttttttgccatatccttgaagataaatacattgaactcgtcagagggctcaagctcatctatcagatagtgctttatgccgtccatctcatcgactgtaaccttcgcagagcctatatccatgtatttgtatacctgcatggaatccgcggatattatagcaccatttattttttttgcaagctcaatcgatagagctgtctttcctactgctgtcggtcctgtcaggacaatcatcggtttttgtgtcatattgcacctcagtccaaatgtgtatgttgtcatacgatacgtttgaatttcttttctatctcatatttgctcatagagatgatggttggtctgccgtgtgggcagttgtaaggattgtcgagtgacaaaagctcatctatcagctcatttatctcaggaagagtaagcttgtcattgcccttgactgctgccttgcacgacatggatgcgaccttttccgtgatgatatcaggtgtctgtctgcctgtcgcattggaaaaatcatcgagcatctctataaacagatccttcatatctatgttaaacaaattatccggaattgcactgatcatgtattccttgccgccaaaatgctccacctcatagccaaactgttctatctgcggcctgtatttttcaagcatctcgctttcctttgcatcaagagtcatgacaatcggagggcttatgcgctgtgatgtaaaatccttattggcaagtcttgccattgttttttcatacagcaccttctcatgggctgcatgctggtctatgatataaagcttgtcctcaaactctatgagccagtatgtcttaaaaagctggcctatgatggaaaactgcttcttggcgctttctgtaagaaaaaccttgtcgtaatccccaagagtctgctgggtgccggtgacaacctgtgcaggttcatacgcggcggaaatctcaggcgttagttccgctgaattgccggtgccagcaacaagcgcagatgcagatgctttagcagtctgcagctttgatgtgttatctgtgagttgctcattaacagcaggcgcttttgtagcaggttctgttactgctgacgtcacgctatgtccgtacacgctccttgattccgctgccctcacctcattgatacgtctcttctcaaacggctccggtattggctccttatactcatgcactatctttttaggcgccggtgtactgtctacgggcacctcgggaatcatctccttatgagatagaattgcatatattgtgtcacacaattcgacatatatctcgttgttgttgtcgaacctaagctccatcttggtcggatgcacgttgacatccagctcactgaaaaatgtgaagtaaagcactgtaaacggatactgatgctgcattaaaaagctcttgtaggcctcctcgatagcgcgtgacaatatattgctctttacatacctgccgtttatgaaataattctcataatttctgttgcccctcgtgatgacaggctttcctataaagccttccaccttaaagtattcacattcatgcttcacctcaagcagtgatgacgatatctcgcgtccgaatatatggtatatgatatcctttctgttgccgtttccggaggtgtgaagctttgtctggttattgtttatgaacttaaacgatatatcaggatgtgaaagtgcaagcttttcaaccatatcgcttatgtagctgccctctgtctgtgctgtctttaaaaacttgcgtcttgccggaacattataaaacaaatcctttactatgaaggtagtaccgtccggagcaccgatttcctcgttggaaagctccttcgagccttcaatcacatatctggtgccggtgagctcatcgtaggtttttgtgataagctcaacgcgggcaacggccgagatgcttgacagcgcctcacctctgaagccaagagactttacagtaagtaaatcctctgccgagcggattttactcgtgctgtgacggtaaaatgcaactgcaacctggtctctttcaattccgcagccgttgtcggtgatacggatgaatgagattccgccctcctttatctcgacagtgatggctgtggagcctgcatctatggcattttccaccagctctttaaccacggaacacggacgctcaacaacctctcctgcagctattttatctattgtttcctgatttaatatggcaatatttggcattttaatcctttctaccagcggtttttaaccttgttctggagctgataaagcttgtttaacgcatcaagtggtgtcatgttgcctatgtctatgcttcgaagctcgtcaattatatcatcatccttcactgtgtcgaaaagcgaaatctgtgtcatatcaacctcgtcaaggtgctcctttttatgcttgtggccagtgtcaacggatatgctttttacagtatctgtgatatcatttgcaagaagctgttctgcgatttccttggcacgctctatgactgaatcaggcagacctgcaagctttgctacttgtatgccgtagcttctgtcagctccgccctttacgatttttcttaagaaaactatatcatcgcccttttcctttacagcgatgcaatagttatttacactgtcaagcttgccctcaagctcggtgagctcgtgataatgggttgcaaaaagcgtctttgccccgaggagctttggattacttatatgctctacaactgcccaggcgatacttagtccgtcaaatgtactcgtgcctcgtccaatctcatcaagaatgagcagggattttgcggttgcatttcttagtatatttgccacctcgttcatctcaaccataaatgtactctggccgcttgcaaggtcgtcagatgcgccgactcgtgtgaagatgcggtctacaatgccgatatttgcagtttgtgcaggtacaaagcttccaatctgtgccatgagaacgataagtgctgtctgtctcatgtaggtggatttaccggccatgtttggtccagtgatgattgagattctgtttttgtgctgatccagatatgtatcgttttctataaacatgtcatttgtaatcattttttcaactacaggatgacgtccgttttttatgtctattattccgctttcatttatctttggcttgcagtaattattctggctggcaacaagagcaagcgaagcaaaaacatcaatctgtgctatagctctggctgttttctgaattcttgaaacattgtcggaaatctgttttcttacatcacgaaacagctcatactcaagtgatgtgagcctgtcctcagctccaagaatggtatcctcaagctccttaagctccggtgtgatgtagcgctcggcattggtgagtgtctgctttctcacgtaataatccggaaccatatccttgaaggagtttgtgacctcaaggtaatatccaaataccttgttatacttgattcttaagtttttgatgcctgttttttcacgttcaccggcttcaagctctgcaagccatgtctttcccttggtttttgcgtctcgaagacggtcaacctcctcgttgtagccggcttttatgatatctccgtcacgctgtgagataggcggctcatcctcaatggatgaaagtaaaagctcatatatatccttaagctcgtcgaactcttcattaatctcatcggtaagctcacacggtatgtctgaaagctgctgctttattggaggaagcatttttagggaatccctgaatgcaataaggtcgcgcggattggctgactggtaggtgattcttgtgatgagacgctcaaggtcataaataggattaaggtattccctgatctcgtctcttgtgatttcgtttgcattaagtgcttcgataagcttctggcgctttattatctctgccttttcgataagaggctgctcgacataggtgcgaagcagtcttgctcccatagccgtgcgtgtcttatcgagtacccaaagtagtgagcctctcttttgcttttctcgaagtgtttcaaccagctccaaattacgtcttgatgagctgtctattatcatatatttgcctattgagtacggatgaagctcaagtatattgtcgagcgagttcatctgcgtttcataaaggtactttaacagggcgccggcagctatgactccactctcataatcctcaagccccagagcatttattgtctgtacatggaaatgtgaaagcagtgtctcatttgcaagaccatcggaaaaataccatgagtcgagtgctgaaacagtaattgacagtctgtttttcatatcgtcaacatctattccgctcatgtagaaggcttcattacatatgatttccgatggattaaatctgctcacctcatctaacagctttctttctgtatccacctctgtcgtaaaaaaatcacctgttgtgacatcacaggtcgctatgccgtatttgtcctcagtgtatacaatcgacattatgtaattgttttttgcctcatctaaagaagccatatcagtgtttgtgccaggtgtcacaacacggattacctctcgctttacgattccctttgcctgctttggatcctccatctgctcacagatagctaccttgtgaccgtttgatacgagtctgttgatatatgagtctgccgcatgaaacggtactccacacataggagctctttcttcaagtccacagtttttgcctgtgagtgtaagctcaagctcctttgaaaccattatcgcatcgtcaaaaaacatctcatagaagtctcctaagcgataaaataaaatacaatccttatattgttcttttgtctgcagataatgctgcatcattggtgatacttctgccacgaatatttcctctctttatgtgtataaatattattcatgtgtataaatattatttaaaatccggcctatattttttaataattgcttctgcgacctttatgccgtcgattgccgcagatgtaatgcctcctgcatagcctgcgccctctccgcaagggtatacacccgagatgttgctctcaaaggattcatctctttttatgcgaagcggagaagatgtgcgtgtctccataccggataaaattgcatcttttctgtcaaaaccatgtatcagatgaccaaaatgctccattccaagcttgaacgactgctccatgtcagcgttcatcaatccattcagctttgcaaagacggtgtttccctttgtacaggagccaaaatcaccgtatgctgtcgttaatctgtcatcacagaaatcaccgaaaagctgctgtggtattaaaccattgcctctcttataattttctgtttcaagcttttcctgatatctcactccggcgagggcatcatctgctccgaaatccttcagcgaaacagatactatgatagcactgttcgcatttttgctgtttctgtcgtgatagctcatgccgttaaccaccgtgtgattttcggttgacgatgagttgaccacatatcctcccggacacatgcagaatgaatagactcctctgccattcggaaaattggatgtgaccttgtatgggcttggcggaagtataattttcttttgaataccatactgtgattcatctatcatgcgctgcggatgctccacgcgaaagccgacggcaaagctcttgcactccatatcaaagcctttgttgtaaagcatatcaaatgtatctctggcgctgtgtccgagcgccagaacacatacatctgtctttatttcactattactgtcagaatcagtgtaaactcttaatagcttattggaaactatgtcaagattgctcacacaggtgtcaaatataaatgttgtccctttgtcaaccaaaaatttacgcatgttgacaatcacttctgaaagcacatcagtaccgatatgtggcttgttgtcataaagtatggacgaatctgccccaaatcgcacaaatgtctcaagcacaagacgattcctacccgacggatcctttacggatgtgttcagtttgccgtctgaaaaggttccggcaccgccctcaccaaactgtacattgcttttgggattaagtatgccgctctcccagaatttttgtacatcgcaagttcttttctcaaccctgctgccacgctcgataactatcgggcgaaaacctgcctctgccaatatatatgcacaaaacaggccggcaggacctgcccctgcaataacaggtcgcctgtcaagcggtatatggccgcatgcaggtatcatgtactctttttctttatatatgagcacagatgagctggctgctctttttacaattgcttcttcgctattttttgtatcctctagctctacagcaactgaatatgtatagaacagctcaggctttttacgtgcgtcaagtgatttctttaatatgcggtatgtgaagcctgtcttggcattgagcttaagcatttttattattttcttttttaatgcctcatcactgtgcgtgacggggagctttatctggttaattttaatcatttactgcatttctcctgctatatatccacttgtccatgcccactgcagattgtagccaccgcatatgccgtccacatcaagcagctcgccgcaaaagtaaagccccggatggattttggactccaatgtacgtacatctatttcctttgtatatatgccgcctgcacacacctgtgcagattccactcctcttggcttttttaccgaaacggctgtatgctttattgagcgggtgagacttttacaatcatcatctgtcaacagccttccctttttgtcaggagatacacctgatttgtgtatcagctcaagaagaagcttattgtttaaaagtccgttaagcatctcatttagcgagcggttgtctgtcgttgtaatgcttctgtcctttatgtacccgttaagctcatcatcactaaaagccggcaaaaagtcaattatcacctcgaccctttgacctttatcgagggctcttgacataagacttgaaatctgaaaaaccgggatgcctgagatgccatagtcagctaactgcagctcccctgtattttgctctgtcatttgaccgtctatcacggaagcgaccgtggcatcgcacctgacccctgtgatttttttgaaattaagaccatcacagctaaagccgcaaagcgcgggtaatggcttttggatatggtgtccgagagcttctatctgtcgaaacaggcttccgtcacttccaagcttcggggaagccgtaaggccacatgctatgataagccttttggacttaaagctgccattgtctgtttggatgcagtaaccggtccggtcatccgcaggcttaatatcagtaatattaatgcctgttttcacatccacatgaaacctcataagctccattcgaaaggcagccacaacagatgcagcctgtcttgaatttggataaatgtagcctgcattgtcatatgcaggtattccaagttctttaaaaaaacgtattgtgtctgcataattaaattgcgacaacccgtttttaatcagtgctttactgccgtgaaacttgtttacagacatatcagtgtttgtgaaattacatctgccgtttcctgttgcaagtattttctttcctatatcatccttgtgctctaaaagtgccacgcgtgctccctttgatgcagcagctgctgccgccatcagtccggatgcaccggcacctattataattacatcgtacatattctttcccctaactgatttattttaacattaacttgaatagctttcaagaaaatcgtacaaatcagtttcgttaaaaaagtagagtccgtttgtaaccttattttttgcttcatcgggcagttcttcaaaatacacgcctgtgtcaaagtatttttcacttgcagtggcgttgtatacagacagcattccggagtcatttttgatgcagtattttgcattcttagcctcatttgatgtcagaaggctttctttttcatttttttcttctttatcattttcattgctttgtgcaattatcgcagccttgtctgctgctctttgcgtattgattttttctattataacaagtgcaagaagaattacaacaatagttaaaaaacagatactgattttgcttttcatattatcacctcaaaatcagtatctgtaaatttttgttatttattcaattttataataaatgacatttttttgccacttttatgataagtgtgcccttaggaaaatgtctaagctcatcctcagtcagtcccttgagtaaaagcagcgccactgcatatgagataaccgcaatgattgcagcaagaatgaaggcgataatctcaatatgacaggccttgtaaagtataaagtatactatatacgaaataactcccattatgagcgagctgatggcaggtatgataaaggtcttttttatttcctgcttaaagccgctatacttctttaaagccatgctgttcataaaacacatgagcaatgcaaaaaacgtattggcaagcacaactgcatgtatattgagtctgaatatgagcataagcagtatgagtactatgacatgcgctacaatggatatcgcagcgttgattacaggaaccttgagcctgtcaattccctgcagcagtccgttggacagagtggaaagcgagtaaaatactaccgcaaccgcaccgacatacatcataagtgatgcctcagcatttgttgcacgggtgcttgagaacagtatattaaatattggcagtccaaacacggcaagccctactgcacatgggaatgcgacaaccatgataaagcgtgtggaaagattaatctgtcctctcactgcctccatatcgtccctgtgatatgcacctgtaagaaccggcacaaaggatgctgccatagctgatgctatggatataggcacattgattaaaagcttgtactttccggtgtatacaccccaccatacgtctatatcattctgagtgtatccctgaagcagtgcaacctgcttgaaaataccctggtctataataccactgatattgtatatagtagtacttaaaagcaccggaataaccgtaattacaagaatcttcattgtgtagccaaatgagctcaccctgacatttcgttctcttttcatctgcctcttgaacaccttcatatagatagcaaagataaatactacaaataaaagagccgctacagagccaagcactgttccaagtgtaccgcctgctgcaccgtaggcagcggcatagtgttccttgtcaccaagtactgcaccaattcttgtacctgtacggtagagcacgtaggctgcccatacactgactatggcattcactacctgctctattatctgtgatacggcacttggcatcatggttcccagtccctggaaaaagcctctgatgacgccaagcactgcaactatcaaaagcccgggagccagtactcttaaggcaaaaatactgtatggtgtgttaagaagcgttgttgcaaaaaaattgccaccaaaaaacagtatgagtgcaactgttgtgccactgatggttgcaaaaagcagagcgcacttaagtatctgatacgtagcagtccgcctcttttttgccatctgggctgaaaccatctttgatacggcaagcggtaagctgtatgatgatataatcagcatgacattgtatatttcaaaggctgtggaataatagccgattccgatatcgcccaatatacgctgcatcggtatgcgatatatgagtcctattattctgcttatgatagatgctacggcaagtatagagccctgtactaaggcattgcttgccccgttattttttttagacatttataaatcctctgtttcaattgataaccagcttaaatattagcgtgttatacctaaagcgtcaagtatttttctctggtgctcttccattacggccgcctcatcagcctccatgtggtcatatccgaacagatgaagcatgctgtgtgtaatcagaaaggcaaactctcttttttcgctgtgtccgtattctaaggcctgctcctttactttgtcgacggatattataatgtcgcctagcatgacctctcctgtatcaggattgaaatcatcctcattctcatctgaaaggaaagaaaaatctccgggtgtttcatatgaaagcatcggaaaagacagtacatctgtaggcctgtctatctgtctgtactccttattgatggcatgtatcccttcattgtctgtcagtgtcaaattaacctccgcctcatacggaaagctctcatgctcaagtgaagcagaaacaacagcttctgcgaccttttcataatcaaaattaaaattgcattctacttctttttcgataaaaaaactcatttaagcagctcctcctttgtaagatagtctcgtatttttaaaaagtgattcatggaaagccctgattcatcatacattcctgagcttgacagctcatttaatgtctggataataagtatctcgtgattccattcactgtctgccacatcgtttttgatatgatcaagccttactattaaagcatcgaccatatggatgagtgcggattcaggggtctgtgggtgtcttagcttgccatagtactcatagagtatattggtcagcttttcaggaaaatgcatagctaatgcctgttccactccttccatgacgcttttatgcctctgccactgccctatgcggtaataaaagcctcctgctgcacatagcgctgtgtccagtcctgcagcctttgcagcctttatggcaatcgtcgatacgaaattgccatgattatattcagaaaaattgtgctttttaagctgctttacagcaggaaaatcctcctctattatttctataagcctgtcatttgtttcatcagcgctaagtggcttaaataccctggcacaaatgatgccgataagcgaaacaatcatgccgcttacagctccggcaataataatggaaacagaaaactcctttgttgacatataatagaatatgcccggtgtcacaatgctcatactgattgtgatcagatatatacatatctgaagcttgtcctcctttagcatctttgcaaggatagcacctgtgattacaagaagcagctcacatacgagctcaaagcagtcgccggatacagtgattgaaagcaatatacaaaaataagtaccgcttataaaagccaggaactcattgccaatcagacaaagcaatataggaaaaatcatcaccggcctgctgtacagtggcataaaaccgcttatgatacacactacagagcaaatgataaacgcaaacgtaaacctaagataatcagttcttgagttgttcgacagctgcagtgtgttccgctcgtactcaagctcaaataaaagcagcatataaaatatgatatctaaaaaacccatgcatatccactcatccggatatacatcaccaagcagacacagcacaaatgaaagagccaagattgatataaaaattgatattagtgatacaacccttctcaattgctcttcctctgctttcttgcagtctttgcagtctgcttattttcataatcatcatatgcctgaacgattttttgtacaagcggatgacgcacgacatccttgcttgtcagattgcatatgcctatatcatctatgtttttaagcaccctaagtgccacatcaagccctgattttgctcccggtgcaagatccttttgtgtagcatcaccggtcacgacaacctttgagccaaagccgattcgtgtaagaaacatcttcatctgtgcaggcgttgtattctgtgcctcatcgagtatgataaatgcattgtcaagtgtacggcctctcatgtacgcaagaggagccacctcaataaggcccttttccatgttgcgctggaagctctcagctcccattatctgataaagagcatcgtacaatggtctcaaatatgggtcaatcttgctctgcagatctcccggcagaaagccaagcttctcgcctgcttcaatcgcaggacgtgtcagaataatacggcccacctgctcatttttaaaagctgttatggccattgccatggcaagataggtctttcctgttccggcaggacccatgccaaacacaatcatctttttcctgattgcatcgacatattccttctgtcctatggtttttggctttacaggcttgccatttattgtgtgacaaatgatatccttgtcaatctcaacaatctcactgcctctatgctcctctaaaagtgcaagtgcataatttacgttctgctctgtgatgacgttgcctctctcagccagcgcaatgagctgctcgaacacctcttttgccccatcaatatttccctgcgctccgataatctttaaggaatcatctcttaagacaagcgttacgtgcagtgtgcgctctattttcttggcgaatgcatcaaactgcccaaagacgtttggtatatattcgcccggtatttttatagatatttcatttaaactcattagctcatgtgcctttcaatcaaaatatttttcattataacataaaaataaaatttgtcataatttacctataatttattccctctgatatatcaattttcatggtatttttttctatgtatatactgcaccacgtgatatcgggatatttttcctcaagcttcttttcaaggaggctgtaatctgctctcttgtggctgcctattgttacattttcactctccataaaggagatgaccgactcatcatacgtgaaacggtttccttcaggcacaatgtgccagattctcgtacagatgagtgcatgtatacaaaaaacgccggtaattgcagccgtaataatacgtattttatatagaaatgctcttatcgcaaagtatccctgtctttttatcacgagaagccttgtatgcgtctttttcaggtgcggcttcattagaaaaatatcttctgtaccgcagcaggcctcatattcctttggacttacatatttaaggttccatatttttatatggtttgccgtgcacagatttatgaagcgcctgatattgcagcctgtcagccttactgttgcataagctttaatactcatatataacaccctttaaatgaccggctattattattaaatcctttgtaaattcctttatttcaaggcggctgccggatatttttatggtactgtctgctgcccttacagttacggccttgtccgaaaatgacagaatacccttgtggttttctatagtcaactcattataaccatatgctgttacaattggaagccccagcactatgtcctttggaagctcgaacgaatcagttactttttgcatcttcatatattaacatatgtttatttaggctgaattatgccggttatttgtggtacggctcattattgctgatgcgaaacgacctgtaaatctgttccagtaaaattacgcgcatgagctgatgggggaatgtcattttagaaaatgaaagcttatagtcagcgcgctttaatacatcatcggacagccccagagagcctcctattacaaaaacaagatgacttttgcctcctgacataagcttatccatcttctgtgacagctctaccgaatcaagctgttttccatctatcgccagacaaaatacatatgcatcgtcttttatatttttaagaagcctctcaccttctttattttttacgatgtctatctctgtctgtgtggcctgttcgcttgtcttttcatcggaaacctcaatgatttcaagcttacagtaacggcttaggcgctttgagtactcagcaatcgcatctctgtaaaatttttctttaacttttcctacacataatattgtaattttcatcgtttcattataacatataactataattaaacaatatggaggccgtatgaaaatatacgttgatgaacaaaaacgatacgaggatacaaaagcaaccggacagtgcttcaccggagtcggtgcgatagggcttattgctattgtgctgcttgatacaggagttataaagcttgccgctttagactcggtaaacaagctcatggtttctatcgtaatggggcttgttttcttgatattttttatcataggaatgaagtcatttatggagcttaaggacatttcaaaaaaaattgaccgtaataattccctcgaagaggaaatcatggaatacgtgaccgtcactcatagggacgagcttatgactttagcgtcatctggtgaaaaagaagatgcctgctcaggtgatttatactacaagagagctgagcttatcacatcagtcattactgaaaaatacagcctgcttgaggaaagcttcctcgatcatatggttgaagaaatttattctaaaatttatagtgatattgtcgaagaatagtgctataataataacaatttattttttatgaggtgaacaaaatgaaagaactgcaagatcgaattctcaaggatggccaagtaattggcacaaacatcttaaaggtcaacaaatttatcaaccatcaggtagatccggtgcttatggagcacatcggtgaggatttcgcaaatcactttgccgataagggaatcacaaaggttgtcacaatagagagctcaggaattgctcctgcacttatggcagcagccaagatgaatgtaccgcttgttattttaaagaagcagccttcaaagacattacataatgatttataccagacacaggttacttcatttacaacagagaagagctatgagcttacactctcacgcgatgttatctcagaggatgacaatattcttttgattgatgatttcatggctgacggagaggctgctacaggtgccatcagacttcttcgcatggctcacgctacagttgccggtataggaatccttattgagaagtcattccagcctggcagaagaaagatcaacgagcagggctatgaggtttactcacttgcacgtatcaagtacatggatgagtatcagatagattttattgaagaaaattaaaataagatttaatatttaaaatcaatacatattatacacaaaatccactaccctatttacagatttatgagtctgtcaatgagtagtggatttttattattgttaaagtatatgttttatgctaaactgccggattatgctccgaaatcgaaaagtgaaagctggtttgactccggcagtgaaccaagtagtcccaaatctgacatgaggtctacggctgttcgcgatacgtgagttctctccctgaaatcgtcctttgagaggaacggtccgtcctttgccgcttccgaaatataaatagcggcattgtcgcctagtccgtcaatactgtttatggccggcatgagcttaccgtcaattatctggaaacggttagggtgagctctgtatatatcaagaggcatgaaatcaaagcctctggcatacatctcctgtacgatacgcatgtccttaaatacatcctgctccttgtttgacagcgtgtcttttcttttcttatagtccctcatgtagttttcaagtcggtcctttccctgacacataagctcatatgaaaagcctgtggcacggattgaaaagtatgctgcgtagtatgcaagcggatagaaaaccttacagtaggcgattctccatgccatcataacgtatgccgcagcatgggccttagggaacatgtacttgattttctcgcatgaccagatataccagtcaggcacaccgtgtgccttcatatcctccttccactgtggccactgagggcatttgcccttggcaataatgccctttcgcactttctccatgatgttgaaggcttcctcagattcaagtcccatggaaatcagatatgtcataatatcatctctggtacagatacaggttgaaatggtagctgtgccttcctcgataagagtctgtgcattgccaagccatacgtcggtaccgtgtgataatccggcgatacggatgaggtcagaaaactcctttggctttgtatcaaggagcatgcccatggcaaaatcggtaccaaactccggtatacctaaagctccaagcggacatccatcgatatcctcaggctctatgcccaaagcagaggtgttctgaaacagtgacatgacagccttgtcgtcaagcggaatctttgttgggtcaacacctgtcagatcctgcagcatacgaatcatggtaggatcatcgtgtccaagtatatcgagctttaacaggttgtgatcgattgaatggtagtcaaaatgcgttgtcgtgatgtcaacggtcatatcattcgcaggatgctgtacaggagtaaaggtattaatctcctcacccatcggcagcacgactataccacccggatgctgtcccgtagtacggcgcacaccgacgcagccctgcactatcctgtctatctcgcagttccgctttctgacaccgcgctcctcataatagtttttaatgtatccaaatgcggtcttgtcagcaagtgtacctatggttccggctttaaaggtctggccctctccgaaaataacctcggtatatttgtgtgcttttgactgatactcaccggagaagttcagatcgatatccggctccttgtttcccttgaaaccgaggaaggtctcaaacggaatatcaaagccctccttgcttaacggtctgccacacttaggacagagcttatcaggcatatcacagccaccacggcctgaaaatgcctgtacctctggtgaatcaaaatcactgtatttgcagtgtgtacacaaatagtgagcatgcaacggattaacctctgtgatacctgacatggttgcaacaaacgagcttcctacagagcctcgcgagccaaccaggtagccgtcctcatttgatttccacacaagcttctgtgcgatgatgtacattacggcatagccgtttgaaataatagagttaagctctctgtcaagacgctccttaactatcggcggcagcggatcaccgtacatcctgtttgccttgttatagcagatttcacgaagcatgccgtcagagttttcgataaccggcggacatttatcaggtctgactggtgaaatacgctcacacatatctgctatcttattggtattggtgatgactacctcctcagcctttttgcttccgagatactcaaactcctttagcatttcctctgtggtccttaaataaagcggagcctgctcatctgcatccttaaagcccttaccggccatgataatacgacggtatacctcgtcctcgggatttaagaaatgtacgtcacaggttgcaacaaccagctttccaaattcctctccaagctttacgattcgcttatttatatcgataaggtcatcgtttgaagcaatatcggaatcctcgtcacgtatcataaatgcgttgttgccaagaggctgtatctccaggtaatcatagaaattcacaagtcttgtgatttcctcctgtggtcttccgtttaaaatagccctgtaaagctctcctgcctcacaggctgagcctattaaaagcccatcacgatacttgttaaactctgattttggtattctcggtctcttattataatacttgatgtgtgacagcgaaataagccggtagagattggtacgcccctggtcacaggttgcaaggatgatggcatggtatgtaggcatcttccttatcatctcaacagatgattttgccagggcatttacctcatctaagcttgatatgcccctgtcctttagcttttctatgaatttgacaaatatctctgcggtacatgcggcatcatccaccgctctgtgatgatggtcaagcgagatgtttaaagccttggccactgtatccagcttaaatctgttcagctgcggcagaagaactctcgcaagagccaccgtgtccacaattgtaggattacactccatgccaagcagcgcgcagtttcgctttataaagctcatatcaaagtcagcgttgtgggcgaccatgatgcagtccttgcaaaactccataaactgtggcagtatgacatccaccgttggcgatgtgataaccatgtcatcccttatggaggtgagctcctcaatcctgaacggaataggtacctcagggtttataaatgtggaatagcggtctacaatctcgccaccgatgaccttcaccgcacctatttctatgattttattcttttccggagaaaagcctgttgtctctatatcaaataccacgtacttgtcatccagcgactgaccggctgcattctccacaatatcctttgtatcatcgaccagatatgcttccacaccgtaaatgaccttgaatttgtcatccacagtatggttagcgtcagggaatgcctgcacatcaccgtggtccgtaatagcaatggccttgtgtccccagcgcatggcacacttcacaatatcctttacgtcagacacaccatccatgtcactcatcttggtgtgacagtgaagctcaacacgtttttcggcagcagtatcctccctctttgaggtaaagtcaggtatctttttaagcccgactattgagcttattgataaatcactgtcatatttatctacagtcacaactccctttgccttaacaaagttgcctggggcaatatatgcaagaatatctgctacgtcatcatttctggcaaagagcttgagcatgatggtgtctgtgaaatcagtgaccgcaaacataatgatggtcttttcgtttctgatttcgcgggattcaaccgtaagaatcttgccctttattgtaacctcaccgataggaccgtcaatcttttcaatagcaatctcctcatcatcaaagcttcttccgtatacgatatccgggtcattgtcatatttacgcctgaaatctcccttgcgctcgaactttttctcgaacttcttttcaaacttcttctcaggctttttatcagtgcctgtcttcgcttcattctttttatctgaggctttaggagaatctgatgtgccactcttttttgtatcagatgcattctcactgcctcctacaaacattgcaccgtcatcgacagccactttagcatcttcatcaccgtcatcctttgccatggcaaatttagtgcgggcgacaatattttgcacctcctgctcaatctgcttgtcagcattctgacggtatttgctgatctttggtttttcgtactgcagattaacgataaaatccatcccacagcgctcgcagaacaccttctcaagaaattctatgaccgtattgcctctggtctttgctattattgtctcctcaagtgtgactgtgacatgtgtatcgtcggtaaagctccactttgaggtgcgcagcagattgtacaaaagcacactgtgactgtttatttcgtcaagaatactgtcaaaatagacatcaaaaagagtcttcggtgtgtactgcgaagacaactcgtaagactctataatttttactgtgatatctttacttttaaatatctgttttttaatgctttcctcaagcttccagatattttttttgaaaataaggcgttttgcttttacatatattttgtaaaaatctcttgcatggtttacggaaattctggtgacatcagcattctccagcagattctccatatccttgtccagcttaagtgtagggaaaacttccttaaatgtttttgtcaaaattattcaccccaatggtcaagctcatattttaatgcacccaaaagctcgctctcaggcacctttttaaatacctcaccgtgctttatgataagaccctcgccaattcctccggccacgccaagatctgcttcctttgcttcacccggtccgtttaccacacagcccatgacagcaacctttatgtcaaggtcatatcctgaaaccattgtctccacctgatttgcaagcccgataagatctatctgtgtgcggccgcaggtaggacatgaaacaacctctatgccaccctttctaagaccaagggttcttaaaatgagcttggcagactttatttcctcgagaggacttcccgtgagagatacacgtattgtatcacctatgccctggctaagtatcagtccgagtccgatagctgactttatattgccgcttattattgtgcctgcctctgtgatacccacatggagcggatgagtagtcttatctgaaataagctcgtgtgctttcacacacatcatgacatctgatgatttgatacttatgacaagattgtcataccccatatcctctatgagctttaccttatccagagcactctccacaagtccctcagctgtcacaccatgatatttctctacaaggtctttttcaagagatccactgtttacaccgacgcggataggaatatttctctcttttgctgcatctaccacagcccttaccctttctgcgcttcctatgttgccgggattgattcggatcttgtcggctccgttttcaatcgcagctattgcaagcttgtaatcaaagtgtatatccgcaacaagcggtatgctgatttgtttcttaatatccttaagtgcctttgcagcctccatcgtaggtacagcacaccggattatatcacagcctaggtcagtcagtgcgtttatctgcgcaactgtgtcagctacattctcagtctttgtatttgtcattgactgtatgagaatcggattaccgccaccgattactttatttccgatttttactatttttgtctccatgtgtatatctccaatctgttataaaatcagactattagttttctgatatcattgaacatgacaacaaccatcagaagaagtaaaagcactatgccaacgagatgcacatagccttccttctcagggtctactctttttcttcttatggcttcaactatcaaaaatacaagtctgccaccatcaagtgccggcagtggtagcaggttcatcacaccgaggtttgcagaaatcagcacaccccagtttagcatatttaatatgccaagccatactccggacatagaaactgcctgctcataggtgtctcccatgttttttacaatgccgacaggtccgcttaagttatttacagaggcagccccggtacagagcattttaagcccctctattgtcgtatagatgttgtatttcacctcgtagcagctataaagcagtgcctttcccaagccgggctttgtacgctctcccgacacgttaaagccgtacagatacctctttgttgtctcgtcatatttaggcttcaatgtggtggtgtgctttttgccatccctaaggtaggtcacatcaactgtttcaccttcgtgaagcatcgagtagaggcttatctcgcggtaaaagtgtatattcgtattgttcagctttacaatctcatcaccggccttgataccggcctcctcagcggcataaccctcaataacaccggcaagctttggactgtcatagcctacagagtagatgataatgagagcaaaaataaatgccatgataaaattaaaaaacggtcccgcgaaaacaacgcttatgcgcgcccacacggatttgttgttgaaagccctgtcatcacctgagctttcatcctcgccctccatgatacaggctccaccaaacggaagcagctttatggagtatttggtctctccacgctgtactccaaaaagagtcggtccaagtcccagacaaaattcattgacctttatgccatttgctttagcaagccagaaatgtccgagctcgtgaaaaattactatgatgctgaataatatgattgcaataataatactaataatgttcaaaattaccaccttttactgatatagtcatatgcgcactgctctgtatcaagtatctcatccactgatggattttcaataaataatgcattttccatgcatgcctcgattatttcgattatttccagatatttaatctttttattcaaaaacagtgcaactgctctctcatttgcagcattgaaggccgtaggaatattgccgcctgcctttgcagccttcatggcaagagcaaggcctttaaaggtatcaaggtccggggcttcaaaggtcagatccttaagcttaaacagatcaagtctgtcacctgaaagagccggtctccttggataatacagggcatactgtataggtatacgcatgtcaggagtaccaagctgtgcaataacggctccatccgcatactcgacagccgaatgaatgacactctgaggatgcactacaacctgaatctgtgacaaatccacatcaaaaagccattttgcttcaattacctctaaacccttattgaccatggttgatgaatcaatagtgatttttttgcccattgaccagttaggatgctttagagcgtcctctacccttatactctcaagctcagagagctttctgcctctgaacggacctccggatgctgtcagaagaatctttttaatcggattcattgaatttccctgcagtgactggaagatggcactgtgctcactgtccaccggaagaatggacacaccatactccttcgcaagcgggataatgatatggcccgctgtaacgagggtctccttatttgcgagtgcgatggtcttttttgccttgatggcggcaattgtaggacggatgccaagcataccgacaattgcggttacaactatgttacatggctcaatggtggcacatctaatgagaccgtccatgccatagcctacttcgatgtctgtatccgcaaggcttgtgcgaagctttttggcatcgttttcatcacttacactgacaaactgtggcttgaattcccttgcctgtttctctataagggagagatttctgccacaggaaagtgccacaacctgcatatcgccatgctctcttatcacatcaagtgtctgtgttccaatagagccggttgaaccaagtattgatatttttttcatgataattcctcgatttatatttttctcagtggttctgaatagttaccttagctttttgttttcaatggttcttaaaagttacttttaacttaaaaagaagctagccagataataaatgattggtgctgtgataatcatgctgtcaaagcggtctaaaataccaccatgtccgggtatcagatgtccgtaatccttgatatcataattacgctttatggctgatgcacacaaatctccaaccattgaaataaggcctgcaacagcagatataactgcaagtatagcaatctctgtgccgtctatattcatatgatttctgaatataaagcagtataaggctgtaagaagcgcactgccgagcacaccacctactgcaccctctatagacttctttggtgaaagctttggtgccattttgtgctttccaatcagcactccgacacagtaggcacacgtatcacagccccatgagcataaaaataccaaaaaggcaaggtaaagcccattgttaagtgtacgaatctggtaaacatatgaaagcattgctcccacgtaaaacataccgaaaaaagctgccatgagctgctttgcatcatatttcgggtatgaaagcacatacacaaacatcagtatgataagaaagcccatgaaaagcatcattacatcaggtatgaagctccaccttaagttgatgtaaaacaaaatcaaagcaatatacggtacaaccgataagagcgatttttcaaatttaaacaccctgaaaagctcaaacatacctatacacgagatcagaagtgtagaaaaaagaagcacctcgtttccggttactataagaaatatagcggcaattacaagaactataccgctaagcagtcttgtcttaaacattatttatcctccgtgtcatttgtttcttttaatccaccaaagcgacggtctcttttattatatgcatctatagcctttttaagctcatttttatcaaatgcaggccacggaacgtctgtaaaataaaattcagagtatgcaagctgccagagcaggtagtttgacaggcgctgctcaccacttgtgcggataagtaaatcaggatccggaagttctcttgtgtcaagatatgatgcgaatgtatctgcatctatatcatctgctgacagctttccattatcatggtcagctatcatatgctttacagcacgtatcatctcatctctgcttccgtaattaattgcaatagtcaggttaagacctgtatttactgatgaaacttcttcaaggtttcttattttctcctgaaaattctctgaaagcctgcttatctcacctattacgcgcacacgcatattgtttttattggcagtctttatacagtttttaagatagctttcaagaagcttcattagtgcagcgacttcagactcagggcggttccagttttcagtggaaaaggcgtaaagtgtcagatatttaacgccgaggtcatttgcagccttacatatattctcaacatttttggctcctactgtatgaccgtagtttcttggcatacccttacttttggcccagcggccgtttccgtccagaatgattgctatatgttccggagtactcatattttatttcctttcatttatgcatattatatatttacaatcatgacgcatcatttatttgctggtcacacagttaagtgtgaacagtaaaaccgggaataagcaaataagggacacgaataacatgtcccttgtttgtatacgtgatataaatactatacagtaagtatctctttacattttgcgtcaaccgcagcgtcaacctttgcgacaaacttgtcggtaagcttttgagcgtcatcctcgaggcctttaatctcatcctctgaaatgccttcctctttgccggtcttcttgatgctgtcgattgcatcccttctgatattgcggacagcaaccttagcttcctcgccctttttcttgatgtcctttgcaagatctttacgtctctcctctgtgagctcagggaaaacaagtctgataagctttccgtcgtttgtaggattaattccgatgtcagagcagtttattgctttctcaatctccttaaccatagaagcctcccatggctgaatctgaatcattctaggctctggaacacttacattggctacactctgaattggtgaaggtgtgccgtaataatctacacgaagcttgtcaagaatatgtggattggctcttcctgcacggatgcctgcatactcttcctcgagattatttaatgttttttccattttatcctggaaagggtttaatcttgaatccatattatcctcctgatatgcattatatgcaatttactatacagtaacctttgtaccgttaaatttgcctgtaagagcatttacaatgctgttttcctcattgagtccgaatacatacataggcatcttgttctcaaggcacatgatagacgctgtgaggtcaactactgcgagcttcttctcaacaacctcttcgattgaaagctcatcatacttctttgcagcaggattggtctttggatcactgtcatatactccgtcaattgctttggcaaggtaaataccatctgcctcaatctcaattgcacgaagcactgtggctgtatctgttgagaaataaggatggcctgtaccaccggcaaagaaaactaccatatcatgtgcaaaatatttgtttgctctgtccttagagaaaagctttgtcatgttgccacattcaaacggagtgagaaccgctgtcttcattccaacatatctgaaaatctctgatacataaatgcagttcataactgtagcgagcataccaatctggtcagcctttgtgcggtcgattgtctcacttgttctgcctctccaaaagtttccgccaccgataacaatacctacctgtgtacctttatcaacaatctgtttaacctgttttgcaacctcaatgactgtagcctcatcaaagccgtggtgcttatcacctgcaagtgcctcaccacttaattttagtaatattctactcatatttatttaccctcgaaaagtccctgaacatcgatatcagcgtatgtctgagaacagaagccctcgataacggcaccgttgttaatctgtactgaacgtgacttgatattacccatgataactgcagaagtatctactacaacaggtccctgaacatctatatcgccctttacagctcctgcgataactgctgaagatgctgagatattgccgatgataacagatcctgcacctatctttacagttcctgttgaaacaatttcaccctcaaccttagctacatcagcgaaaaactctgatgaatttgtgttgccgctgactgttcctgtaacaacaatcttgccgttacacattacatttccgttgatggttccctgaatatcaaatgatcctgatgactgtaaatctcctgtgagtacagtacttgctgtgatgactgatgtttcgtcctgtacatctcctgataaaacgttattgtttactggctgtgtatttactggctgtggtatatcattcatttgtggtatctgctcctctttttgtgtattgattgtatgctctgcaaaattttcacttggagttggtcttggtacagttgtctcctgtggctgctcctcgacatgctcaagtaatccgtcgagctttgaaagctctgatgcaacgtcaacattctctcctatagtatcaactacaagattgtcagctgtctgagcctttggctctacttctttctcaggcacatctccgggtacaagctcgtttactgcctgcgaaaaatcatccttaaattctttgaataatcccatgaatatttcctccatttattatcttatccaacagtatctgatttgatatattgaactttatatgtattattatcaatcggcaatatctcggcaccctgcgcttttatgctttcaacaagcggctcaattgcctctgccgtggttgatctgtttgaatcatcatgtaataacacaactgaattgtcatatttggcaatacccgaggtgacattattgacaatatcatcgacactgcaattgtcagctgtatctcccgaattgacattccagtcaaaatatgtgatatgctttgaattgagtatctttacaagttcaaccatgtccacattactaatctggttcatgctgccaccaggaaaacgataaatatccggtgctattccagtcagattggtgatataatcggaaatctgtgtcaggtcatcggtaaatgcctctgttgattcataaattttactgtatgaattactgtaggaagccatcgcaatagtgtgtccgtcctgcactatgcgcttataaacatcatcatatttaccggaggtatctgctgtgacaaagaaggtagccttgacgccacagctggcaagggcatctaaaatggcaccggtgttatcaccgggaatacaatcaaaggtaagatacacctttcttgtatccccatcatgatacacattgtcttttgactcaagctgtttcacgacagcctgagtttttacgccagagctttcatcatcagaagcggtgtcaccatcatcagactcagtaccggtaactgtgcttgatatagctgtatttaactgaagctcaagcttgtatattctcgaattcagtttgacaaccatgatgcccagtacaactatggcaaggatagatattgccatccatattgctatagtcataataatacttgtcttaatccggctcacacgtttgcgacgctcctgctgctgtctggctaattcattatcctttgagtccatatgcgtcccccgttatgattggttttgtttcctcttactattttaccatatttttatatcttgtaaagataaaaaaattccgcaaaagtttaaattttaaacttttgcggaacagcattcgtttaatcagtataaagatacagtttagactccagccatctgggcagcaacctcagcagcgaaatcttcctgcttcttctccataccctcacctacctcgaaacgaaccatctcggtgattgtaagatccttagaaacagactcaagatattttgcaactgactgctttccgtcctctgccttaacatatgtctggtcaagaagacaaatctcttttaactgcttagatacacgaccctcaacaagtccgttgaacatcttctcagccacgatagactccttgtctgccattgcaagctcaccaagctttgccttagcagcatctgataagaagttccatacatagttcatgttgttcttgtgctcgttgaagttgttgatatcatcatcgctccaaagcttctcattaatagccttgtcaattaacttattaagaataggctttggaagtgttgtagcatcatttaatgcactgtcaacagtgatctctctaagctttgcaagctcttcatcagagatatcgtttctgctgatgtactgtgggttcatagctgcaacctgcatagcaatatttgtgattgcttctttagccgcatcgtctgttgcaccatttgctgcaatgataacaccgattcttccaccaccatggatgtaagaagtaacaacatcacctgtaacctttgcaaatctacgaacagataacttctcaccgattgtagctgtcttctctacaagaagctcgctaagtccgtttgtagcaagaagagcgtcgatatcctctccatttgcaccaccatttaagccagaagcaagtgctgtatctgctacagtctgaacgaactcctggaatgtctcgttctttgcaacgaaatctgtctcagagttaacctctgctacaactgcaacgtttccgtttacagcaacacgtgcgattccctcagcggcaattctgctctgcttcttttccatcttagctgcaccgctttttcttaatacctcaacagcggcatccatatcaccgtttgtctcagttaaagcctttttgcagtccatcatacctgcgcctgtcatttcacgcagttcttttaccatacctgctgtaatagccatttgattatcctccgatattaatgtgttttattcctcaactgtctcgtcagaagcttcctcagcagtaacctcttcctcagctccctgctttgcctcgataacagcgtctgccatcttagatacgattaatttgacagctctgatagcatcatcgtttcctgggataacataatctaactcgtcaggatcacagtttgtatcagcaatacctataagagtgattccaagtgcctgagcctctttgatacagatacgctccttcttaggatctactacaaatattgcatcaggaattctcttcatatccttgattccgccaaggttcttctcgagcttctcccactccttcttgagtgcgataacttccttcttaggaagaacatcgaatgtgccatcctctgacattgtctcgatagctttaagtcttgcaatacggctctcgattgtgcggaagtttgtaagcattccacctaaccatctctcgtttacatagtacataccgcaacgctctgcctcagtcttgattgcatcctgagcctgcttctttgtacctacgaaaaggattgtaccaccctgagcagcgatatcagatacggcatcgtatgcctcatcaacctttcctacagacttctgtaagtcgatgatgtagataccattacgctctgtgtagatgtaaggagccattttagggttccatcttcttgtctgatgtccaaaatgaacacctgcctcgagtaactgtttcattgaaattacgctcattttatttacctccgtttggttattaatcttccgtgtgtttccaattagatcagccaccggtaagcgttatccggcaccggcgatcatccgcacacgtgctttatagtatttaagcctttggaattataacataccaaaggcttatatgcaagcaaaaaatttatttctgtgtcagaatagtgattatatcatcatacgatgctccctgtgggataacgtgctcaccatctgctataaaatgatcagcacccttttgtcccatatatatacgaaattgttcagcatcatccactagattgagagctttaagcttttctgcaatggtgcgacatgtatcctgacttgttactgaaattgtgtatgttgtaacagcatcctgtggctctacagtctcctgctttgcatccgctgccggctgtgtgtcttcctgctgtgtatcttcctgtgctgtttggctgtcctgcatctgactatcctgttcagtttcggctttttgggaagaagcatctgagtttgcagcagatgagtcagtcttttcactattatattcgtctgcgactgtcccggaaatattctttgcttcaaccataccgagcgttttggctttttctattatttctgtatcagacatggactgcttattgtcgtgaaaaccaatcatcataatgattaccgcaaaaataatgcctagaccaagtccacgcaaatagtattttaatctcactttatttgccctctttatataaatctattataagctttacctcgccggtaccaagagacaaaagctttgctatctctacattgctcttgcccgatttataaagcttaaggatttcatgtgtgtgatttattatatcagcatttgcgctgctgcctgcgggcgtacccaaagcagcatctgatgccttgaccgatacagaggctgctgtacctgctgtagctgttgcacctgcctttgacgcaggggctgctgaagcaggctgtgttttaatgatacctgaaatatctatacctgtcacctgcttcatgtcaggctttgtatcctgctgcattgtgccagacttaggttctgccggcttttgcacggctacagacggtttttcagccctctttgcagagtctgcagaaagcggctcgaaggagcttctgagtcttgatgatgctttatctatatcgcctgaaagccgtgtaagctcatcatgcttgtcatttagcatactgtataaaaacattatttcattatgtgccttgtttatcgaatcaagcactgtatcagaatattcatttatcgccattattttggaatttgcttccttttccagacttcgctttgtctcatcctgcttttgtgttatttcctcgtccaaggcatcgcttaagtcctttttggcggcagtcacttctttttcagttattatttttagttcctcagcactcatatcagctattttatccaaatccttatgtgaaagcttgtcatttaccataaagcttcctataaggaaaacaacacctatgatgatgagagttatttctaatgttgtcatataaacctctgccctcttattcgtttgtaagtatattcatataagggcccatgaccttacgcattttaatcagtccctttgtgtgaagctgtgatactcttgattctgaaacctcgaggatattgcttatttctttaagggtaagatcctcataataatataattcaataaccctgcgctccttctcggtcagattgtcaagcgacttaacaagcattgttttcagctcttcctgtgtaacaatatcctccggctgtgcataatgtgaattatgtgcagcatccatgacaggctcaggtcctgactcatcaaattcatcgagagatacaacatttgttactttaagctgcgactgccagctgcaaagctcatcctctgagatagaaagctcttttgcaaggtctgcgtcatttgctgttttgccggtacgaagttcaatgttctttattgcctcgtctattttcctttgtctttgtctgactgttcttggaatccagtccattttcctgatctgatcaagtatggctccacggattctaaggcttgcatatgtctcaaacttgacatttttttcaagattaaacttgtctatggcatcaatgaggccaaatatcccatagcttaccaggtcatcatactccacattatgcccaagatacatgctgaggcgtcctgccacaagcctgaccagctgtgcatattctattatgagctgttcccgtagcttgggcgtgggattcttttgatattcctcccacagcttttccttttctatagctttcattatgccccctgtttaatcagtatattattctgctgctagctaatctgcttatcatcgtcattatcattatcaatgacttcggaatcatcagtcttttcttcggccgcttcagctttcttttgcctgtcttccattgccttaaatgcacagcttaggattactttaagtatcgctccgattatatagaatactacaagcacagttaaaagtcttgttgtaaagctcatcagatcaacgccctgccgcagggatataatactgcatactaatccggctaaaagcataacaagagatggtaataaattattcttcatgttaaatcaccttttgctcttttccgactgctttgatgatatagtcaccggtttcacagtcaagtataacagttcttccgtaattaagaccggtatcctgtgccttcagaggaattttcagctctgcaagcacgtgtctggccatatcggtattgcgatcgccaacatttccgattgtagaattgcctgacatctcaaacatcttagctccaccggcaatctttgcaaccattcgtctgggattcgcgccattttttatcatttgattataaagttccctaattcccgtatcgccaaacttggctatatttgtgttatttctgagtttggtgctgtcaggcagcatatagtgtacaagcccaccgatttttgaagccggatcataaagggtgagccctatgcatgaaccaagcccaagtgtggtcagagaatcaggggctttggcaaccttaaggtctgccattgatactttaatagtatttgccatatggattctcctaaatactaaaaactaattcctaaagccgataaaatattatcatatgaatccggatcaggcataaggataaagtatccgttcatcattatatcatcaccaaactctgtctctataaaaagtgcattgtcaccatattgtccaaactgaattgccggcacacttaatatggaagcggccatatctacagcaatatacggaatggaaggtagtattttgagatttgtcatagttgaaagcgctgacaaatatgcgcctgctattatgttgccaatctccttcatggcagataaatccatctcatcaaaaggctcgttatagtcctgtggtctgcccatcagcttgtttaccagaaagtgtgctgccggaagcttcatgagaaacatcatactgccggagatatcgttggtaacctcaagaaatatacccactattgtctcttcctccggacatatggcatctccaagctttgtcgcatccattaacagaactcttggaacttccattttcatggtagtgccaagcatgccggcaatcgctgtcgtggcattgccggcacctatatttccgatttccttaaggacatccatatacatcgaattgacattatctaaagaaaattcactcattgtattcacccttttatttgttaaaacttatatagtgaggcttttatacctcactatacattgctgcaaatcagttagcgtctttatctgagactattgagcctatttcaaacagagaaatcagttcatctccgtttttacctataccgtttatgaacagctccttgcctgtagatgaagcatctatattaggcttatctatttcatcaaccacaagtgtgacaacttcacaaacttcatcgacgataagacctatctcacccttttcttcaagctttaggataattattctggttgatgatgtatatacatcatcgtccagtcccatttttatgcgggcactcattaccggaacgatatcaccacgcagatttatgatacccttaaagtacttctgcgcctttggcactcttgtaatcttctgcattctgacgatattatcaacatagccaatatcaattccgaatttttcttcgcctattttgactgaaatatattgctttgtttctttttcctgtatatcaaattcattttctggcatgtacttcccctccattacataagtgtatttacatcaagtatcaaagctacatcaccatctccaagtattgtcgctccgctgataagcttgttgccgtttatgtattttcctaaagacttgattacaatctcctgctgtccaatgagattgtcaaccacaagacctgcctgctgatctcccttttggacaattactacagtaagatgatccggctcctgctcctttggctcaatgtccagcatcttatcgaggcggatgattggaataacgcttccacgcaggtgaataacctccttagcctgtacatatttgatatcctttacaggaatatcctctatatttgagatagagccaagcgcgatggcatatatttcatcacggatctcgaccatgagagcctgaatgattgcaagggtaagaggaagacgtacagtaaatgtagtacccttaccaagctcggttgaaaccgatacatcaccacccagctgttcaatgccggatttaacaacatcaagaccaactcctcgtccagagatatcggtaatctgttttgccattgaaaagcttggcataaaaaggaagttgatgatatccttctgagatagattttcagcctgttcagctgtgactatgccacgctcgatagccttgttctttacggcttcggtatcgattccgtttccatcatctccgacctttatgacaacattgttgccctcctggtatgcatttaagaaaatagtacctacctctggctttccacgctcaagtctgacctcattgctttcaagtccatgatcagcactgtttctaagcagatgctgcagaggatctccaatctgatccacaactgtacggtccagctcggtatcttcaccggttatgacaagactcatcttcttattcagtgtacgagacagatctcttatcattctaggatatttctgtgtaacactttcaataggaaccattcgtaccttcatgacagactcatggagattggtcgtaattctttcaagatattcaatctgttcatggaatgactggttattattgttttctccatcagatgagctcatggctacaagagagttctttgcaataataagctcagacacctgattcataagcatatcaagcttttcgatatctactctgactgttcggcttgtagtagcttttttatgagaaacagcctgcttttgagagttatttgcagtttttggctttgaagattctgtctttgcagcaggagtcttttcctctttttcttccttatctgccttttttgtctcttcaggagcctgtgttgtctgctctgcttcaccctccaggtgaaactcggtgatttcttttccctcaaccttatcaatctcagatacgttggaagctgcatgctccaatttatcaaagccctcgcctgatgcaacataaaagctgaatgacaaatcaaacttctcatcctcaatatcctgtgagcttggtctgtaaaccagaatctgtcccagctcctcaactgccttgaaaacaaggaaagctcttgctgccttgagcagacagtcgcttgctacggtaactgtcatgccgtatattttaagtcctgctgaaattgcctcgtcaattaaattcttctcgttgtttgtcagttcgattgtatcaagtgtactgtcagatgcatctgatgaaccctttgtttcagcttcagcagccttttcttgaggctcagcctgtttgcttacagtctgtccgtttgcttttgcaataaaatcgttgagttcctttatgataacctcattatcatcagtaccctcatcagatgtggatttaatattctcaacatagctgtctatagcgtcaaggcacttaaagagcagatcaatcattgagctgtcaactttaattttatcgcttctgacctcctgaaatacattttccatatcatgtgtaaggtgctgcatgcgcttaaagcccattgtacctgccataccctttaaggagtgggcagcacggaaaatctcatttatagtgtctttgttttccggctcctgctcaagagtcatgatacagtcagacaatgtctgaatatgctccgaactttcatcaataaaaatatctagatactggctaacatccattttattttacccccacattttttgtgattgctttggcaacatctgatagtgtaacgacttcatcaaccacgcctgcctcatagatggctcttggcatgccatacacaacacttgatttctcgtcctgtgcaatgacatagataggctttgatttgccaagtgaaagaatgccatccgtgccgtctgcccccatacctgtgagtaccacacatacaacctcatcataattagaggatgtcagtgaatcaaacatgatattggcacaaggcttgagtccgccgataggtggcatatcattaaatgatataacatgtgaagcacctgatttctttatagctatatgtgtaccgcccggagctatatacactactccgtttttaagcacctcaccgtttgaagcctccttcacccgaacctgacttagctcattaaggcgctcagccatactctttgtaaagccggcaggcatatgctgtactaaaacaaccggtgccaaaagttcagccggaagaaacggtattacactttgcagtgcctttggaccacctgtagatgatgcaattgcaactattttattgctgcctgctgccttgtttttgtttacaatagcaccggctttcttctcaacaactgtgacattgcgtgaagcactatgaacaggtgtgattctaacggctgcatgcacaacactgagcagagtttccttaaattggtttccctttgcctctatgatattgtttggttttgtgacgaaatcaaaggcaccaagctctaaagatttgatagcttcatctgctccctcgatggttagagtgcttaccaccactacaggtgtttttatgctctctttctgcagatgtgaaagcacctcaagcccattcatcctcggcatatttatatcaagaataacagcatcgtacttttgtgtacggagcttttcaagtgcttccagtccatccttacatgtatcagttgcctgtaatttattgtctgaattgattatatcacactcaacccttctcagtagtgcagaatcatcaactattaaaatgttagatttcatattattactccatttctcttcgtcttatgcgtctttcctcttcaaacacaaatctgactattttctcccgttctgttatgcggtcgaaaataaactttgaacgtgcaaaatatctgtctgcatagtccaaagactgagtacattttattaccttacaaactatattgaattgttgtgtacactcctcaagtgctaaagaaaactgagccataaaatatgtaccttcttcaagaggtgtgcttagagaaaatctgatgcctcctccgcttatatcaaggataactgatttgacagtattcatatttttgctgtttattgcatgattcttatacatctttttgcaaaactcaggctcactctcagctttatcatcgtatctgacttcataaaagtacatgtctatagtacatggaagtctgaaaaactgacgtctttgtatcttttccagattatttataagctctatagcaagaaaatacatattttccttacgataacgccgtctgactatagcagagctttttagtatagttttgttttgtgtgtatattataaagtcaaattgcgtgccaagctgaaataaaaccactctgccactgtcaacaggcatagttatttcccacatgctgtctgttagcttgtcagaaaagctgctcttatatgatgtgctgttatcggataaaccggatgcaaagatatcaattttgtcacccggaaaaatcaaacttgtatattccatatgtcttcctcttaaattaactattgctttctgttaaaaaaatttgaaaaaatatgtgaaattgttcttttctcatccaaagcagcagattcattatccaaaagtctttttgcaatttcttcaaatgaccgtgcagcctttgaggtcggatcataaattgaaagtatcttctgctgcctgacagccttttcaaccattgcatcagacggcacatatcccagatactcaagacttccgtttaagaactgcataacaacggaattaatcttgttgaacactatactgccatcctcttttgacgcagccctgttggatataactcgtatgcatgcttttgacgggtcgaaatcaggtctcttatacagtgctttaagcaatgaatatgaatcggtgattgaggtaggctccggggttgtaaccagcacaatttcgttgctggccgcaacaaattccatgacctgctcagacacccctgcaccggtatcaattatgataaaatcatacatactgttcaactcatttattgcagagacaatgaaatgaatctgtttgtggtttagattattaagccctacaacacttgaaccggctgaaataaaatcaatgcccaaaggtccgtttgagatgatgctctttatagtctggttttcatatattacatcagcaagagtatacttaggaataacaccaaacatcacttctacattggcaagaccgaaatcagcatcaaaaataattactttctttccgagtctgctgagccaaaccgccagattgacagatgtattggatttgcctacaccacccttgccgcttgtaatggtaataacacgggccggttctatataattttgattacgctgcttaataatatttctaagctgctgtgcctggtccattattgtctgcctccgagtaattgtttgacaatcttttgtgtatcaaatacctctatatcatccggaacgttttgtccattcgtgacatatgatataccggcatcagagtatagctttatatttaacagattgccatatgatgaggtttcatcaagctttgtaaatatcagcttgtaatcgtcaatatccttataggaatcaattatagatataagatccctgtacttggttgtagcacttaagacgagatataccgacttctcatattcaggtgatagacctgcaagaagtgctctcatatcattccgctgtgtctcgttcttgtgtgaaaagcccgctgtatcaacaaaaatcacatctgcctgctcatattcagccaccgcactatttaactctgtggcagtataaatgacagacaaaggtgtatccagaatatttgcaaatgtacgtaactggtctgttgcagctattctgtatgtatcagcagtgataaatgcgatatttttattataattaaccttgaattttgaagcaattttagcaattgtggttgtcttgccaacgcctgtcggtccgacaaagaaaacaactcttggttttttgccgtttacctttatagtttcaggctgaccaaatcttaaaatgagtttctggtatacatttgataaaatcacatcgagactgttaccgggacgtaggaatttctcgatttcatcaagaatttggttgatatatttctcatccacctcattatccagcagtgtcttgtataaaatgcggacaaatttaagttcctgtgcactttggggctttgaaggctccttattttgaggtttatcaaatgtgctttccatcattttggcaatggaatcaagctccttgatttcctgttcaatatcgctggtctgttcagccgcctttggggctgccggtgcaggtgtaggttttaaggtctcagatgcagattttggggcgaatgaaggcatctttatttcttcatctgccttgtaatcaattttacccgggagtgtagtccttgcaagctgcgaggtcgttattgtctgtgtctgttttttttcatccatagccgcagtcacctcatatgttgagcttttgaatataccaaataatccctttggcttaatctccttgatattcataatcacagcatttggaccaaaggcctgctttgcacattcaattgcttcttcttttgtttttccagtgaatttgttaatagtcatttatgcagtcaccattcctaccgactgaagctcaacatttgattcaacctcattgtaggataacacaatgagatccttgaaataatcctcagtcattttcttaaagtacattctaacaattggagatgtaataataatagcactctttcccaaactttccaacttaccaatttctgtttcaacagatttgataatagcctttatcctgtcaggatcaagagaaaggtaagagccctgctctgtctgtttaacagatgacataatttcctgctccaccgcagggtcaagtgtgatgacacttgtggtctcatttgcaggaaaatacttacttgatatagctctctttaagccctggcgcacgtattccgtaagtacatctgtatccctggtggtctgtgcgtgatcggcaagcgtctcaaaaattgtaagcagatccctaatagaaattccctcgctcaaaagattctgaagcaccttctgaatctcaccaagaccaagcagctttggtatgagttcgtccacaatgacaggatttgattccttgagattgttgaccagattctgtacatcctgtctggtgagaagctctgcaatatgagatctgataacctcagtcagatgagtagctataatcgatggcggatctacaactgtatatccaagactctcagcacgctctctttggctttccgtaatccatatggccggaagatggaatgaaggctcaaatgtaggaatacctgttatctcctcctccacatagcccggattcatagccatgtagtgatcaaaaagtatctcaccttctgttacctgtatgccctttatcttgatgatatactgattaggattaagctgtatattatcccttaatcgtatgataggtacgacagttccaagctctaaagcaatctgtcgccttatcattacaactcggtcaagcagatcccctccctgatttacatctgcaagaggaatgataccatagccaaactcaagctcaatagggtcaacctgcagcagtgaaacgacattttcgggttttcgtatttcctcggcatcgctttcagcctgtgcggtctcatcctctatgctctcaataccggcttttttatccagatttttacctgttacaaaaaaagccaccgcaagcccaataaagagccaccactcattgcgaagaggtgtgagtatacctaaaaccacaagtacaattgatacaatataaagcaccttggctgtgccaaagagctggcctaaaagctctcctgaaaaatcattctcattggagccttttgtgacaagaataccggttgaaagagatataagtaaagacggtatctgtgaaacaagtccgtctccgattgtgagcaggccaaacttctgtatggcctcatttgcatcaagcccctggaacataacacccattatggtgcctccaaccaggttgataagtgtaataataataccggctgctgcatctccctttacgtactttgtagcaccatccatagctccgtagaagcttgactccttctggattttatcacggcgagccttggcttccttgtcagtgatggctcctgtgtttaagtcggcatcaatagccatctgtttgccgggcatagcatcgagcgtgaatcgtgcagttacctcagcaacacgctcagatcccttgttgataacaacaaactggatgataatgagcactataaaaacgattgcaccgatgactaaattacctccaccaacgaattgaccaaacacatttacaaccacacccgggtttccggttgataaaataagcctggtagatgagacattaagtgaaatcctgaatatagtcgtaaacagtaatagtgtcgggaaaaatgacatatcaagcacttcttttacaaaaagcaccttaaaaagaatgatgagtgctattgaaaggttgaatgcaagcataacatctaacaggaaggatggaataggtatgataaaaaacaaaacagcacataacagatataatccaacacctaaatctgtcttttttaacatattctattcctcctttccgttaaatcacggactgcatatataaagtccgtatttatctttttgttttataataataaattaatctaattattttccttgtaaatcatggcaagtatttccgcaactgaacgataaagctcaggcggtatctcagctccaagatccacattgtgaaagagcattcgtgcaagaggtttattctcgactatatggatattattgtcgcttgctatttcctttattttctgcgccacataatcctgaccctttgcgaccactaccggagcatcatttttttgagcatcgtactttactgcaacagcaaagtgagtagggttggtgatgacaacatcagcctttggcacatcctgcatcatccttcgctgtgaagcctcctgcatacgtttacgctgctgacccttaatggccggatctccctctgtatttttaaactcatccttgacctcctgtttggtcatcttcatatcattgttaaacttgtgcttattgtaagcaaagtcagcaataccgactatcatatagacaatactgatcttaagaccggtatttatgatgatatcaccaatcagtactattgcctgtttgagcggaagctcatagagtataaatatatcattctgatgtgatttaacagaggaataagccacatacataatgattcctacctttagtacagacttaagaagctcaaagatggagtcctttgacagtatcctcttaaatccgtttatgggattaaacttgctaagctttggagccataggcttagtggatattttaaatccaacctggatgatactcacgagaatcgtgattacaactccgaaagcaaaaaacggcagcacagtcagtaaaaactgaagtattacattatttaaataatgcgtgaccgaaacagatgaaatctgctcctgtgactcctttaaaaagtcaggcatttttttatatacagtagaaaacaatccaatcagattgccccctacaaaggatataaatatctttaatactaaaaacagcactataagatcaaaggcagctgtaagctccttgctttttgctaccttgccctcttccctggcatcctttaacttcttttcagttgccggctctgttttctcgccgccctcgccatcctgtgcaaaccattgcagattgtagcacaacactgtatgcaatttggaaaattcatctaaactgtcagtacattccatcaattatcgaaaccaccatagtcttaatttctgtaataataaaattagcaatgttcggaattagatatactatcaaaaataatacaataaatcctgctataatttttaactggatacctacagagaacatattcatctgaggcgcaacctttgccatgattcccagtatacagttcattatcatcatgcacgcaaagaccggaagaaatatcctgaagcctattacaaacatatcgcccatatacttagtcatggtagagagcatattgtcaaattgaaactgtgcacctccaagcggtacaactgaaaaggagtcacaaactgcccttataagatatgtgtgcatatcagatacaagaagcaggacaagaactacgtaatagtagaaattacctgtaactgtcgtctcggaattcatcgatggattgaattctgttgccatggacagacctatatccatatcaatcagatttcccgcaaaaataacaatggaattacatatattggccgcaaaacctatgagcagtcctgtaattccttcttttacgaccagtacagcaaaacctactgcactgacataggaaagctgtggtctttctatgatattgtacataaacaaagcaacaaaggctgataagccggtcttgacacgtgccggaaccgcattatctccaaaaaacggagctatgtacacaaatgatgcaatacgcaccagaatcagcaaaaaatattcaaaatttgcaatagaaaaagaataattaatcatatatcatcctatcccatgcttatataataactgaatttggaccacaaatcagtcataaatccggacatagtgtcgagcatccatgagccacagagcatcatcacaagaaaaattgcaattatttttggcacaaatgtaagtgtctgctcctgaattgacgtaactgtctgaaatatactgactataagtccgacaatcagcgaaataagcaaaagcggagctgatgtaatgattgtagtataaattgcctctctggcaatatccaaaacagcttcctgggtaatcatatgtacacctcctagtaaaacgtcttgaccagattaccaataaccagatcccagccatccgcaaggataaacaaaagtaccttaaacggcatcgagatggttgtcggtggaagcatcatcatacccattgacattagcactgatgaaacaaccatatctattactataaacggaatgtatattaaaaagcctaatataaaggctgttctaagctcactaagtataaaggccggaacaagtgttgtaaaaggtacatcatcatagtcatcgtactcatctcctgagatatccacaaacagctttatgtccttagtctgtgtctgcccatacataaactccctgaatggtccctcagcctcctttatagcctcctgctgggtgattttaccctcatcaaggggctttatagccttttcgtttacctgtgaaaaagtcggccacataataaaaagtgtcaaaaacaaagccaaaccgacaaggacctgattaggtggtgctgtctgggtaccgatagctgttctgacaaaatgcagtacgataataattcttgtaaaagaagtcagcatgatgagaatagaaggtgctaaagataatactgtaagcaccaaaaacatcctgacaggtgtggacagagagcctgactcattgttgtaatatatgttcagaccatttgtgctgtcagaggtggaatcggctaaatccttgtcaccactgtcaagacttttaacgtcatccaaatcgtttgtcacatcatttgtactgatatcaccggatggtgaggggctctgacttgcatttacactgtcaggataaaatatgcataatgaaattgttaccataaggactgcaattgcaaaaataaatgatgcattgcaatatacagccttgaatttcttcatgaatctattcatgtctgctcctgttactgtacttttctttcaatttatccataattgctgaaaaggattccggattctgcatcatgctttgaggatccttaaatgataaatcctttaattcctcctccttaagctcggtgagataattcacatcatcctttccgattgaaacaacgatatattttgtacctgcctcaacaatactgatcatcttattatttccgacgcttattgtttcaataattctaagattcttattaaagcttcgccccttctggatacccgccatccatctggtggtaaaatatgtcaggataagcacaaaaacaaaaattattaaaactgtgatgagctggacaaagctgtccagtgatgttgctgctaatatcattttaatccctctgcatagtattgattaaatgtcagctgaaactattttgtctttccggtgtttatctttgaattgactatctcagtgattcgtacaccaaagctttcctcaattacaacaacctcgcccttagctacatatttaccatttacaagaatatctatcggttctcctgccagcttattaagctctatgatcttgcccggaccgaaatcgagtatttcggaaatggattttttggtgcgtccaagctcaactgtcacttcaagaggaacatccatgattaaatcaatgttttcaggctggtagacctgatttggcatggctccaaaaggggtgaattgagcgttctgtacattaacctgattgcctatcatattttgtgcccccatattctggttcatcattccctgattcatcatattctgactattcatattcgaattcatcatattttcgtttatcatgccctgactgtttgcggaagcattattcatgctgccactatcctgtggctgttgtataggcgcagcctgtgtggcggtgtttgaactttgaggaacatcctctgtcacactttgtgtatcaagctccatattctgagatacccccttacacatttcctttacaaatgccggtgggtaaagctgcattatctcgctgtctactagatccccaatctccatatggaaggaaatctttacaaactcttcagacaggaagctgtcaatttcaccctcgtttaaggtgttttttaaatcaacaacctctgcgataggagggctgatatcgatagtacgattgagcatagacgaaagagatgtggcggaagaacccatcatctggttcattgcctcactgatagcactaaggtgcagctctccaatctcaccatttatattcgttccatctccacccatcataaggtcggttataatttttacatccttttctttgagtacgagaatattgcttccatttaacccctgtgtgtatccgattttgataaacacacacggtttttcatactcgtcaacaattttgtcccaatttgaaaaagaaacaacaggagtagaaatctctactcttctatttacaagtgaaaacagcgtggttgcagctgttcccatactgatattggcaatctctccaatcgcatccttttcggattctgtcaatatctcatcgctcgaatccgccgcatcgttgttatttaacaatgcatttatttcctcctgcgataaaactccatccatgatttattgctcctctctgactactgatgtaattcttaccgcatatttatcaccggaagaaccaggtagtgcagtaaactttttgatatttcctacataaatgtccaactcatcatccacattggtgtcaagtcttattacatcacccggcacaagcgtagaaaaatcctttactgatataagactcttgccaagtaccgctttgaccggtatttgtgatttttgaataaggctttctatggcatttctatagttggtttcatcatgattttgtatgttagaataccagtatctggtattcagcttatctataacagattcaagtgtgatataaggcagacatatattcatcaatccctcaacatcaccaatctttatattcatagtgataatagctatcacctcgctgggagatataatctgagcatactgggaattggtctcaattcgctctaaatgagggcttatatcaagtacattctgccacggctcctgtagcagattaatgcatataactaaaatacgctcaataatcaaaagctcaatctctgaaaattctctcgtcttatcgagagaatctccccttccgccaagcatacggtctacaatagcatatccaagaccggaagccatttcaactattatattcccctgtaacggtgcaaagttgacaatgccaagcagcaccggatttgaaagcgcatttgtgaattctgagtatgtaactgcctccgaattcatcacctctacctgcactgactttcgcagataaacgggaaggtttgttgtaagaagccttccataatgctcaaatattatttcaagggtccttagatgttcctttgaaaacttagatgggcgggcgaaatcatagtctttgaccgtctgttcactattctcttttatttcatctacatcaagctcgccgctgcttagggcattgagcagattgtctatctcactctgagataaaacatcacccatctgttaatcaccacctgtatccaaattattaaatatctgcctgttttaataccggcataagtatttgtaaagaaatcatcactgggtaagcgaagatacaatatttacatctactatatagtctgctccgaatttcttctggagagttttgagaatcttatcatgaacagcactcttatcggtgttgtactgttccattgtgtaatcgcctattatgtctgtaatgtctgctaagataacatttttcttggcggacagatcctcaccgtaggtcttatatccgtcactctttttgttgagtgaaagtgatatgccacaaacaagataatgtgtattgccatcctcagatggggcaaaattgaaggtaagtgtatcatcatcggctgtaagtgcataatcaacaatctgatcctgcggcagctgtgaaccactagttgcagtgccactgtttaagtctagtgatatagcctgacacacctggtctatcagattgtttgccttttttgtctcaggtataattgtaaatataagcagtgctgtaagcacaaggtttgcaaaacaaagtgctaaaatcagtactgaaattaaattctttttcatatgcattcctttccggattaattggtattgaactctgaattgtaagaattatacaccttaatctctacacgtctgttcctggcccttccctctggagtagagttgtccgcaaccggatcatagtctcctcttccggatgactttatatgggcagggtttaagcttgtattgtccctgatgtaatttgcaacgctcagtgctctgtacatagaaagcacatcattactctcatacttggaacgtgatgaaaccggaacattatcagtatgcccttcaatctctatcagattatcctgatatgtagctaaaatagatgaaatcttgttcactaccggatatgcctcttccattacatcagccttacccgattcaaacaacagggctccattcagactcaattgcacgtactgtgcattgaaatccacttccacagcatcctgtaagctagtgttttcgagctgtttttctatctgctctgacattttttcagattcagaaagctccatctgctcatactgttcttcggcattcttgtcatcaccctctgtggtgctttcagttgtcgatttggaattggccagatcattgtaatatttatccaaaaactcaagctggctgactcctgctccaacaagcctgccatcaccgatagatgtgctgcctcccggcaaaacactaacactgcttgtcagtgatgcaatgaccagctggaatttctcagcgtcaacagttgacatagagaacaagagcacgaaaaagcataaaagcaggttcataagatccgagaaggttgactgccacgccggtgctccctttggcggatcctcaggtctccttttcgccactattcctcacctccgccttctggtgagagagcctctctcttgtcaggtgaaaggaaggacttgagcttttcctcaataactcgtgggttttcacccgcctgaatggaaagcagaccttctatgataagagtcttgagagtgagctcaagctcattgttagccttaagcttgttagcaaatggggcgcaaagccagttggcaataagcgaaccgtagaatgtagtaacaagggcaaccgccatattcggacctattgttgaagaatcctcaaggtttttaagcatattgataagaccgataagtgtaccgatcataccccaggcaggaccctgctctccccagaattcccagaaagaaattgttttcttatgacgttcctccatgcttagcatatctgtttcaagaatgcctctcacaagctctgcatccgtaccgtctactacaagcataatacccttctttaagaattcatcgtctatactgccggcagcttcctcgagggctaaaagtccctccttacggctgacatttgacagctctattattttatttattgtctctccagggtctacgctcttttccttaaaaggaagtgcaaatgacttgattccggctataaagcccgatagcttgttagagcaaagcacagccgagagtgaaccacctatcgtgataattgcagagggcgcatcaagaaagtttaataatgcaggtaccccaccattttgaatgataccgaacaaaaccattccgataccaagaattactcctaaaagagatgctatatccacttatacacaccttccataaataaatatttgtcgaatgaccttagttataattctactaaattttagtgtaaatgtctatgtaaaaataatatttttaataaaaaatacacaaaatattgggaaatgacctaagccatcccccaataccttgcgaaattattatctcttaagattgataagttcctcgagaagtgtatcagatgtagtgatgacacgtgagtttgcctgaaatccacgctgagttactatcatatccgtaaactgtgaagacaaatctacatttgacatctcaagctctcctgatgagatagagcctccgtcagctgatatttcaactcctattccatcaaactcacctgagtttaatgtgctctgatagcagttgtctccgattttttcaagacctgatgcattggcaaactgtgccacagctatctggcagagtaaaactgtattaccattgtcatatgaaccgtatatcttaccatcgtcactgacagttatgcctgtaagtgctccgagtgcttttcccttgccatcgccctgcaagtcaccgttcatacctccgatagtagaggttccgttattattatagttcatggatttgctgaaatccacttctatattactgaaattacttccgttgattgaggcatcctgtgtgtttaagacggaaagattcaggtttattgtctttgcagccggtgaatttgcacttgaaattgatgtaaaagtaccctcactctggtcaaaaacgagcgaagcgtcctcaaatatagtctggggatctacagcccttcctttatacgagtacattgtctgtccgtttggtccctggcttgtaataaaattaccatccttgtccacatcaaatattgaatttcccttagaatcaacgatatccttaagcgttacatcatatgtaccatcggtatttgtctttttaataccaaactttgcagtatagttgtatcccaagtcatcaaaaaagcctatagtgatgattcttccggtgtcggctgcctgggcatcatttttatcaagcacacctgatacatatgcctttgttgtagcctccggagctgaggttttagtggcagacgacattacctgcagtgatgataccgtatcctttatcacgttgccctttgcatctacctgccatccctgcaatgtatatcctgtagagctcatacataaataaccgttaccatctacatagaaatcgccggcacgggtgaaaagacggtttgttccatcacttaccacaaaaaagttagtcgcgtttttgtcatttaatctaagatcaaatggattaccggtagtctcagcggaaccggctccggtaatatttacagcagtggcacccgactttacaccaagacctatctgctttgcattttttccaccggtaccggcggctccgtttccggccgaagcgcccgatgtagtctggtacataatctcactgaaacgcactgaagatgccttaaaggcctcagtatttacgtttgcgatgttgttaccaataacatccattcttgtctgatgtgtcttgagtcctgacacagcagaataaagtgatctcatcatagttgtttgtcctcctatagtatagatggacggtatgggctttttctgtcattcaaaagccctctgcctccttaaaaggtccggctacataattaccgcgccatcaatatttgtaaatacatttgaattagtttccgcctggtccattgcagtgacaacggtcttacttggcacatttactataaacgcaatatcatctacaagcaccagtgaatcgtttacacccttgctatctgcagctgctatccccttttgaagacgcatgctctggtcgtcggaaagattaatatttctctgtgtcagccgcattgatgcatgctttgagaatttaaccggctgtgtctgctgctttaatatttcctcaaaggatataccatttatctttttgtctgtagatttttgcttatttagatattgatttgtcagctgctctatggatgagtaattattaacgatattcttcataatccacctcacgcagtctgattcgtatcgttttctttactgtcagcctgattatttttatctgccgcaataagctctttaagcttatcctcataagcctgaagcttgctgtaatcactggcatttataaactgcttgccataatccgaaagtccgtcgtacagctttcttgcttcctctatgctgccctttgaatctatcgtcagatcctctatctttggaagctttgctataagacttgaaaatgtacttgagtttacaattgcatcgtagtactcatccgttgatacagaatagagactcgagtagtcgtacattttttcattgatagacagctgaatcttgccatccttatatgtgacatagtctaccttgccactgtagtatccggaagcactatccttatcagtaacaataacctccttgcctacaagtgaaagtgctgcactctttgtagtctggtcatatgacgatgacatggattctttcatagaaagagttgcctccagctgtgagaatgtagccatctgtgccacatagtcggtgttgcttgttggttcaagcggatcctggtactgcatctctgcacttaaaagctttaaaaaatcatcatagccaagatttgagccacttgcttttgcactgcttgtttttctgttttgtgtcggagtggtatttgtcttgtctagctttccgtttgtaacatttgctgtaattgccatttgtcctcctttttcatgacaccttatgctgtgaaatctactgaatttccgttatctctcataatctgtgtcacaagtctttcttcaacgcgatcctgcatcatatcactgtctatgccgctgtcagagctgtttgaaccattataggaatttgtgctctcctgctgtctgctgtcgtttgcagcaccctgttcgagattcctctcaaactcatgtgatgcaacggtgatttccacctcatttaccctgatgcctgaattatttaaggcttccttgagattgaccatctgtgtctgtaaggcttcttttacagcctcattggaaactgcaattcttgcagatatctcgctgttcttctgagatacgttgatatacattcttccaaggctttcaggtgtaagctgaaggttaattgccgattcttcagtggtgtttgatatgctcatactgtcgacaatctgtctgatgatatcggtcgtatcaacacgtaatcggctttgtgactgtgacatttcaaatgaagtatcagtattcagctgttcgctgacagatgcatgaagtactgaattgtctgagtgtgcgtcatcatcatgatgcaacacgcgctcaccggaatcatcaaagctactgtcaacctgagactttgactgagtcttttctgtattttcatctgatataataccattgcctgtttcgcctgaagaagtgccttcgtccgagttttggtaagaactgtcctgtgtaccgccatcatataccttaacagcttcatcagcagtgtcgtttatattctgacccgaagctgctgtatcgtcatagctgctgtcaaccgttttttccgttgtatcagccgaagaaactatatctgcatctagtatttcaccatcatctgaagcagtaagctgtgataataaatcaagctgtgcatcattttcagatgcaacctgagacacatcattaaacagtgcagtaaagtcggcatttaaaacaagtgcctgtggatcagatgcatttccggtgacctcacaatataatgccgacagatttgcagggttgagtaaatccatagctgtcagtccaagaagctgcattgcattattaagttcatcctcagatatatcgaggtcatcagttactttttcaactatctgcgaagatatatcatctgtgatttttttaacttcgctttctgtagggctgttttttgatgcagttttgatgcttatttccttagtattgtttttatttaaagtataagagtttcttcgctttaaaaatgtagtgctgttatcctgcacagctgtccggccgccaagatagcttttaaagtcaataccggattgtgcagctgtttgcgttacagccttctgccctgtcgaaacattccgtccacctgatacatttggtacaacaggtgatattgtattgtctgccatattctcctcctttcttttattattgtaacaagatatgctatcagttttgtgaaggattcataatcttagtaacctttgccgccgtagccgaatccattttaccaaggatattacctctcgactgggcatccatggcatttaatatcttggcaacaagtgacagattgtcggtcatgctgtcaaaaatagctgcggcctccttaggcttcattttggaatatgtctgggcataatccttaatttcatcatcctgttcaagctgttcacacacctgtttatataagatttctgcattggcaggatctacctgctcgtagaatttcttatattcttttatatcgggtgctttatctgaaaaaacaacctcctcatagtatttttctttttcctcctcaaaggctgcctgctcctccttataggtgctcaaatcctgtatctgggcatttaaatcattgattgtctgggcatctgcctgattcttgctattggcatcatccaattgcttttcgagctccttaattctcgaaaccgcatcgtccaaatttgtgtagcctgcggtctctgtggactcagatgcagtgatattgccggaatcaggaagtatcttacttagtacaggcacatcctttagtgccggcgcaagcacagtcgagccaaagccacccacatctgcttttacaaaaactgcaaatattccaagccatattgcaataataagtatagtaacaagcaccatgactatcttgcttgagacagaatcactgtcatcattttctgcatcgggcttatcggcttcatgattcttctttgctttcttagccgcctttttagcggctttttcttccattttcttttctttttttgttttcttagcatccttggttgattctgcttcgtttagttctgccatatttcctccggactacgaattataggtaaagctcacaagctggtctatctctttagattcgttgtctttttcctctttttgaaaatcctcaaatttcttatcgcgcagcttctcatgcgtcttgcgctctttcataagctcattcaatgccactcttttaacctccagcatatcctccgctttctttacattcataagctgtgtgcggatagccgatttgagtgaatttatgttttttttgcaaatattaatttcagatatatttaagctgcctgaaagctgttccttaagagcagcttcatagaccgcacgctttttaaacagctcttcgagcttttctttttcagtcagataagcacggtttgcttccgaaaattcgttcttcgcctgtgtttcaagctttatttttatatcaagtatattttgcatgctgtatttgaattttcccatactactcgaacaccttctctaaaagctcaagctcctcttcaaagctgaatttctcatctgttccctgacaaaggaatgagttaacagcaccaattttttgaatggcatagtcgatatccgggtttgagccgtttttgtatgcaccgatattgataagatcctcagcctccgtgtatgtggctagcacgttttttaatctgccggcgagatttttgtgttccttagttgctatagcactcataactctcgaaatactctgcagtacatcaatagccggataatgatttttatgccccagctttctatcgagcatgatgtggccatccaaaatagaacgcgccgtatctgtaataggctcattgaaatcatctccatcgacaagcacagtgtacagccctgtgatagagcctttatcagctcttcctgctctctctaaaagctttggcatctcagaatacacacttggtggatatcctctcgtcacagggggctctccggatgccagtcctatctctctttgagccatggaaaaacgtgtcagtgaatccatcatcaaaagcacgtcttcacccttgtcacgaaaatattcagcaatgcttgtagctgtctttgcagccttgtttcttataagagccggcttgtcagaggttgcaactactacaacagagcgcgccataccctcagggccaagatccctttctatgaactccctaacctccctgcctcgctctccaatcagggcaattacattgatatctgcctttgtgttgcgggcaaacataccaagaagagtacttttaccgactcctgagcctgcaaaaataccgatacgctgtcccttgcctactgtgatgaggccatctactgccttcactcccagaggaagcacatcactgataatttctctggacatcggatcaggtggcggtgcttctatcggatattcactgtcaagctcaaggtctttttcatcacagtcagttacacggcctattccgtcaactgtatggcctaaaagctcatcaccgacagctaccgtgagaggatgtcctgtattttcaactatacagccgacaccaactccctccacattgtcaaacggcatcagaataatatgtgaatctttaaatcctaccacctcagacatgacataatccctgcgttccttgtcaagaaaaatcatgcaaagatcattgagcttagccttgggaccaattgattctatcgtaagaccgacaaccttgtccaccttgccaaagcatttatagtactcaccgctttttaattgtaaatacttttgtgctacctctaacaattaaaatccctttcttccaacactcatacagctatatcagctgcaaagtgagcgtatatccttcaccagattgttgagctccatatcaattccacagtcaaacactccaaagcttgtctcaatgaagcagccgctcgtgtcaagatttgcgtcatttacaacctcgatatcaatatcattgcctatgcgttcctgaatctcatccaaatgcgacatcataaacttatagtttgaataagctacatgtatacgaaattctttgcccacctctatatttgacatggtattttcaaccagatgaaacaagatatcctttttatcatcgaactgtattttaaagactttgttaaaaacctgaattattgcatctatcagatctgattcaagctcctttgaataagcatcatattttgatttcaaagagctttctttatctgaaagctcctgtcttaaagatatttctttttcgtcaaactctctctgacactcagccagaccatcctcatagccctttgacttgttatcagcatatagaatctgtgcacgttgtttagcctcatctaaaagtcttgaggcctctgcctttgctttgtccaatatgctatcagcctcaagctttgcttcctctaagagcctttccttctcagctgaaacatctatttctgtgactacagcagcatttatgccatcattgaagccgctctcctgcgtgtccagacttagcgattttgttttttctaagctgctctgtgcatcagatgatatgcctgtataactatcagcggggtggcttatggagtcggcaaaaaactgctttatcatggaattgctatttatcacgcggacatttttatcttctccggcaacacgatactgctttaatatattagacaactatatcatcacctccgcctcttgaaatgacgatatcacccgaatcctcaagctttctgataacagcaacgatcttttgctgtgcctcctcaacatccttcatacgtacaggtcccatgaaatccatatcctcttttatcatagcggcaagtcgttttgaaagattcctaaatatgacattttgtagttcctctgtagaactcttaagtgcaagctcaagatccgcattctccacatcgcggagcactctctggatagacctgtcatccaggagaaggatatcctcgaatacaaacatcttctttctgatttcttctgcaagctcaggctcatcaacctcaagtgactccataatacgcttttctgtagcacggtctacactgtttaatatattgacaatagaatctatgccaccgacaattgtatagtcctgattgacaagagatgaaagctttctctccagcactctctcgacctcctttatgacatcaggtgatgttctgtccatctgggcgatacgtctggcaacatcagcctgcttttccggaggcaaagcaccgagtatcatggcagcctgtgaagacgacagataagaaagaatcatggctattgtctgaggatgctcgtcctgtataaaattaagcagctgtgcaggctcagtctttctgacaaactcaaatggtctgacctgtaatgatgctgtaagcttggaaataactccctgagccttttcactgccaagagctttttcaaggagctccttggcatagccgatgccgccctcagcaatatactgctgcgcgagacacacctgataatattcatccaaaacagattctttatcctgcggagagacgcttctggtgtttgctatttcgagtgtcagactctctatctcatcttccttcaaatgctggaagatggctgaagccttttcaggtccaagtgtaattaaaagaatagcagctttttgtaaaccactgtaatcatctatcatatgtaactactcccaatcctcattaagccagttacgcaacagctgcgcagccgcttcgggattttcatcaacaaatttttctatcagaagacgtgtctccgtcttctcgttatatccaatatcctcaagaggctcattattctcagcagtctgttctaaaagagaatctacagacagctcctcctcttttggctcttcctcactgcttcttgtgctcttaaataccacaaagccaagcagtgcaaaaataaggacagtgattgcaatctgtaaaatatcactcaacgaacgcacgccagatgccttgtcaacaaactccggctgctcatatacaaggaatgaaatctgtgagatacctgttgcattctgcacggaagttacaagatcctggtctacatccgtcaccttgaccggatctgcatgctttgctttgtattcctcccagcttgtatccttgagctttccgttcttttcaagagtgctttcatcatataccttatacctggtggcaactacggtaattgaagatgaatcatacttgattgagcctccatcgtttttacttgtagtgattttttcatcatttaaatactttttgtcgttatctgtaattgacgactctgatggagtgccatcctgtgtagtgtatgtagtatcatcgctgtttgaatcagttccgggaaccgcagcctgaccattggttgcatccgactggtaattcgactcactgtccaaaagacctgtatcggtctgtccatcaggcaaagtgtaatttttctgggctgtttcagtcttactgaaatctatgtccagattcatgccaacttcaatattcgagaaaatatttgagctctctaaggtctttttgacttcatttttcacctgctcctccagcttttgcttataagaaagctgtgatgtcgcaagacctgccgaggtatcggaatctccgcccgagtaaagtacattggcctttttgtcgatgatagtaatgccctttgtggtatcgtttccaagagctgttgcaacaagacgtgctattgcgtaggcctgatcatctgtaatcgaatccttaagtccaagagtgacagccgcagttgcctcctcttttgatttaagaatggtaccatccttgtcaggcatagtgatatcaacgcttgcttcatttacgtatgactgtttttccagatgatccttaagcttatcctccagatacacctgatactttttctgcttatcagcctcggttgttgagaagctgccgtctgtgacattgtctatcgagtacgcctgcgcagggatgccgttatcacccagtgccataatggcatttacctcatctgatttattgacaaaaaacacaagcttgctgtccacctcatagcttatattgttatcttcaagtactccctttattgtggaagcctctgatgcactctgtgcctcgaccagctcaacctgtgtaggtcttgatatgactacgccaagtattacaagagccactataaccacagctactatgcttatgagcacggagcgctgcttagtattgaattttttccaccatgcagttattttatccaaaatagcctttaaacgttctggcattttctattactccttatattgacatctgcataagttctttgtatgcgtcaattattttatccctgacagcaacagtgtactgcaatgccacagccgcctttgtttccgcaacaagcagatcatgtgtattatcagactcgccaagtgcaaatctcacttcctcctgctcagctgcattctgcagatcatttgtctcaccgatgcttcccatggcagcagaaagtacatcagaaaatgaatcagtcttgtcagttttcgtaagagaggtattattaaaaaaagatttaatatctcctgttgaaattccattaatgtttgaaatatccatcaaaaagctcctttatgtatgtatcagccggctatttgcctatttgtaagccattttgtgccattgacttgcttgcctcaaaggcagttgcattggcttcatatgcacgtgtggcatctatcagattggtcatctctgtgactgtattgacatttggataagaaacataaccatctgcatcagcatcaggatttgatgggtcatactccttgataaaatcagtagaataatctgatgtcacgctgcttacctttacaccgtttccaacagcggccttctttgatgaagagtatatctgtgaaaaaggtgtgacatttttctcggaaaaagtcacaatctttctacggtacggtgtgcctccctttgtggacgtagtgtttacattggcaatattctgtgcaatgatatctgtcctgaagcgttcagccgtcatgccggacgcacttatattaaaagcttgaaataatcccatatcattaaacctccataattactacagcacgctcttcattcgtgaaaactgcgagcttatgctgcttgtaagtgcttcatacttaatctgctcagacgcaagctcgacattttcagtgtctatatccacgttattgccatccatcctgtatgaataattggaatggtctgtatatacattggccgtcagctttgaggtatcaagctcacttatttttttatcaagcgactgatgcttgcatctgccaagctcctgtgacagtaccccctcaaaatttaaatccttgcgcttgtagcccggggtatccacattcgatatattgtttgcaagtatagcttctctttggtagcttgcatcagccgctttggtcaatacattgacataatcaaaggctgttgagtttatcataaatattcctccaatacactttttgcatattataaaaaatactatataagtactctaatatatatattataaagtaaaatcgacaaaacacaagatgtttttgttgttttttacattatattgtatttttttgtcgacagacgcactatatatatgccgaaaacatagaaaagacctatgttctttcaaacataagtccttaaaatatacttaaatttatttacttgtttttatttcggattctgtcaagctcatcaaaaactacatcgtttactactttgatatatgtgcccttcatgccggatgagcgtgattcgataacgcctgcactctcaaacttgcgaagggcatttacgattaccgagcgggtaatgcctactctgtcggctattctgctggcaacaagtataccctcattgccgtcaagctcatcaaagatgtgaagaatagcctcaagctcagaataagaaagtgtattgatagccgaacggacaatcgctacctttctcttttcctcttcattctcctcattcacggatctcatcatctcaagcccaaccactgtcgtgccatactctgtaagaatgatatcgtcaatgtcatactctctgtcacttctgtactcaaaaagagttccaagcctctcgccggctatatcaatcggtgtgataatagccttgtacattcttgtatcttcaccaaagccaagtgtctcgaggtttacattttcctttgttgaaagtatgccaagaagtctttcattgagctcagtgtcaatatagccaccaacctcatctactatcagttcatgaagctcatccacgcctttgcagatacttgagccaagcaccttgccctttttgctgattacaagtatgtctgagtcgagcacaccggtgagcacctgacatatatcattgaacacaacctttgatgaattgttgttgtgaagaagcttattaatcttacgtgtcttatctaataattgtactcccattaattgttattcctctctttcgggctttttatctgttacgtagccgcactgctcatctgcgcaggcaatcttgtttccctttataatcatatatcctccacaacgagggcatttttctgcaactggtctgccccagctcataaaatcacactcagggttgtcaatacagccatagtattttcttcccttccttgttttcttaagcacaacatccttaccgcatttagggcaattgacgccgattttttcaagataaggcatagtgaatctgcagtcaggaaatcccggacatgccaaaaacttgccgtgaggtccgtattttataaccagattgcgtccgcactcagggcagatttcatctgtcacctcatcatgtattgtaaccttctcaagctcattttcagccttgtcgattgcatctttaagatcaggataaaaattctcaacaactgtcttccagttaaccttcccctcggctaccgcatctaaaagtgactccatattggctgtaaaatgctcatcgacaatagtaggaaatgattccttcataatagaatttaccacctctcctatctctgtcacatagagatttttactctccttggtaatatagcgtctggcaagtattgtagatattgttggagaataggtactcggacgtcctattccaagctcttcaagcgtctttaccaaagaagcctcagtgtaatgtgccgggggctgggtaaaatgctgcttaggcaaaagctcctcaactgtaagaagcgattcttctgtcagaggatttttaagaacaggctgcttttctttctttgcatcgtctgcggcagtatatgcaagctcaaaaccatcaaataacagtcttgaggtagcaaagctgaatacataatctccgactgaaagctttactgtagtagtctcgtactcggattttgccatacggcttgcagtaaaacgcttccagataagctgataaagcctgaactggtctctcgacagtgactccttaatctcagaaggcactctgtttatatcagttggcctgattgcctcatgggcatcctggatatttttgctgctcttctttgttccctcaccggtggaaagatatttgtctccatagctttttgaaataaaatcctttgccatggcctcagcctcatctgatacacgcacagaatcggtacgcaggtatgtgatgatacctaccgtaccctgtccctttatgtctactccctcatagagctgctgagctatacgcattgtctttgaaatcggaaaattcaaagcctttgaagcctcctgctgcaaagtactggtcgtaaaaggaagcggagctttattgctgcgctgtccttttttaatattttgcactttgcaatcctttccctttatttcgttaagcaccttatccatctcattctttgaggaaatggctatcttattgtcgcccctgccgtatagctttgcagtgatcggcttcttctcaccctccacatcaaccgtggcatcaaggctccagtactcctcagggataaatgcattgatttcatcctccctgtcacagataatgcgaagtgcaacagactgcactcttcccgcactaagccctctcttaaccttggcccaaagcagcggactgattttgtaacctactatacgatccaaaactcgtctggcctgctgtgcgtccacaagatccatatctatttttcttggatgctttaatgattccttgacagcattcttcgtgatctcattaaagctgatacggctgacatccttgccctcaagtttaagtgcgtgaagcagatgccatgagatggcttctccctcacggtcgggatcggttgcgagatatatcttatcggccttcttagcctccttgcgaagcttagcgagtatttcaccctttccgcggattgtgatatattttggttcaaaatctccgtccacatctattccaaggctgctctttggcagatccctcacatgaccgtttgatgccattacctcatagttttttcccaagaatttctttatagtctttacttttgcaggcgactctacgataaccagatatttagccattataaactccttatatagtaatttggaattgtctccttaacaaatcctttttgtataagatcttctaacacttcaaatagttccgataattcatacggcactttttgagacaatgtcccgattgcgataggacaaaaatcgagtaaactatacaccaatgcttcttttttatcaagtatattttttctgaaatccatctgtgtgcactctgtaaacccagtcattgtaatgtctgagacaaattcatcaatattataaataatgcctgcgccctgctttatcaggctgttgcagccgtagcttaaggtgtcggtgatacgccccggaatgacatatacgtcctttccctgctccattgcaaaatcagccgtaatcagtgaaccgcttctcttttttgcctcaactataactactatatcggataacccggaaattattctgtttctcatcggaaaaaacatcttttgcgggtcggtgcccggcataagctcgctgattatgcctccggagagctttattttatcatacagaaagcggttctctttcggataacaggtgtctgctccggagccaagaactgcatatgtatttccaccagcctccagacaccccatatgggcatctctgtctattcctcttgccatgccgctgattatctgtatcccctgccttgaaagtgctgctgccagtacctttgccacctcgcagccatatgcgcttctgccccgtgctccgactatagcgacactttttcttgatttgtcgggaagagcgcctatgtaaaaaagactatacggcggattatgtatatttctaagcttgtccggataagcctcatcctccattgttacaaagccgatatccttctgctgaaataatatccactccttctctacgtcataggaagctcttgattcaaggattatttttctgtcatcatctgtgaaaaacaaaatatcaaaaagctcattctttggcataaaaaacagcttttctgccgttatactgcaatcatgcagaagctttttcttcgcattgcttatatctgtaaggcttgtaagccagtatttgaacttcatgatacagcacctccccagaacttctcattgatgcttctgtagcatatagcttcgttgagatgctttgtctttatgctttcacagccgtccagatcagctattgtacgcgcaaccttaattatcttgtggtatgtgcgtgccgtcagtccaagcttgtcaaacatattttccatgtagcttttctctcgactgccgaggaaacagtatttttccagcttgtcagttgatatttttgaattataagaaaagctctcacctttaaacctttctttttgaagctcgtggcagtgcataacacgctttcttatgtccgcagatgattcattggatgtagtactgtttatatcctcaaagctaagcggtgacgcctccacacatatgtcaattctgtctattataggctgtgagaccttatcaaaatatctgcgcagagtcggctctgagcagcggcacctttgcatatcgggataatagccgcagctgcatgggttcatcgcaccaaaaagcaggaaattagccggataagtcacgtttctgccggctcttgaaagcctgatgcagtgctcctcaagcggagccctgagcaggtccaacaggccgcccttaaactcagcgagctcatccaaaaataaaacgccattgtgtgcaagcgatatctcgcccggattaattctcgttcctccgccgattaatgcggcctgggtgacggaatagtgaggatttctgaatggtctgttgtctcttaaggagctgtcattgtccaaaagaccgcagatactgtatatttttgacagctcaagtctctcattttcactaagaggaggcagaatggacggcatacgctctgctatcattgtcttgccggcaccgggaggtccgacaagcagtatattgtgcataccacccgcagccacctcacatgctcttttaataaatttctgtccgttaacatcacaaaaatcggcgtatttttcatccatttgcagctcatgtgccatgccggttttctgacacgtaaatgctgcctcatcaaactgtgcaattacatcatttaaatggcttatcccaaatatttttgcaccgcagacgagtctgccttcattttcattctgctttggaataataaactttccaatgcctttgttgtactcatcaaatacaatcggcagaataccgctgaccggcaaaatttcaccgtttaaatttagctcgcctgcaagtgtgcagtcctttatgctatcagcgtcaatcacccccatagctgttaaaatagcaacagctataggcagatcaaagcctgttccggtctttttaatatttgcaggcgatagatttactgtgatacgcttggcaggcaaaataatgccaacgctgtgcagcgctgttttaacacgctcctttgcttctctcacctctgaggtaagatttccaaccatatcaaaaacaggcataccggttgaaatatcaacctccacctgtaccggaatcgcactgattccatccaaaacagccgttctgactgtactgtacatatatactcctattccaattggggtaaatgcatagacaaatgcacaaaagacatggctctatgataacatatttttgccttttgtaaacacctattcgagcagttttcgtaattttttcaaaccggccctttcaattcttgaaacatatgacctcgaaatgctgagcgttttagcaatctgtctctgtgtcagctctttttcaccgtcaaggccaaagcgtttcgtaataatataatattctctgtccgataaaacgcttctcatattttgccttaaaatcttaagtgactcagatacctctatatccgataccacatcagattgtccattctcaatcacatccaccagatgaatctggtttccctccttgtcagtgcctataggttcaaatatggacacatcaccccggctctttttacggcttctaaagtgcatcagaatctcattttcgatgcatctgattgcaaaggttgcaaaacgatttccataatcagccttgaatgatgacactgcttttatcagtcctatagtgcctatggatatgagctcctccatctcatcctcgcttactgcatatttttttgtaacatgtgccacaaggcgcatattgtgtaatataagctcatccttagcttctttatcattttgagccacttttttcagacattccgtctcacgttctaaactaagaggtgataaaaatgtattcacatagcaccctgtcattatttgcttataatatattatgttcaaatctgtattttgtgatataatctttgccatgaatagaaaaatagactacaaaatcaatgaaaatgatacaggaaaaacagtagaaggctttttgaaggagcgtggctacacacatcaggtgcttgtcaggctgaagcagacagaccatggcatactaagaaacggtatatgggcctatacaaatgaaaggctgtgtaaggatgatttaatcacagtccaaattgtagaaaacgaatgctcggataatatagcacctgtaaatctgcctcttgatatagcatacgaggacgatgatatcatcgtaataaacaagccgtttgatatgcctgcccatccctccgccggaaaccatgacaacacgcttgcaaatgcgctcatgtactattatggcagtcagaataagccgtttgtatacagatgcataaacaggcttgacagagataccacagggcttacaattgtcgcaaagcatgcacttgcaggcgggatacttggcaacgctgtcgcaaagcgtgccatccaccggacatactacgccgtctgcagtgggtgtacacctgcatgcatgcgcatcagtgctccgattgcaagaaaggatgcttccaccatagagcggtgtgttgatttcaaacgcggtgaaaatgcagtaaccgactttatcagaatcaaatataacccggataataatttatcgcttgtcaagctaagacttcttaccggacgcactcaccagatacgcgtccatatgaagtatatcggttttccactgataggtgactttttatataatccggactatacatatatatccagacaagcactgcactcagggcgtcttgttttcacgcaccctgtcacaggacaaaaaatgaacctcatatctgatattccatcagacatgaagtccctgttctagttgatttattttatccttttcgtatgggatatgcccttttaaaacctctttttttatgtagctgtaagtatattcttctccctttacagagagcatgacaagcagatactcaagcattgcttttgtatcgggatgaatcatgtagtgatccacgcttttttcatagtattccagcgcacttttgtcggtgtacttttctttctgatagttttttgaggcgcttacacggtctataaacatctcgcagacataccttatgggcattttcatgccctccatttttgtatgtgttttatcgtcccccggctttgaaacagcatagtcaatccagtactccaggtgatgcttattgcgtcccttgtgatgaagccacgcagatgaatagcccctgtcggctctctccgcattattcgggctcatataccccttgtaatacctgcagccgacaagaaactcagtcggtgaatattttgacatgtcatgaagaagtccctgtttataaagtcctatcctaaagcacccctgcatgactaaaatcttgtgatgtgtaattgttataaaatgtcttattgctttcatatgtctatctgcctatgaggatgtataccgactgcggtgagacatctgcatactgctggttttcacacagcaccggagtgtcataaaacggttctttgagcgtagaatcgcagactgcataccatttcattcctttctttagcttaggaagagctaacttctccctggatgaataaaaattgtaagctacgtatacatagtctttattcacttcattgtaatccccacagtacatcacacctacacatagctttgtggcatcacactcgcctatccaggcattcttgcagtgataggacaaatcaggatacccaacagccttgtaatcgctgaatttaaacggctttggacaggaaataacaggatgctcatccctgaatttgataagtctggttaagaacctgatgttttcccttctgctatgctcatttgaccagttcacccagcctgtagggttgtcctgacagtaagcattgttgttgccatcctgtgaattacagatctcatcacctgccataatcataggcactccctgtgccaaaaacaaaagaagcatggcatccttccacttaagttttcttatctcacggataaacctctttcgcgaaggaccctcacaaccgtaattattgctgaaattccatgaaggaccatcagcatttttctcaccattggcctcattgtggcggtcattgtacatgaataaatcgctcagggtaaagccgttattgcttgatatatagtttataaatccgacattctccccctgctttttctgctggtttaaaagctcatacatattgcagttgatatggtttaacatcatacgcgccgcaaactggtactcctccttgtcaatatagagattttcatatgtcctgttttgcggtacaaccgacatatcaaagccatcatagagtatctttgtccggctaaggagagcatcctgcacaatcgcagtaacaggcagcctgtccccaagcagcttaaaaccatctacatgaaagctcatgacccagtatctgagcgcatcgagtatcagattgtggtcagttccgtccggaaaatacatctctacaatacattccatgccatttttgtgcagcctttcaacgagacgcctaagctcattggaggcatctgaagcgtcactggcatatgatgcttttacggcaaaataatttccgtaggtatagccccagaaattgaccttgtcattttgcttgtcggtgtgcacactttgctcatcctttaaggaatacttcggctttgcatattccggaatatcgtgctttacagggattgtcatttcttcaaactcgtatacaggcatgagaagaattgaagtaaagcctaatttcttgatgtaatttattctgtcagatacagcctcaaaggtgcccttatgctttttgtcccctgaaacatccatggaaaaacctctcacatgcagcttatacagcttcatccggtccctggttatctcaggaaagctgtcatatttccagtcaaaatcactactgtctatcccgcaggctatttcgtagtcattgtcacttcttgttttatcattccatttttctctgccgaaaattcttgtggcatagggatctatgcacctttttccattaattctaaaataatatgcatactcattcccgcaaaagccatgaagtctcacagagtaaagtgagcctgtcgaatactcggcaggtatatcaatcacacaggcagtatttcccgatttatcaagtaaaacaatgctgcattcatcctctttttctgctgcaaaggtgaatactgcactatccccctcaatataagcacctgtttttaaaaagtttccctttgttagtcgaaaattcatgcaacaccatccaatcaataattctagtatttatttattatactagttttgactttttttgtatagaataatttgatataatataatagttactttagattactataaagaaagaggtacaatatggcagaaaaagcaacacctgttacacctgatgaggcagacgatatccgcgtaacacttgatctggacaacggaagtgtcgaatgcaagattatcaccatttttgatgcagatcacaaggattacatagctcttctaccgttagacaaaaatggcaacgagaatgagagcggcgaagtgtatctgtatcgctatttcgaggacgaggaaggtcttccgagaatagaaaacatcgaatccgacgacgagtacgaggctgctgccgacagattcgatgagcttttggatgacgaaatgtttgatgatatttaatcatctctactattattttgtctaggctctttactttcacggacaaacctggaggcttgggctgatttatcatttaccgacttgaccgagtaaacagacaagcttgtctttgcacgggtcatgccgacataaaacagccttcgctcctcctctatgtccttttcaagcacagcctttttatacggcattatcccttcatttgcatcaattatatacacgttttcaaattcaagcccctttgagctgtgaagggttgcaagtgtcacggcattagggtcactttctttcgataaagccataagcttcatctgctttgtatattcccttatatgctcataccactcttcatatgtagcaaagcccttggctcctgactggatttcatccagtatatcaaacaaatcctctttatttatattcctatactcggcatattcagctaaaaagtcgtcatagccaatccctcttctgatatagtttatgctggcatatggattcatccggcttataagcttcatgtcatactcaagcttttctatccgctcagctatccacggcttctcatcaaacagcttaatccactcatcaaatgccacagttgcatcacacaggctgtctcttgacagataccgcttaggtctgttcataatctgcaaaaaatcagctctgtctctgctgcctcctgcaattctttggtatgtaaacaagtctctggcaatccagtgctcatatatattaggtatattatccttggttttgaatgggatattatagctcataagctgctctataagctgtcttggctgggtgtttgtcctgaaaagcaccgcaaagtcgctgaatacagctcccgcctttatctttttatctatatcgcgtataagaaagatattttcgtctcttctgttttcaaaatcagcaaacgtaacaggcgcctttgacttgcttgccgcaatgattttcttatcaaatctctccctgttgtgcgagatgagattcaacgaggcctccactatatatctgccacatctgtaattagtatctaaaaggattctttttgcattcggatagtccttctcaaacccaagcattatctcaggctttgaccctctgaagcggtatattgactggtcatcatctcctacaataaacagattgttctgtggagcggcaagcatttttataatctcatactgcagacggttaatatcctgaaactcgtcaatcagtatgtatttatacttgttctgccacaatgccagtatatcaggtctttccttaaacagctcataagtatacgagagcatatcatcaaaatcaataagcctgttttccttaagccttgtctcatattttttatatatatccctgaatatttcctcaccacacactcccgagtagaaattttctatatcaatgcggctgtttttaatcagactgatttcagcaagtaaattgcctataaactcattctcatctttgtattcaaggcggtagtaggataaaatttccctgataaagccgtatctcacagactcatctgcaatattggcacttgtaaagcgatatgcatatttgagtattgtaaaaaagacagcatgaaatgtaccaaaagatacgttcaccctctcgtctttcatcagtgaattaaaacgctccttcatctcatttgcagcagccttggtaaaggtgataactaaaatctcagaaggcttcacatgatgctttgttattaaatttttagtcctgtgtgtgataactgcggtcttaccggaacccggtcctgctaaaacaagcatagcgccatccttgtgttcgatggcgccaagctgggctttgttaaaaatcataaaataccctttgttaatagattagttattagaaagcttttctatgcctttcttaattctggctatagactcctctttgccaaacacctccataagctctgtagctccgcccggtgtcatctgcttgcctgaaacagcggtacggattggccacataacatagcctatcttatagcccttttctgtagcatatgccttaagagtctcaaaaagtgcatcatttgagaaatcatcacagctttcaagaataggaactacatcgtttaatacctcaagtgatgtctctgggtttgtcttcatcttcttgtgagtatacattgcaatatcataatccggaagctcttcaaagaaatcaatatgttccttgatatcagggaatatctcaatacgtgtctgaaccattcttgctatcttcttaaggtcataatcctttgtgacaacctccttaatgtatggcaatgccatctcatagaatttgtcaaaatcaagcttctttatatactctccgttcatccatttaagctttgtgaagtcaaatacagcaggtgatttgctcatatgatgataatcaaacttctcaacaagctcaggaagtgacataatctcctgattgtctgaagggctccagccaagaagcgctacaaagtttacaatagcctctgtaaggaatccctgatccagtaaatcttcaaaggatgagtgaccgcatctctttgaaagcttatgatgctcctcatctgtgataagcggacagtgtacatatacaggtacatcccatccaaatgcctcataaagtctgttatacttaggggatgatgaaagatactcgtttcctctgactacatgtgtgatgcccatcaggtgatcatctactacgtttgcaaaattgtatgtaggatatccgtcagatttgataagaatcatatcatcaagctctgcattatctactgtgatatctccgtaaatctcatcctcaaatgtggttgtgccctctgtagggttgttctgtctgatgacatatggcttgccggccgcgagatttgcctcaatctcctcctttgacaggtgtaagcagtgcttatcatatatagagatttcctttcctgcaacagttgttttaagactgtcaagacgctccttgtcacagaagcagtaatatgcctctcccttgtcaataagttcctttgcatacttcatgtagataccctgtgccacacgctcactctgcacatatggaccgcatccgccatccttgtcaggtccctcatcatggaaaagtccagtctcttcgagtgtcctgtttataatatcaacagcaccctccacctggcgtacctgatctgtgtcctctatacggagaatgaaatcaccgccctcatgctttgcaatcagataagcatacagtgctgttcttaaatttcctacatgcattcttcctgtcgggcttggtgcaaatcttgttctaatcttactcattttaaaatgtgctcctctatattaatatttttttagtcatttttcaatttgaaattatataacaatatggaaattttatcaatcctcagattgaacttccatatcaagctctgcgattttatttaaaattctgtttacctcgtggattctgtcaccaagctcgctcctgtgtgataaaatctcgcgccttagcctggttatagtctccacattgcaggacatcctgccccttaatttttgtctcctgactataagttcatgcttctgctcaaccatctccttatgatccacaatagcgtttgtgtagttgagccatactctggcatcgtagaagtcatttttactaagcaccgaaacaagctttttgctgttgtattccagatcctcgtttgtccttctgaagcgctccttgtcttttacagcgagaagatactgctcatagttatatacaaattcctttgaattcttcacatgatacttctcgtatgtgtagtcaacagcattttttatacttacatacttgatctttactctgttttcaagagctactgctttatttttggatgctgcaacgctttttacttcatctgaatagctttgatatgtcaaaagcacaaacgagcctgcaaccgctgaaagaagtgccccgataagcataaagatagtggtatcggctccatatacaatctgcatcagcgtgcatacagctaccactacagcaaaaaataccactaaaagcactgcgtacaccctaaatacccgctgtctgcttttggcatattcaccatctatatcgaactgcactttttctccctcgagatacctcaggtctttatttattacatccagactgctttcgtttttttcaagacgctttattgcccgcggaatctcatcctccagctgctgcatctgcgcatactggctgtctgatatgcggtttttggtctttaaaaaatcacttctggtcttttcgagtgtcaatatgtttgcagccgcatcattcatggtctttttatctgtctctgacatattttccatcctttctatgtcagtcagataatttgtgacaagtgcatactctgttctgttatcctcaagttctctggcggcatcaaccatctgttcacatatttcaactacattgaaccctttagtactctcatccggtatactctcaatatgtaattgtgtatcatcggtcttttttttgcgtttaaataacatgcgccctgtaatcctctttgtatttcaaaattgtttcttttggtctgccctcatcgcaaccatctgaagcttctgcatatacgccctttaatacgctgtccagattatttatttcctgctctgtaacactatattccctgacaatacgcgcatatcctatatcgttattatcaagcttataggcatatagacaagaccacagcgattttctgtccccattttgcctgaaagcctcaagatataaatccgctgctatatcaaacaaaaacagctgcacataggctgtagccagattgtgatatatgtttccgtacaatacacgctcagtatgctttgcatcctcacatgacagcagctttttgtattcaaaaattgctgcagtgtactttttcttctccatcagtctgtctgccctgattttcaagcactcaaactcgctcttttcctcgagctccttaagtgcatcatgtgtgttcttaagctcctccttagtgcagtagccgctgtactcaagcagctcagtcacaaaagcagacagtctgccgtttgtggatataatggttctaagatgcatggcaagctttggcagatgtgcatggttttcaatccaggtgcacaactcaagactcatgaagtcatcatccaaaagatatgtattgttgattatataataattaagctcctctatcgagtaaacatttatagacacaccctctatgtaatagggcatggctgctatagcttcattacacagtaataattctcccatatgccctcctacatagtcatctcatagtgccagactttgcccgagctcataaatatttcgccaaagcctaaatccttaatctctatatctatcctgtcatcagatacaggtgtcgccgtaattctgatgcgtgtagccctatccggcctgggcggcatatccgtaagtcttagtgtctcaatctttgcctccctgcttttaggaagctgcttccagaaatccacctcataagagcctgaaattataacctcacactgccccttggattcaaaccagttgcttccggcactgataagattataaaacgacagttctcccttatcatgtaccttaaggctcagattgaacttcatctcattctcgcccatatatacaaaaggccattctgcttccttatccctagtggctgccgcatagcatgctcccttagtaaagaggttattgcccatgaacactcgtctgcccttgcacaaaagtgcaacagactgtttcatccagccctcagcaaacgtatctcccacgagaaagaccgttgagataatctgattcttaaagctctcatttattatatccaaaaagcttttgtccttatcatttttatccagagtatagcttatgctttcatctatagatactacctgtggcgttgtgcgaagatccctctttagggaataaaaaaatatactctccttttcctgcataaacatcaccacatcatgaagccacagtgaattgtcctggttcagtgcaaaataataaaagctctcctttcggtctatgaccgtaagctgtctggaatttatgccaagcctgaccgccatgccataaaacatgctcacgttctcctttgtcagcctgtcaacacatataacaagccggtcaaaggatgaaggattaccaagcttggatggcagttccataacctttttaagaaacaaggccaaaagctcctctgccataaatgaatcatcatcgatgactattttttcactattcagtgctctcttaagcagctggtcaatacacaccatctcaccgcttttagagagtcttcttgcctcatctccataataccatttgccaatgctcttacggcgtgcaagtacaagaggaatctgaaactcctcactgcccacaacagtgctgacagtctccggctctttcatattctgttgaaaaaaactaaccatagcatagctgtcatttaagtctatgcctatatagtatgaattgccattatgtcccattataaatcctcttaaatcagcttaaacagctgcttagtcgcagcatccagccttttatattcgtctatattgctctttaaggttgtctcatcagacagtgtatctgaaattatcatctcattaatcagattatagcggctgtgatcattgtcacccggtatattgttgcacgtaagacgattgctctctttcacctctatgctgttgtcatgctcctcagtaatataatacctgatcaactcaccgaaaaatatgacaaatgtctttacgtatatgccgtcgtacatctcaaccatatcctctgaattaaactcttcgccatcctcgtctcggctgtaatgcagcacaacatgagtccccggagtactctcatactgtaaaaatgccttgtcatagaggaaatacttctccagcagtctgtaatcaagcctcgcaaaaaaatcaaaatacatattgttatatatataatatttaagcaatgtatcttcaatctcaagttcagcctgagtgatatctgttttctcagcaaaatgcttcaatagggctaactggcaggcatcatttaatgttctgtttccaataaatcgcttttcgataatatcaaaaataaaatcagccttgcacccgccactatgcagatatccatgtgccacaagagatatataagctaaaatcagcttttcatttccggctcttttatagtattccataaagatatccgatatcttttcaggctcaatctgcgtataaataccctgctcgagaatacgctcatcaagcttcatggaagatattgaaaacttatcagcagcatgccacagattaatcagttcgtctgtaggcccggtataattttcacacaggtatttaagcaccaggtcactgtatttgcctgttttaaaggcagatatggcaagctgcaccataaaatcatcatctacatgctgcaccttaagcgcattctcacacaaaaccacctttgatgcggcagcaagcatgtctattccatactccatggccatatcatatgccttttcatagaggcggtttgatacaagcatgtcaataagatattttcttgcatccttttgcagggtatcaaaattaatgctttgcaaaaacggcctgacgtaatcctcataatcgtgaagctgacaatattttaaaattctgtatcccataacagctttgtaggaatcagaaaaggattcactataaaatacaggtttaaacagcttcaaatcatcctttgtaaaatcagaataatcccttacattcttaaaatgtgacactatatactgtggtctgtcaggcgagaggcttatacacctgtcaaggtatttctcggcatccatcagcctctggagtctgtatgagatgcttttaacatatctatagccccttgagtcctcaaaaagtataacatagtcgtttgaaaacagttcaaaataagcacactggtctgtaaccggaactatctgaggctccttcatttcattctgatatatgatagctctcactatgcgcttatcaaatacaataagcttgtgggtatatataatatctgaaaaagctgccgacagctcttcattgataaatcccaactcaagcatatcctcgtataaaacagccagattgtcatcaatatgcctaagctgtgcctggtccatggcaaacctgcccatagctttcctgtacttgtggtagacctcaggctctgtttccttggcagcaattatattgttgtaaagcactgcaagctttcggtatggcagcttattatcaaagctgaaatacatctggataatctttggcacaggggaaatctgcctgtcatccatcgtaaggagatacgactcatacaagcctgtcagacgcagcttattctcgatacccagctcaaaccatttatgaaaacaggtatcatttttgtgtcccttaatcaggtagctgcatatgatgccgacatactctgcctccggacatatctcataggctgctgtaagaagctcatatactctgttatcgaacccgcctgccagatcaaccgcctcaaaaattgctccggcaagctcctttgtcagagccttttcctttacggcccagcttaggatgcgaagctcaaataccgacagctcctttatcagataaggatcctgtgatataagataataagcttcaatatacaaatacggagacgaacagcctcgcagtacccagtattttatatctttaagcttaccggcactgtcatcaaaatactgatccctcaaaaataaaagtacccagaacaaaagcacagagtcaggattttcataaaaaatcagctccacttcatgtgtcatattgtcaacgtatgaaggctctctctctaacagcgtcatcagatacagataatagccccagattggagctttcttatcaggattactgtgcttgaaatcatcaagaatccacttagcttcctgcctttgcctgttgataataaatgcctgagccttcatcagctcatacatatgctcatccggcacgagtgcatgcaggtggtttaatatgcttatagtctcgtttgcccataccccggtcactatccgcttcagcctgaaactggtataaagctccatgattccgaccatgcattcctttatgtcctttgtcacagctatatcacttatactgccatcatcatctcttacaccggccgtgatatctattgtaaagctctgatatacaccatcaatatatatgcggccaaaattacgtccggcatgcattgcagatgcatcgatgatatactcatacagataggttttacctataaaatcatcaagcgttaaaacaggcttagacagctttatgaattcacaatccgtgcgcaggcgtatctcggtatatccccagttatcctttgttatggtaaagcatccactctgtggctctttagaagccataaaaatctcctctgacttgtctacactaatggaaacaggctgttttttgtttacgccaatcaaaaactcctccatattctgaccggatggtctggcgcaggcaaagccctcataggtcagtctctcatatacattgtcataaggaattgtgtttaaaaaattgcgattataaaacagatgataagcctcatcccaattagatgccgcaagccttgtaaaatcatcaaggctctttacagctccggtggatgcttccgcatagagccttgtgattcctgcacaaaaagaaagactgtactctatctgattgcatacaatcacaaatttaccctcgcaggtatcgccctccgtaaggcccttactattaaattgataacgaatcctgactttctcgccctcgaagtgcggattcagacactccatcctaggattagtcgaataaactatgccacagatttttatctgattcgtactttctattacaaagcttcccgcttcgcttcttccctcaatgaccgaaaggtctattgtctcctctgaaaacgccaaaatcggtttcgtgccattaaatctgccggcagctatctgccctatacgtactcgcacaattgttaccccgtttacgttaaatgttgattttttatacacttattatataatgtaaattatatacgatttgcaatgctgttgcaatgcaaatagaaaggaaattacagctaatgatagaacaaaaggaacattttcacggcagtgaccttgaaaaaatagaaaaaatatacggtataaagaaagaaaatattgtgagctttgcggcaaatgtcaacccactcggtgaatccggtaaactaaggactgcactgtctgagcgcattgatgcaatcacaaaataccctgacagggagtatacttctctcagaaaggctatcggcagctactgcaagtgcgattacaatcacataacagtcgggaacggatgcacggagctcatctcacttttcattcagattacagctcctaaaaagacacttctgcttggtccgacttactctgagtacgagcgtgatttaaggataaacggcagtgatatctcctactattttcttaaggaagaggatgattttaggattgatccggatgaattcatctctgcaatcacagctgataccgaccttgtcatcatctgtaatcccaacaatccgaccggcagtcttatcgcaccggagaagctcaaaacaattttaacccactgtaaagagacaaatacttatgtgatgatagacgagacatatatagagtttgtgccggatgttgatgagctttcagcaatacctctgactgaattgtttgacaatgtgattattttacgcggcacatccaagttttttgccactccgggacttcgtctgggctatgccatcacatcaaattcacaaattcttacagacataaacacaaacaaaaatccgtggatgattaactctctcgccgttgttgcaggcgaaacaatgtttttggatgaagaatatatagataaaacaagaagcttgatactttcggagaaaaccagatgcaggcaattgattgaagaatcacacaaattcaagctttatccatcctacagcaacttctatctgcttaagatacttgatgaaggcgtggatgcacatatgctatttgagcgcgccataaggcagggcatgatgataagggactgctctaccttccccgggcttgaggagcggttcatacgattttgtataatgaagccagaggacaacacaaggcttattaattgccttacacaatgatgctaaatgcctttatataaacataacatataaccaaaaagcctccggaaggatttaatccagccggaggcttttttataaagtgaaacatagaatatgctttaaggtctatattattttgcagataagaactcgtcaataccttttgctgctgcttttcctgcacccatggcaagaataaccgttgcagcacctgttacggcatctccacctgcgaatacaccctcttttgaggttgcacctgtatcctcagtagctacgatacattttctcttgtttgtatcaagacctattgttgtagaagaaataagtggatttggagatgtaccaagtgacatgatcactgtatcgcactccatctcatactcagagccggcaatctcaatagggcttctacgtcctgatgcatcaggttctccaagctccatcttgataagcttaacacccttaacccagccattctcatcaacaagaatctctgtagggttctcaaggagatcaaagataactccctcttccttggcatgatgtacttcctctttacgtgcaggaagctctgcctcactacgtctgtatacaatgtgtgtctctgcaccgagacgaagagctgttctggctgcgtccatggctacgtttccaccacctacaactacaacctttttgccttttgagataggagtctcataaccctctttaaaagccttcatgaggttatttcttgtaaggaactcattagcagaaaatacaccgttggcctgctctccagggattcccataaatcttggcagtcctgctcccgaaccgataaatacagcctcaaagccttcttcctccataagttcgtcaatcttaactgactttccgataactacatttgtctcgattttaacaccaagtgccttgacattctctacttctgccgcaacaaccttgtcctttggaagacgaaactccggtattccgtagcttaatactccgccggcagcgtgaagtgcctcaaaaatagttacatcatagccaagctttgcaaggtctccggcacatgtaagtcctgcaggacctgaaccgataacagcaacctttttgccgtttttctctgcggctgtctttggcttgataccattctctcttgctgtatcagcaacaaatctctcgagctttccgattgagacaggatcgcccttgaagcctctgatacacttgccctcacactggctctcctgtgggcatacacgtccacatacagcaggaagtgctgatgactctgaaataatctcataagcctttgtgaaatcaccatttttaacctgctcaacaaatgcaggaatattgatagaaacagggcagcccttcatacactgtgcatttttacagtttaagcatctacttgcctctgccattgcctcttctttattgtagccgtagcaaacctcttcaaagtttgtggcacgaacctttggatcctgctctctgacaggtactctctttaatacatcgacttccattatttgtcacctccgcagtttccgcagccaccgtgatgtgttgcgccctcttcataagcaagcttagctctgccttcctctgtcttatattgctgctgtctcttcatagcctgatcaaaatcaacaagatgtccgtcaaactccggtccgtcaacacatgcgaacttaacctttccatccacgatcagacggcatgctccacacatacctgttccatcaaccatgattgggttcattgaaacaattgtaggaatctcaagcttctttgtgagcagacatgtgaatttcatcataatcataggtccgatagctacacagcagtcatatgtattgccggcatcaacaagtgcctgaagctgctggctgccgttgccgtggaagccgtatgagccatcatctgtacaaacatagagattctttgcaacagctttcatctcatcctcaaagaaaaggatatccttatttctaaagcccatgatgacatcagcatccacaccatgctctttaagccacttaacctgtggatatacaggagctgtaccaagacctcctgcgataaatacgatgtgctttttctttgtctcctcgaggttatcctcctgacaaagctctgatgggcagccaagtggtccgacgaaatcctctaatgaatctccctcattaagagccatcattctctctgttcctgcaccgatagtctgtactacgatagtaacagtctctttttccctgtcataatcacagatggtaagtgggattctctctcctacctcatctgtctttgcgatgataaactgaccaggcagacactcttttgcaactcgtggtgcctttatatccataaggataatattgtcagccaatttttcttttcgaactattggatacatagtcttcctcctagtaaatcttatcccattacatatgtaatctgatactcaattatttcatacttttttaattttaaatgaaatgatataatttttcaatatatttctttagatattccataaaaatatgttatatgcttatgaaattgtgttatcctctgacattcgtccggtactttaaatcaaaaacaggaaccaattcatgcaaaaaatgaaccggttcctgtatttatcagcttttatgagaaatatacaagctcatcctgcggcttctcggcaggctcgatggaaaccggataaagcaccggtccctttcccttgtactctcttgcaaactccacatgcacccttgcggtgatggtaatccacgatttgtgaggaatactgctctcatcctcatacttgcacttaaagcctataaaggtcacgtcctctatacagcaggtcatcgcaaacctgcccggtaccataacaccctttcgaagcttatcaggattgtatacaagggcaagaaatttgacaaccttgccatcgtacttcttgtaattctccatggcatccatataccagatggcataatctgcatctgaaagctcaatcacatcctgatttatatcaaacggcaattcctccggacgctcatcaatagtaccgtccttgcgttcgtagactatctgggctttgcggttgatattctttatggtacgccttaggtgtcctctgtctgtatcatcgtccgtcctgttaaatatgacaacatcactcgcaaatacctgttcctgcatcatcgcgcgcatattgttcatataaaggtcaaatgtagtggaatcaactgtggcgagcgactgcacgataacccagccctttggcagctcggcctctattattttatcaatgccccatgtgccgttgtactcgataaacacctgttcaggcaaatactgcatgttgagctcattcagctttgcagctgtaaactcatcctccgagtcgatctctgcaacctggatattggcagcctttagcttatccatatcatactccacatcaccatcctcgcacataatgataagcccctttgagccattagcgaaatcattctcgaaaatggtatccttaatcagtgaagtcttgccactgtccatgaatccggtaaataaatatactggaatctcttcagccattttgttagttcctttctgattattgtgtaactatgttaaatacatttaagcaagtccgaagagctcttcaagctcatgctcgtggatatctgttccgataacaacgatacgtcctgtatagtcaggctcgccatcacgaatctcgtactcgcccggaaccatatcaaagtaaatccacttgccgtctgtgccctctaccatgccctttgaacgaagaatcttgtcatcttccacaaactgcttaaggatttcttcgagcttagcgcgctcaaacttgtgaggtgtctccttgccccagcttgtaaatacatcatcagcatgatgatgtccgtgctcatgatcatggtcatgacagccgcaggtgcagccctcgccgtgctcgtggtgatgctcgtgttcatcgtggtcgtgatggtgctcatgctcatcatggtcatggtgatgttcatgctcatcatgatcgtggtgatgctcatgctcatcatggtcatggtgatgatgatgctctgcctcatcctgtgcatgacgtgcctcagcaagcaccttcatctcgagattgtcctgaccttccatagtcttaagaatctgctctcctttaatagcatcccaatcagtagtgataactgaagcctttggatttaaagcctgaatctgctttacacaaaactcaagctgctcaggtgtagcattctggctacggcttaagataactgttgtggcatactctatctggttgttgaaaaactcaccgaaagccttcatctgcttgcttgccttaagtgcatttaccactgtaacaagtgcattaagcttgaccggctgctctttttcgatatctataacagatttcatgacatctgataatttacccacgcctgatggctcaattaagatacggtccggatgatacttcgtaataacctcatttaaattcttaccaaaatcaccaaccagtgaacagcagatacagcctgagttcatctcagtaatctgaatgccggcatcctttaaaaagccaccgtctataccaacctcaccgaactcattctctatgagaactatctgctcacccttaaaagcctcatctatcattttcttgataaatgtagtctttccagctccaaggaaacctgaaataatgtcaatttttgtcattgtaattcactccttttcttttcactaagtcctattttactagcaataatacaaatatgcaaattaaatttttattattaaattatgttgacacataacaaaagaactaccgcacgcggtagtcctctctaatacattaattgtattttctttttctagctgcttcagatttcttcttacgctttacgcttggtttctcgtaatgctcacgcttacggatctcctgctggatgcctgcttttgcacagtttctcttgaatctgcgtaatgcgctatctaaagtctcgttttctttaactattacactagacataacctaaaacctaacctccctccagttgtgtattgtgcatcaactgttaggtatctatacttaattgcactaacatgtattttatcaaaatatccggatttgtcaagataaatccggatattttttaaagaaattattattttaattatatcaggtaaaacatcactccaaaatgactctaatcaagcttgataaagattgatgtttcctttttcagtgaatctgcaatctcatagttttcatccatcttgtgtgagatattgtccatatcctcaacaataagctgtgtactgtcagccgctgaaaccactccgttcacaccctcatttatagcatgtgaaatggtgttgattgaagaagaaatctcaagcatggactgcttcagtgaatcagtcttctccttgaaatcagtcatggtaccctcaatgaatgaagccttgtcgttgtactccacaccggactcaacaaatctctcaaactccggaagaatcgaatcattaatatagctgacaagaccattggcgttgtcagaaagattggtaaccgaattggtaactaccgcattgatacgctggatattgttggctgcctcctggctggctgcagcaagctggctgatctcactggctacaaccgcaaaacctctgcctgcctctcctgcccttgctgcctcaatagaagcatttaatgccagcagattggtctgacttgcaatgtttaaaatatcattggtaagtgaattgacctgctttacgctgttgctatcctcaatagccttctgcaatacctcgagaatctccgaaaccttcctgtctgttgactccatgtttgtacgtgcaacagactccattgactgtgcatgagccttcatatccttggtgtatccggtcagttcatctgtcttttcagcaataagctcaacctcttttgccacattatctgtgttggtattgataacagatgcgttttcggagatatcctgcatggtagcagacagctcctctgttaaagccgaaagatcggacacactgctgttgcttgtctgaacactctgacgcacatcatcaacaaccctctccatcctggccgagttggtgacaacagccttgaatatagcctgcagctttgtcataaagacattgatgcccttgcctacggcgtcaacctcagcattgttgataggagtaaccctctgcgtcaaatcgcccttcttgttatcaatattgactatgatgccgttgatttccttctgtgtacgaagcagaggcttgataaccatggtgacaacagcaaaaacaacaaacagtaatgcaattatacttattgcaatagtaaatgtacatgtgacaacagatgcgcgataagtactttcgaggctctttctctcctcctgtgtaacagaattgacatgctcacgcattgacgaaatagctttttcaatgttattagaatattttgcaatagagccatttgccgttttatacgcttcctcgtttttaccggcggcagaataggccattacattgccacactccttgaccaggcttgtatagttttcacagataattctatagtttctcttggtctccaaggttacataaggattataatcatcaaggagctgctttagcttttcctcgtgatttctcacttcacttacaatatcaatcattgatgatagatctgtcgatataatatgagccagtgccagtgtatgaatattcacagtctccatctcaatatcattaagcatctccgtgccaaccattgaggtgtccacaatctgagaagcagcatcatttacctttgataaatttttaagagataaaccacttgaaataacacttacaaagcctacaacaaaaacaggaataagtatcaattttgtacttaactttttctttcccttgacctttggtttgttattaaccttttgagctttttttgtgttgagagtttttttaacttttggtgcttttgcaggatttgctgcttttgctttcacctttttttgttttactgcgctatttttaacagctgctttacttttttttgaatctaatttcatgttatatacccctctactcagctacagattgtgttatccccgcaacaaaattatccattatctcctgaagatctgtattatcaggattaccggccgccattttttcgccaaactccgtcgcagcatcccagtaagaatttccaactctttggagctttccgtactgtgcctgatccataacagccataatagcaggaacctttttgaccgcatcatctgcggctgccgctttattggcagggcctacattcttcatctcaaagcgtagcttctggttatcctcgtttgtaaaccactgggcaagcttatttgcccactcaggatacttggtgtatgcatttacagccatatatttatagcctttaaacgatgacatctgaatctgctgtccggcacatgtgtatgtaggcagctttacagcaccataatcatcgccccataattccttgatttttgccgcattccagcatccactgacaccggcaataatacttccgtcctgtactcctgcaataaaatcgtcctgtacacagttcttaaaacccggcttagccgcaatatcaagcatagcctgtgctatatcaacacccttgatgtccgtgatgattgcattccagttgcagtggtttgtcacaccatcatcattcacgccaaaatcaagccctgtatttccaaaaaatgaatacagataccagcctgagctccagtccatagtcaagtacttaccatttgcccctgcaatgtcgagcatgccatcaagcgtagccacatcgctgtctgagaaataattcttattgtaatacataaaatatccattgtcagcggtcagcggatatccatataatttgccatcgatagtggcagcctcaaccgcactttcatcgttagcctttttaacggcatccacatcctctatctcataaagagcgcctcccgctaccatagaagttatctggtcatccgctatagggaatacatccgcaccattatgcacatttgataatatattatctctggcatcagaatcctctgactcctcgataattatattaaaatcagttcctttattagcctccttgaagctttcaatcatctgtgtagtaatatccacatcattcttcgaacaccagacgtgcatctttacttccttattcttcgctttatccgaagaattctccgtcgtccccacctgtgtattgtcatgtgatttatttgatactccgcatccagtaagtaatgaaaccccaatggcagccacaagtgttgcagctattaacctcttcatacatattcatcctttcagtttaatctcaatttataatttagtacaattttaccatactttcacacaaaaaaataggtctaatttgatttttttaacaaatttagacctatttttttaaaggatgcattttaaagcactatataagcatttttgttacttaatcatacctgaaagtgcgtcctttactgaagcaatagcatcaggaatacctgccgggttctttccaccggcctgagccatgttagggcgtccaccgccgccaccgcctacctttgaggcgattgccttgattaagtttcctgcatgcgcaccgctctttatggcagcgtctgttgccatggcaacaagatttaccttgccttcatttgaagaagcaagcacgataactccctcgccaagcttttccttgatggaatcgccaagatcacgcagtccgttcatatcaacgccgtcaacacttgttgcaagaagcttgatgccgtttacatcaactacctgatccataacatcgccgagcgcatcctttgctgccttgctcttaagagactcattctcactctgaagtgccttcatctcagccatcaggtgctcaagtctctctttgaggttggcaggagttgatttaacaaccttagcagcctcctcaagctccttctccatattgctgtagtaagcgaatacattgtcgcctgtgatagcctcgatacgtctgacgccagcagctacaccgctctccgaaagaatcttgaataccttgatatcagatgtattctttacatgtgtaccaccgcagaactccttagaaaaatcgcccattgatacgacacgtaccttttcaccgtatttctcgccgaagagagccatggcacctgtctttttagcctcatcgacagtcatgatatctgtgtgaacttcaatagcttcgttgattttctcgtttacgatatcctcaacccttttaagctcctcagcagtcatagcagaaaaatgagagaaatcaaaacgtgttctctcagcatcctgataagaacctgcctgctctacatgtgtgccgagtacctcacgcaatgccttctgaagcagatgagtggcagagtgatttctgcatgtgtttgttcttgtttttgtatcaacagaaagtgtagccttctcgcctgtgcggatcataccctctgacacataacctacatgtgcatatctgttgccgactacctttacagtatcctcaacaacaaatgtaccgctctctgtctttatgatacccttatcaccctgctgaccacccattgtggcatagaaaggtgtgtttggcacgattacagaacccttatcaccatctgaaagagcctcgactacatcatccgatgtggtaaggaaagcaatctcagctgtgtcagtaagcttgtcatagcctgtgaactctgtagtaatttcagaatctatatcattgtaaacattggcatcagcacccatatagtttgtttccttgcgggctcctcttgccttctgtctctgagcctccatacaactctcaaagccagcctcatcatatgtgaagcccttctcctcgagaatttctgccgtaaggtctacagggaagccgtatgtatcgtaaagcttgaatgcatcctctcctgaaagcaccttgaccccgtcagccttcatatgctcttccatatctgcaaggataccaagtccctggtcgatagtcttcgcgaacttctcctcttcctgagtgagcactttaaggatgaaatcctttctctcctcaagctccggataaccgtccttgctctcatcgatgacaacctgcgcgattttgccaaggaaggctccctgtatgccaagtgtacgtccatgcatagcggcacgtctgatgatacggcgaagcacatagcccctgccctcgttagatggcataactccgtcagaaataaggaatgtagacgaacggatatggtctgtgataagacggatagaaacatcgtccatctcatcgacatgatatttcttgcctgaaagctcgcagaccttgtcacggatagccttcatggtatcaatatcgaataccgaatcaacatcctgcattacaacagcaagacgctcaagtcccatacctgtatcaatgttcttatgctcaagctcagtgtatccaccgtgtccgtcaccgttaaactgtgtgaatacgttgttccacacctccatgaaacggtcacagtcacagcctaccttacaatcaggcttgccacagccgtacttctcaccgcggtcgtagtaaatctcagagcaaggaccacaaggacctgctccatgctcccagaagttgtcacactcaccggtctttggatctctgtagaaacgtgtaatacgatctccaggcactcctacttccttagtccagatatcaaatgcctcatcatcctcaccgtagatggaaggataaagcctgtccttttcaagaccgagcacctctgtcaaaaactcccatgaccatgcgattgcttcatgcttgaaataatcgccaaacgagaagtttccgagcatctcaaaaaatgtaagatgacgagctgtcttacctacattctcgatatcacctgttctgacacacttctggcatgtagtcacacggcgtcttggtggaacctcctgtcctgtaaaatatggtttaagcggtgccatacctgcattaataagaagcagactgttgtcattgtgaggcaccagtgaaaaactcttcattgcgagatgtcccttgctctcaaagaactcaaggtacatacgacgtaattcgttaacgccataactcttcttcattacttgaatctcctattcttttgtctttgcgtccttcattttacgaagctttacccctattaaagccccacaaaaacctatggccgccaaaacaatcataataataacatattgtgctacgcacatgaaaaagtcccccataattaccctcctaaatttattgaactaatttattataaatgaatttgtgaaataattcaatagttctctccaaaagcaaacgtctgattttcacgttcaatctcaataaccctgtcagccttgtccttattgctgagtctcttcttgtattcaatgataccgctgtagtcctgccacatatgcatagggaaaacaaactctgccgaggtattttgtaaaaaataatcaaaacccttgaactgatactccataagctttggatccatcgggaaaaaagccacgtttattggtttttccgaaagcttttttatctcatgcctgaaggctctgcgcactctgccgtttatcaaatcaccggcgccatcccactcccagtcgtttaaatcaccggcatgaaacaggctcacaccgtttgaggcaacataaaacgccacaccggcatcggtggatctaagtgtcattatatccagatcatccacatgatatgtattgtcaggtgaaacaaatgtcaccctgtccctgacagcgggatcaatgccatgctttgataaaaaatgcggactgatacggatatccttcgaaaaaacataatgtatattcggatatttgtcagccagacgcaaaatatccatatcataatgatccttgtggctgtgacttgcaaacatatagatttttgtatccggctcataagatggcagctttccggtaaaatgcataccctccaccttgtctccatcaaaataatcaaatataagcaccttgtcatccagttccacaagaaaacaactgtgatgtataaaaattatctgcatgtaacctactctctttcgcttttaaatcagtctttatgtatcattatgctatctttatgctatatagtcaacttatatttcgtataatatagtaattaaactctaattaccaatcaataattatatgattaaagggtcaaaataccttttgacccccatatcattatataattatacaaatcatgccaccatttgagtcattcacaatcttttgcatggtttcctgaagctttatctggcactcatcatccatctgcattattttgcttcttattccgtcctccataagctcaccgacagactttccaaaaatattagtcttccagactccactgtcactgttttcaccattttttatgtaatctatcagatcctctgcctgttccctgcttccgactatcggcgctatctcggtctcgatattagcccttatcatatgtattgacggtgaaatggccttcatttttacaccaaacttgtttccatgggctataagcacaggctcctccattcggatatcagacagctgtggcatcacaacaccataacccttctgctgcaccgatgaaaaagcatccttaatcttttcgtactcattcttttcctcagtgagtgaaagaatcagggaaatcagctccttttccccggaaacagtcacaccgcacagcgcggaaatattctcgtagtagtacttctctgcaatctcaattttaacctttaccacaccatcagacagccccatcccggcaagagataccacttttaatatatccccatccgattcaggcatatcagtgctcatctgtgcgacatccttcagctttgaagcccttgcaagaaaagtctttgcatatgtaattacggcctgctttacataattgtcataaggcagaagctgcacccatttcggtatatcatagtccactctagtgactgcaaattcatataagagcttttccatgatatctgtaatctgtcccatgcaaagtttttcacagtctataggaatagcagccgctttatactctctgctaagtgactcgcataaaagtcttgtttctgccgcaaaaggctttgtagtatttaccacaattacaaatggctttcctgaagcctcaagctgcatgactgtttctctttctgctgcctcatagctctgtctttttatatcgcctatgctgccgtcagtggttacaagcacagccactgtcgaatgctcctctattaccttttttgtacctacaactgcagcctcctcaaaaggtatatcctcgtcgaaccacggtgttttgaccatacgctcgccgtcctcctcgagataaccgacagcatcccccactgtaaagcccacacagtccacaaggcgtaccttcacagcgctgccatcatccagactgatagtaaccgcatcctgtggaataaatttcggttcagtcgtcataatagtctttcctttgcctgattgcggcagttcatcgactgcacgctttttagcatactcattgtccatcttcggaattacacaaagctccatgaaatgctttataaatgtggacttgcctgtgcgcacaggaccgacgacacctatgtaaatctcgccgtttgtgcggcatctgatatctttatataaatcaaactctttactgtccatagtactgcccataaaagcttcctccatacactttattctataatcaaagtgtattcacctgctctttgaattattacacataaaaaggccacaggcttcaaaacagataacctgtggtcttttgtaataatatatagtattttaaaccaaactacttagcagcctttttctcacatcctgctgtcttgcttgtagaagtatcagctgtttctttagcatctgatttgtcagaagcctcctcaggctcctctctcagacgtgcatacatctgcatacacttgtggagcttctttgcaagcttattgtctatctgctcaggagtagctctccactgccagttgccaccggtagttgaaggaatgttgatacgggcctttgaatcaagtccaagcagatcctgcataggaacaatagccatatcggcaactgatgaccatgccgcacgcatcatgccccagttgtagccctcctcctttgtgaggtttaagtaatcctttgcaaaccttacgcaatcctttggagctgtcttcatccagcccataactgtgtcattgtcatgggtacctgtgtatacaacacagtgctgcggatagttatgtggcagataatcgctatcttctcttgaatcgaaggcaaactggataaccttcatgccagggaagcctgaatcctttaaaagcttctttacggaaggtgtgaggaagccgaggtcctccacgatgataggaagcttgccaagcttcttctcaagcacgttgaataaatccatgccaggtccatctttccatacaccgttctttgctgtatcatcctttgcaggaatagcatagaatgaatcaaaacctctgaaatgatcgattcgcacgatatcataaagctttgccatagcactgatacgctttgtccaccagctgtagctgtccttcttcataacatcccatctgaaaagaggattgccccagagctgtccgtcagctgagaaggcatcaggaggacatcctgccacctcgattggatttaagtctttatcgagatagaactgtgtaggattagcccatacatctgctgaatccatggcaacataaataggtacatctccgataattcttatgcccttttcattagcatatgcctttaaggcagtccactgcttgaagaagagatactggagcatcttgtagaaggcaatatcatctgcatacttctcctttgcttcttccatagcctcaggttttctaaacttaagagcatcatcccactcgctccatgccactccgccattggcatcctttaatgccataaagagtgtgtactcatcaagccactctgcctctttactgcagaatgcctcatagtcagccggtgttttctttgaaaaacgctcatatgcctttcttaaaagagcatatctgttgacatacataatgccatagtctacatactgtggctttttgccccacttatatgactcgcactccttctttgtcagaagcttgtccttgcataaaagctccagatcgataaaataaggattgcctgcgaagcttgaaaatgactggtatggagaatctccatagctggtaggacagattggaagaatctgccagtatgtctgacctcccttctcaaggaaatcgacaaaacgtcttgcctcctttcccatagttccaataccatactgtgatggcagtgatgagattggcattaatacaccgctagttctcatgttatttttcctcccttttgttgtatactcattgtttggctgcgtgagcctgtattttaaaataatatataatatacatatgaaatcatatgatattttcgttttatttagttattataacatcataaagtgcaacttgtaaattaaattagttaatgttaatatcaaattaataaaaagtttaaaagaggtgtaacataatgaatgaaacaaccaggcaattgattgtgcataaggtaaagcataatacgaaacgccttataacatccattaaatgggtaatcttttctatcgttgtcggcatagtcgcaggaagctgcggcaccgcattttattttgctctgtcggtcgtaaccgatttcagaatgaaatacccttggctcatttactttctgccaatcggcggacttgccattgtaggactctatcatctgtgtaaagacgataacgacaccggaaccaatctggtaatatcagctatccattcaggcgacaaggtgccctttataatggccccgcttatatttgtatccacacttatcactcacctgttcggtggctctgccggccgtgagggtgctgcactgcagatgggaggcagcatcggaagctctataggcagggtattcagatttgatgaaaaggacaagcatgtcatgattatgtgtggcatgagcgctgcattcagtgctctgtttggcactccgatggcagccgctattttctccatggagatgataagcgtcggtgtcatgtattatatagcactcgttccatgtgtgataagctccctcatcgctcacggtatcgcatcatacttcaatgttacaaatgaattttttgctattgaaaacataccggactttaccattttaaactcagtaaaaatatctgtgcttgcaatactgtgcgcactcgtaagcatactcttttgtgtggcccttcactcaagtgaggcgctgtacaaaaaatatctgcctaacaaatatacaagagtattcattggtggctgctttgtcatcatagcaactatgcttgtaggaaaccagacatacaacggaaccggaatgagtgtcatccaaagcagtatagacggctctgtcagacctgaagcatttctgctaaaaatcatcttcaccgcactgactcttggcgcaggctttaagggcggcgagattgtaccatcctttttcataggcgcaacatttggatgcctgttcggcaatctgacaggctttgagccatcgctgtgtacagctgtcggcatgatttcactgttctgtggtgtcaccaattgtccgattacatcgctgctcatcagctttgagctgtttggctacgacggcatgccgtactttcttttggcaattccattcagctatatgctgtcaggatactttggcctgtatcgcagccagaaaatcgtatattcaaaatacaagacaagctacataaataaatcaactcactaacatttgctaactgcaaccaggcatgataccccaggtattattgcctggtcttttattgtgtaaagagctttatctcccgcagaagattcatctgcaagaacctcccacaaagcatctgcaagtttaattgtgattttatttttgccggcattgtaagctacgaacaccttctctgtatcgttatcaatagtatatgctacaacgccatcaggcatatcatccatgaaatgtacggatttcttaatctcatctactgtgtcaagataaaatgacttgtgagcccttcttagtgctataagccccttatagtaggctttaaggtccgaaaactgctcagccctgtcataatctattgcattgacagagaaaggactgcaatagctgttctctacaggagcaccatcagcctcactaatctttgttctcgcaaactcctctccatgcaggaaaaacggaatcccctgcgctgtaaaaaggatggctgctgcaagcttattcatacggatacgtatctcttcactctcatgtgaattggatatgataaacctgtcccagagagtatagttgtcgtgacatgacagatagttaatcgactgcataggcgatttggcccacttagcgcacgtaacagcctgctttagctcttcacctctgtctgcagctccattgacaaagcccagctcatccatatagaacacatgtccctttaccgcatcacgtatatcatccgaaaacatgccgatgcccggtgtccttggagcatttattttcatgccacgctctgattctggcagagtgctctctccacctgtccagccctctccgtacattattatatcaggatttatttttaagagagcttttctggcttcgttcaatgtctcgatatcaagtactcccatcagatcaaacctgaagccatcaatgtgatactcactcgcccagtagcacagcgaatcaatgatatattttctgaccataggcttctctgaggctatttcattgccacaggctgatgcatcagagtactttgcagcatccagcatgcggtagaaataattgcccgcagtcttgtaaaagcagctgtcatgaacattgaaggtatgattgtaaaccacatccatgattacaccaagacccgcctcatgaatcgagtgtaccatctccttgtactctctcactctcacggctccattaaacggatctgtcgagtaagagccctccggcacattgtaattgtacggatcatacccccagttatactgctcctttaaggaatcactctcgtcaatgctggcaaaatcatacgacggcataagctgcagatgtgtcactcccatatccttgaaatacgaaagagttttatcctcagtaaatgccttaaacttacccggatacccagaatgagcagatgcaccggcagacacatccgcgacagacacctcagtgataaccatgctcataggatctgcaagctttggcctgtcctcatctgcaaatccatcaggatcagtctttgacaggtcaataaccatagacctgtgcccatttacaccacaggctcttgcatacggatcatgcgagctgaatgtgccatctgcggtatgaacctcatatgtataataaacaccatccagattaccctctgcagtagcagaaaaaatactgcgaagctctccctctccgcgcatcatctcaagcctgcctgtctcggtcgaatcatttcccttatcataaaaaataacaaaaacactgtccgcaacaggcgaaaacagtgtaaatgttgtcttttcctttgaataaatcgctcctaatttcataatactatccttttcgtttattttcgtatacattataataaaatttacaataactgtaaatagggcaattcaaccaatttttaaagactttttagtcaatgtgccattttttcttttgctgatgtgaaacaatctttatatacaaagattgtggcagaaatctgccacaggttgtagcaagcttcatcctgagagtaggcactatgaccgttttgtgcttcatcatccggtctatggcataattggcgcagtattcagcggaaatccccttcagcgcaaatcgcacattcgccacatcattgaactctgtatcaaccggtcccggacacagacaccccacatacacatggctgtggctctgtcgaagctcacatgcaacagcccttgaaaggctcgcaacatatgccttagaggcataataggcagccatgtacgggccggcaggaataagacccgcagagcttgccacatttaagataaaacctctgtcctttaccctcatctgtcttaaaagctttttcgtcaggaagtgtacagcacgcacattgacatctatcatgcccatttccttagctatatcagtctcctcaaacaggccgcaatcaccgtagcctgcgttgtttataaatatttctatatctttttcctcgagatagtccgaaagtctctgacactcatcaagctgcatcagatccgcggtaaaaatatcacactcaagctccttatgagtggctttaagcttatcagaaagagctgtaagcctctcccgccttctggcaacaagaatcaggtcatacccctccttcgcaagtctctttgcaaactgctcacctattcctgagcttgctcctgtaatcactgcatacatatatcatatcccctattcttcaatcataagctccctggagctcgcgtcaagctctacgcttgtgttgtcgctcttatacatctcaagcagtaatagccacagcgtgtgaatctcgtaggtgagaatattggatgccggcactgagtatggaagcagtgtgctgatatcaaagtatctgatgccaagcggcggtaaaaaaacaaggttggttgtctgtcttttatcaccggcagtatgaatcatctcatatgtaatcatcacaaaatcactgcccttataggtacactcatatgacacgtagcactcatcaacagtccaggtgatgccatcctctgtaactgtcggctttacggcctcatcattgtactctgtagtctggcaggaaagcttccacttaatctgccccttctttgtttcctttaccatatcggtaagctctttaagtaattcatcttcttttttcatattatacacctgttttcattatcaatgctcatcaaccctcacaccatgtaccacaaacctgtatgtctcaccgcttgtggaacaggttgaaagcgtcacaaccttgtcatcctttgtcgggactatgcctgtatccttcattgatgaggcagccatcctctgtacgaatttgccaaatgtctcgtcaggctcaaagcccacagtatactcatcactgtcatcactaaccgtctcatatgagaaaatccggtacctatactttttgccatcgacaagtatctggaaatactgatggctgtcatagtaattctcatcacggttatagtacttaagctttccaaacatagacaggtttttcatattgtgtccataaatgattgtatggcagtcgctgaaatcagtcttgtttgaaccctcaaggaagatggagcctgcagtggcatgctctctcttaaaggtctttctgaggtaatagctgttatcccccgaatacatgacggggtagctgatatcctcattctcaaaataaatccagccaaccacatcagggttttcgctccttagaccggcgaaatcaatatctatatcatcataccacggtgactgtgcttcactgcctttcgtgctgtcatcatccttctttgaatcgtccactgcatactcatcctgaagcttctcatatgtcttatccgaggtattatagtcagaataaatcttaaacagatgataacccgaataagccacaagagacagaccaattatcagaactataaatctaattactttcttaaccatttgttttctccatttttttatcagtcagtactgtaataccggtaaaaataatcaacaatacaatgaatacaaatttaccttgcgaggttcctaaaaaagaagccggataaccaagcaccgggatatcaaacacaggcactccgaccacatcagaccatgcaaccggctgtacatcattcacctgattggcatcgccctttgtagtgtaggtcttttcatctgtatttatttcaactaccctgtgagtcacaagctcgccatttctgtaaaaggtaatggcatcacctgtctgtatcccaccggcaccctcctttacatacaataggctccccttcatgtaagaaggctccatgcttccgcttacaactaccatcggctcgatactaaacagcttgggagcaaatattacagcaataattaaagcaagaattaataaaattatactggaaataatgttaatcagtctcctcacgaaaacacctctatatcagaaaatatcatttgtcactcacaaaactgctgtagcagcttaccggctcaatatcaaattttatcgtcatattactatgtgtgtcacacgtatgattgaacctatcgataattcgcttcataacatcggaggctgtatcgcatgagcacttcgacaaaagcacaatgtactgtgaatcactgtactttgccgcaacatcacccacacgcaggcactttctaagtgctctttcaagtgtatgcatggaatccttcatctgactatgattcttatccggctgactgctatacattggcacaacagtgacaagcaccaggctctccggaatcgtagaacgtgcactctttctgacctccagatgatagatctccttgaacacaggatatccacacatgaaaacgccattcatgctctcctcactgatatcgtccttcacttcatctatattgtagcttgaaacaccctttgtgacagataaaagctcctcatacaccttgttgagcatgacagtctttctaacgccaagatccttgtccataatagccttggcagtctcataagtatcaaaagccatctgtacctttttggtacgcatgcgtgccataataagatatgagtatatctgctcatccgagcgctcatatacaatcgccctgatgcacagctgctcaagcttctcatagcagcctgtatcaatatacagctttgccagagcctttactgtattcacgtatcttgaatggtaaaatgcattgagcgtcataaaccagtgtgtatctgtcctaagaggcaggaaatcaccatgataaagagctatggccttctcatagctttcaatagcggtctccttgctcctgcaaaatgccatctcagcctcatttatatatctgtcaaactcttcgacatcaatggttacttccacatcatcattccatttgtacaagccgcctcttacagagactatgcactcttcgtcaaaagaagcatctcttagagccttcctgagtctgtatgccagatttttaagggctcctacaggattatcagtctcctcctcaacctgccatatagcctctgaaatatcctctatacagacacccctgtttctgttcatcgccagatatacaaacagcttttcaagtttctcagaccgccatgccccttcctggacaaatgttaagtcattacctaccgtaaagctgccaaaagtttttaatttaatcatataaatctccccatttctgacattaaacatttttatatagtcataaacatattaatctttatgaaatccctataaagtgcaaaaattaaattcagattaaaatttacgcaaatcatcactgccgtcgtcgacagtattttgtattttcattatcttaacaaagtatgagtaatcatcatttacctttacctcacacctgtcacccaccttgtgcccgaatatagcggcaccaagcggtgactccttgcttatcagattctttaaggaattgccccttacggttgtgacaatcttgtatgtctcagtctcatcatcatcctcaaaatacacatcaaccgtattgaacatacccacctcatcatcctttgactcatcggatatgacaacggcagtcttaatcatcttctcaaggtatctgatacggctctcgttctggttcttaaactgcttggcggccttgtactcgaagttctcgctcaagtcaccctgagctctcgccacctttacgtcatcaagagccttctttctgacaacgagctttctgtactctatctcgtcctccattttctttatatcatttgctgtcaattcatcatgcatgtcttaaaccctcttcctgcaaaattgcgtcaaaatgtatttagagaagccctgcgataccacaaagcagcacaatcgcaccaagaactatacggtaccatccaaacacaataaagttatgcttctttatgtagcccatcaggaatttgataacaataagtgaaacaacaaatgccacaatcatcccgataatcagaatagcagcctcttcccctgtaaaatgaaatccaaatttaacaagtttcagaagactcgcaccaaacataaccggaatagcaaggaaaaatgtatactcagcggcaacagtccttgaaacaccaattaagagagctccgacaatagtagcgcctgaacgtgatgtacccggaaaaacagctgcaataagctggaaaaatccaatcataagcgcagtcgtgtagcttatgtcgacaagtgaattaatcttagcagacttgccattatgtctggtctcaatcacaataaaagcgataccaaagagtataagcatgatagctactgtctggaaattgtaaaacaatctctcgaatacatcatcaaaaagcactccgataatagctgccggaatagttgaaacaagaatatgaaaccacagcacgaagatatcagtcttgatccatgcaccgatgccggtctttgcaagaggagctttgttattcttcctgccgaatggccagatctggctccagaacaaaacaacaaccgccaaaatggctccaaactggataaccacctcaaacatactgtaaaaatcgtccgggttctttcctattttaagtggtaaaatctcattcaaaagaatcatgtggccggtgctgctgataggcagccactctgtaataccctccacaattccaaatataacagacttgataatgtcaaagatttccataaataaatttccttcctttaaaatattttctacaatcaatttattatattatttttccaatcacaagtccatggaatttaagaaaaatttaaattaaatcttttcatattagaaaattttttgtaaaatactcatagcaattatgaaaaagtgaaaggataaagacaaaacatgaagaaaaaaatcagtatcatgctttgcatagtactcttcgccctgacaggctgcaccaactccggcagcacaatacgcttcggagcagccgatatcggtggaatgtactattcatttgcaaatacatttacggagcttgccaatgaacagggctatgactttacctgcaaggtccgtaccacagcaggctctaatgccaatataaggcttttatccgatggctatatagagataggcatcgcacaggcagacctgatagccgacgcctacaagacaaatgaagatttaagggctatagcagggctttacaccgagacctgtcagcttgtggtccgcgctgattcagacatacagactcttgacgacctgtccggacacactgtaagcatcggagcagaggaatccggcaccgagcgaaatgccacacagattcttgagttcgccggtatgccatcatcccttgttgccaccaaaaacctggactatatcgaggccacaaaagagctaaaaaccggtgatatagatgccttcttctgcactgccggactcaccaccactgtcatagatgagctctcaaaggaatgcgacataaggcttatcccgctgactgatactgtgataaacaagatgcttgaaagcagctctgcctacacaagcgaggtcatacctgccggcacatacacaggccagaccacagatataagcacaataggtgtaaaatctgtgcttatcacaaagtctgatgtatctgacgatacaattgagcagcttacatcgctcctgtttgaaaaagaaaatgagctctcctactccaactctcttaagcttgagctgacatataactttgcaacagacggtatacctattccatttcacgatggagcaaaaaggtattatgacgtctgtggatatagtacaaattaattcgcgaattaatttttagtccaatatataatattcaaaatataagaagaaaataacaagaatataatcaattaaaattgaaaggtaacacatgaaaatacaacttgacatgtaccagacactggccgttgcagtgcttgtactactacttggaaactatttaaaaaagaaaatatattttcttcagaaattctgtattccggcgcctgtcataggcggactgatttttgccatcatgacatgcatatgctatgtcacaggaatcgcagaattttcctttgacgacacactgcgcgaggtctgcatggtattcttctttacatctgtaggctttcaggcaaatctcaaggtattaaaaagcggaggcaaatcgctcatcgtattcttgggactggttatagcgcttatcatattacaaaacctaaccgccgtggggcttgcaaagctcttaaacttaaatccgctaatcggcatgtgcaccggctctattcctatggttggcggacatggcaccgcaggagcctttggcccggtgctagaggacttaaacataaagggcgcaacgaccatctgtactgcagcagctaccttcggtctcatctctggaagcctgataggcggacctcttggaaaaagactgattgaaaagcatagcctgcttaatacagcagcaaacgatgacgacagcctgctggtggaggatgagaaaaagcatgagcgccacacaaatatgtatgctgatgccgtattccagctcatcctggcaataggtgtcggaaccatctttacaatgctgctcacaaagacagggctcaccttcccaatatatataggagcaatgctcgcagccgcactaatgcgaaacatatgtgagtacacaggaatcgctaccatccatatgggagagataaatgacctgggaggtataagcctctctctattcctaggcatggcaatgattacactaaggctctgggagcttgcatcactcgctctcccgctcttcatactgcttgcagcacaggtgcttctcataatcatattcacgtatgttatcgagttcaacatcatggggcgcgactacgatgcagccatacttgtgtcaggcacctgcggcttcggaaccggagccaccccaaatgccatggcaaatatgcaggctgtctgcgaccaatatgtgccatccatcaaggcatatctgctcataccgcttgtcgggagcctgtttgctgactttttgaacagccttgtaatcacattctttataaacttactgtaaaacaaccggagaaaaatatgtttgaaaaactgaaaaaaatatttaaaaacagagacgaaaaagaaaaacataattacgatttaacttttgacaacgtggcaatacctgaggttcacgtaaaaagcaccgaaagtcacgaggacactgataaagaaaatgcacctatcagctatgacaatgttgccatacctgaggtgcatatcagaaacagaaaaaataaataaactaaaactccatatgccttttgccctttcacaaagctcctatccttccctgcttattgtccttattctgccttctcaacggatattatctttccctcaaacggatctacctctgaaatagtacctgtatacttaacagtcaccttatctccgcttgcggcactctcgagtccgtcaggcttctcgtcgaatgtaaagctgtatggtgtatccttgtcatcagtcactacaaacatgaagtcttttatgtcatcgattgttcctgtaagctccttctcttcctgtgagtccttatcaccttcatccttggtatcagcctgctttgcactttcagtgccaactgccttatcctgctttgtatcgctctgtccgcagcctgcaaacaagccggcgcaaagcatagctcctattacaattgtaatgagttttttcttcattatgatatacctctttctttatttataagcactactatgagtacgttttctaaagagtactcttctatccacctaaagtaaatagaatacataaaatattaaaaaaatcttacgaattactgcttttttgagcctcttgcgagccttgcaggataccatttttcaaaccatccggtaaatatgcccatcaatacaggcatcagattgtttacgacaataagtgtagctccaacagctgcctttttcagcagaaatgtccacactgctgtcaacacgtataatactccccatgccgccgcaagtatataattcgtcttcataaagagaggatttttatgtgcggcttcaccgccataattgtatttcacatatgttgcgcataaaggctcctttgtcaggcatgaaaccagccagaacagcccaaacaccagatatccgatatctgttgatatgtcacctgctcctgtcaggcttgcaatcgcagaaagtatggcaacagccacaattgagagttgatcccatattacaaatttatgttttctcataataaaaggcatagcggctgccaccaaaagagcaatcacagaccctttttctgtattaacagaaactgctatccaaaacgtaatccatggtatgagcattgtcatcatggatggatttttctgtacctccacaccttgtgatgttttttctgcctctttaactgccgatgtacttccaaaaaatttatcccagtttaccatcaaggaaaaatcacctgttaccgtatacatctgctttcccaatgcctctgcgccgcctatctcgcctcgggaaatagccgaccataccgtaaaaggcgtatctatgcgtgtagtcgcggcaaggctttggtcagtaaacacctcactacctttatcatcaagctttatctggtatgtatgcttcaaatcggtatagcatatctcaagcacgcgttcctttccgtcgtaggcatctttattgtataatgcagccatctgtctggtaaaaacaaggtcctctgcttccttctctccggttgttttgctgatgccccaactggcatccgccatcctttcaaacacatcccttggatataaaagagtatggagcgctgcttctgttttttcagatatttttcctgtgatggcatattctgccccggcactttttaccgtagccagatattcgtcagtcctctttgacagctcttttacatgaaacagctcaccctgaccacaaaatatggttgtataatgcccttttccaaggaaatggtcaaacatccgaagtacactgtcataatttccctctgcagaataaaagccacaggtagagattagcacatgccttttgccttccatgtcatatctgcaatcatggctgccgcttccgtatccgtcatcctttgtactcataaacggcaggctcatgggaagctgcctgtcaatcacgttctttagtattcccggcacactaaaatagtacagaggaaacgaccacacaacaatatccgcttcaagcattttcccaataacagtctgcatatcgtcatttatgcagcacacccccggtgtcttctgccagcatgcaaagcagcccttacacgctcctacattcattgaggctacatgcatttcatcaatggatacagcttcatttttgctcttatatccttctttgaagccttctataaagctgtttgcaagccttaacgaattgcttcgtttgccttttggacttccgttaatcagaagtatgttcatgctttatgccctcctgtaagtatatagttaattttagtatatcggattgacaggcaaaaaacaattaaagtttagacttagaaacaataccataattatacttcaaaatacattcaaattcttaagcatgccttgtaattatagtactatgatagtaaaatagagttatattatttcaaatcaggagaattcatatgggttacgatgaaaaaatttttaaagcaaaggcgaatatcaaggcccgcagattatggcttgtttttgctatattgctgaccgcaaattatggtaccgacacagtaaatggcgcttattctgtcagtaattatatcatttttgttattttatgctggctgcctttcgtgtgtggtgacatacttctaaaaaagaaggggaaggataatgatcattacaggcttgcatttgtcatcggatatggtattttttacgtatttcttttgtgtacgacaacctcaccgattgcatttacctacatacttccgataatcagccttattgtaatatttaaggatgaaaaattcatgatttactgcgctgttgcaaatatgctaagccttattgcaagtattgcatttcacatatttgtgctgggtcagaacactgctatagaccataaaaactttcagcttcagatagcatgtcttttgctttgttacataggctatatcatgtcggtgcgccacctgactgagtcagatgctgcactcaccgaaagcataaagtctgatttaaaccgtgttgtcacgacagttgagcaggttaaaaccgcttgcaacactataatggacggtataaccgtggtccgtgagcttgcttctgaaaacaagcatggctcagatgttgtcgttgagggaatgaataagcttaccggaaataacaagcagcttcagtcccacactgcttcttcccaggaaatgactaccgatataagctcacaggttgagaatgttgcagccatgataaatgatatggtttccctgacaaccgaatcaggcaagcatgccaaggtcagctctgaggaccttgaaggtcttgcccagacaacaaaaaccatgtcagagctttctacagaggttgaaaacatcctgactacattcagagatgaatttgagatggttaaaaatgaaaccggaacaattgataatatttcaaaccagacaaacctcctcgctcttaacgcttctatcgaggctgcgcgtgcaggcgaagccggtaagggatttgctgttgttgccgaacaaatccgtactttaagcactgagacaagaaattcatccggtcagatcagtgaggcgctctcacggcttgacgagatttccggaaagatgacctcatccattgaagaaacgctccgtctcatccagctcactcttgaaaaggtaatgcagaccggtgaaaatgttgagaagatcacaaaggattcccataagctcggaagccatatccgtgaaatcgatgccgcaatgcaggaggttgaagcatctaaccagcagcttgtcgacaatatggaaaaggtatctgacatcgtagaaaccatgacctcatgtatcggtgcttctgacgcgataagccgcaagatgctcagtaaatatgatgaaagtgcaacaaatatcaataatatcgagactgttatccaatctctcatgcacgagctcggagttggtggatttatgggacttgatgatatccgcccgggtatgaaggccaaagtgatcctgacagatgtacagaccggcaacgagttccattgcgaagtaaaggctgttggcgaaaacggtcttaagcttgtatcagacggcttatctgtagactcatccagaccttgcaatctgtgtgttacagttggcaatgtaatgtactgctggaaggatctcacaattacagatgaccttatgataacagtcaatacgcagcctgaaatcttgaaccgtaggaaatacccccgcatggatttatcaaacaattgcactatcaagcttaaaggaaccgacaccacattcaagggcacgcttgacaatataagtgcaaacggctttgcatttttgaccaaggatccttatttcgtggatcataaaggagcgaaggttactatctcgatagaggactttgcgcttgctgaccactcagtgttggatggatatgtaatccgctgctcaaataacgacggaacatatatcgtcggctgccagatgcctgaggataattattatatccagacatatgtcgatgaacagcttcgtgctcactcataaaaataaaagctatgaaagcctttaaccgggctctcatagcttttttgattgataatcttctatcctattatcttctatctattatcttctatctattatcttctatctgcatgatgtttttccttctctgcatacatccggctgtctgctatctttagtaggctctcaaccttgtcagcatcggacggataaagtgcatatccacagcttactcctatttttattttacgaccatgtatgttatatgggttgcatataactctttgaagcctctctatgccctctaagcaatttttttcatctgcattgccatctattatacatgcaaactcatcgcctccaatacggaatgcataatcagctgttcgtatgctgtttataatgcgctttcctacattacaaaggacctcatctccgaccggatgaccatatatatcattgaccggcttgaaaaaatcaagatccataaaaatcattgcaaatgcttttcctctctggactctcatattcatgatggtatcaaaatatctcttattatatagctctgtaagcacatccgtgttcgccagatctgccatcttatgcttttcgcctatattctgcgagacaagcagatactgcgtcagtctgccatcctcccatcttgccggaataacggtcattgaaagaaatagcttgctgttgttctctgcacattcaaatttaaaataatcatgctcatttttaatttttccgtaaatattttcaagagaaagcagctcagagatttttttattttcatcctctgaaagcagggtgtatctgtttgatatagcctccaccagatcactgtagcagccacgctcaggataaagctttcgagccagtctctcatgatattcgtacgtatcattttcaatatcacacagtgcgtatctgtccacaattcttgccagactgttcaacagcatatcagagatttccttttcatgagatactgccatgacagtgagcttttccttctgaagcttgagcctggtattcttcattacatacataaaaataagcaggattacgcagatgaacattatgcctatcagtaaaattgtactgtactgcacctgaaacatgaatgaactgacagcctttgcttcaacgatacctactatagaccagtcctttattccggtaggctgatatgtcatataataatcttttttattgtatgaaaatgcaaaacagccatcactgccatcagctatattggtctttacatcgcaaaaatcatgtgtatcgtaatctgttgcattatcacctatgaaattaatcagattatcaaccatatcatcaatctctgtctttggttcgattgagagtatgacatttcctgcagaatcaacaatataacaatcactttggtctttatatgccttgtctccgagcatcctttccacgtccgtattatcataactcacagcaagccccgtatatgaaattccatccacagtaatcccatcagacggatatgcaaaaagcacctttctcacgccctttgtagatatatagctggatatcacaggctcatttgccttaaaaagctcattgaatgcatcttttgcattatcagccactccgcttctgccttctatggtgataaactgattcttctcattaaacaggtaaaaatcactgtaatgccacttttccttttccctgacaaaatcattccactgcagaccactgtcgttattaagtattttggtcaaataaacattccagtcagaaagaacgttccaattgcgttgcgcaaacatattaaatgtctggttcacctgactgtatgaggctttgacatttgatgtaccctcattatatatctggcggctcatatatacattgtagctatgaatgctgaatattatgatacctagcaatgcacaggttatcacaattgtacggatgttcttcttttttatgatcataaatgtgttctctccataccttattacctacatcgtatctgtgcttcgttctctattcatatcacatatacttgtatttctagtactaattatacaacatatagcgcctaaaatctatactctcggcgcgaaatgtagtttttatggtgtgaaatgcagattggcaataaaaaacaagggaaagtactaaatactttcccttgcaaaatcttatatatagacttttaaattagaacctttgtctattttgccagctctgcgatagcagcctgtgctgcagcaagacgagcgattggtacacggaatggtgaacatgaaacatagtcaagtccaatcttgtggcagaactcaactgatgaaggatctccaccgtgctctccacagataccaacgtgaaggttaggattaactggctttccaagcttaatagctgtctccattaatttaccaacacctgtctggtcaagcttagcaaatggatcgttctcgaagatcttgttgtcatagtaagcgttaaggaacttacctgcatcatcacgagagaatccgaatgtcatctgtgtaaggtcgtttgtaccgaagcagaagaaatcagcctctgtagcgatctcatcagctgtaagagcagctcttggaatctcgatcattgtacctacatggtacttgatgtcagcatttgcagcagcgatctcagcgtcagctgtctcaaccacaatcttcttaacgaacttaagctctttgatctcacatactaatggaatcatgatctcaggctcgatatcccagtctggatgagctttctttacattgatagctgcacgaataacagcctttgtctgcatcttagcaatctcaggatatgtaactgcaagacggcatcctctgtgacccatcattgggttgaactcatggagtgactcacagatagctttgatttcctctactgacttgttcttagcctttgcaagcttctcaatgtcagcctcctctgtaggaacgaactcatgaagaggtggatcaaggaaacgaattgttactggacatccctcaagagcctcgtataatttctcgaaatctccctgctgatatggaagaatcttgttaagagctgtctctctctcctctactgtatcagagcagatcatctcacggaatgcagcgattctctctggatcgaagaacatatgctctgtacggcaaagtccgattccctctgcaccaagctcacgagccttcttagcatctgcaggagtatctgcatttgtacgaaccttaagtcttctgaactcatcagcccatgccataacacgtccgaactcaccagcgattgaagcatcaactgttgggatgattccagcgtagatgttacctgttgtaccatcgatagaaatctcagatccctctgtgaatgtctgtcctgcaagtgtgaacttcttgttctcctcgtccatattgatatcaccacaaccagatacacagcatgttcccataccacgtgcaactacggctgcgtgagatgtcataccaccacgaactgtaaggataccctgagcagccttcattcctgtgatgtcctccggagatgtctcaagacgtacaagtacgactttctctcctctttcagcccatgcctcagcatcgtcagctgtgaatacaaccttaccacaagcagctcccggagatgctccaagaccctttccaagtggagttgcagccttaagtgcagcagcatcgaactgtggatgtaataatgtatcaaggttacgagggtcgatcattgcaacagcctcagctggtgtcttatgtccctcatctactaaatcgcaagcgatctttagagcagctggagctgttctcttaccattacggcactgaagcatatagagcttcttgttctcaactgtgaactccatatcctgcatatcatggtagtgattctcaagagtctcacaaaccttaaggaactcagcgtatgcctctgggaactcctgctccatctgagcgattggcattggagtacgaacaccggcaacaacgtcctcaccctgtgcattgataaggaactcacccataagcttgttctcaccagttgcaggatcacgtgtgaatgcaacacctgtacctgactcgttatttaagttaccgaataccattggcattacgttaacagctgttccccatgaataagggatatcgttatctcttctataaacatttgcacgtgggttgtcccatgaacggaatacagcctcgatagcaagctttaactgctctacaggatctgaagggaaatctgatcctaactgattcttgtactcagccttgaactgctctgctaactctttgaggtcagctgctgtaaggtctacgtcaaatttaacacctctgtcctctttcatcttgtcgatgagctgctcgaagtatttctttcctacttccataacaacgtctgagaacatctggatgaaacgtctgtatgaatcatatacgaaacgctcgaatgctggatctgggttaccagcgatcatagctgcaacaacatcatcattaagaccaaggttaaggattgtatccatcatacctggcattgaagctctggcacctgaacgaacagatacgagaagaggattcttaaggtcaccgaatttctttccgttaacctcttccatccattttacaccttccatagtctgagccataatctcatcattgatcttacgtccatcctcgtagtactgtgtacaagcctctgtagtgattgtgaaaccctgtggtacaggaagtccaatctctgtcatctcagcgaggttagcacccttaccaccgagaagattacgcatggtcatgttaccctctttgaaggtatatacccacttgtttgccattttgcaattcctcctaaattttatttctggtatggtaaaaaaaaaccatccatatacttgattaatgtgtgcactcatacaagcgcacacattaataataccataatttcagcaaatatcaactaatttttattatcttttcccttatgtttcatactatttttttgaacacggacagacttaacattctttactatgacaaatatcataattgcaagaattgcaactatcccaagcgcaccaatagccagcggaacgaccattccactctcactaatcatggtggcaagcggtacctgctcatctgctatatcatgcttattgtcgtttgccgcctgcggtacctgctcatctgctatatcagtatttggctgtgcctgcggtgcctggattccatcctgcggatcattctgtccgtcaggcactattgtgtttgcggcatttgctccatctgcagctccgttatttaccgctcctgctgcattgcccgctgcattagctgcccctgctgcatttgcagctcctgcggctgcctgattgccgcctgctgcagtattgtcatttgctccatttccggcagcagccatgcttgatgcagcccttgaatatacaaaattgaacacgttttctgacgcatttgacgacagctttcctgtctgattatagctgtccggaatatatccatctatatacagatatgctataaccggctcatcgcccacattaccataataggtacggctttcagcaagcttattgccatctttatccacatagttgactgtatactcagcaagctcgcccggtatgccgtatgcaacaacatagtcctgatctcccgatacgagaaaagccgactgtgcaactgtattattgtcacggccgcttaatctgattccctttacgtagtacttgctgttttcattaagtgccacactgccctgtgcatcacagctgatgacatctccatattcaagacctgtgacaattattttgtctcctttagcagaaacagaaaccgaagcctcattgcctgatgccttgcgcacctgcacaccaccgtttatgcttccctgacctccggctgagaaggaaacagtgtatgtatatgaaaatgcctttgcatctgctgtctgtgagaaaacaccggttatgacaacaagagctgcaagaaaatatttaagcaatcttttcattttgcttagccccctttctgtcacttacgaaagccagtatcatcaaaataataccaatcacaaacactacagctgacgctattgaccagatatctccggtctttaccttgcttgttgtagttataaatgtaggtggatttgataaagttggatcagagttatcctctaccgcaaagttcatcataagctttgcgagtgtatcctgatatatattaccctgactttctccgtcaagccctactaaaagcttcacactgcctccctctccaggctctaatgtctttaaataaaagaacttatccagagagtttgtagcctcattgagtccttttccggctgttgcctccttctcaccacctacgctggtgctgctgtatatagtgtcctcttttccatccggtcctacgaaagtaagaatatatgagtatccaccattttcagccacagcctgtgtatcctcaagactctttaacacatcattggacatataccatttcgtcgaaatactgctgttattctttatatcaacggaaaatgtgacagaatctcccggctccatctgtgagacagaggctgctattttatttgaatcgaacgaactgaccatctccttgccggtaaactcacatgagccggctgtagtagtattctcatctgcaaatacagtgcctatcgaaccaaggataaacaacatgcatgataataatgcgataaattttttcatattgtcctcctttactctaagctaagtgccccgtcatctgatatatttacatcaacaccccacgcactcttaattgcgtcctttgcattgtgtgtctgtactgcatcaacagttgcctccagcacaaagctcgcaccatcatattcataggtagtagtgatggttgtaagtccgttatcatcagtctgtgatgtctgacccacaatggttgcaatatcgccggatatactgattttgtctgtaaaatcagtggatgtctgacctttttttaaaatagaattgtagtaaaatacatttcgctctgtagtctcagcactcttatcctctgtccagccatcgtttgtaaaaccaatctgtatctttgatggatcaagttttgaaagcttatcacctgtctccttgtctgcccagtaatgctgcacagtcactctcacatactcatctatcgagccgctgtttttgacagcaagcttctcatcgtactttttgtcgagaatcagtttttcatctccggcattctttagcatatctccaagcagcactcctgttgcctcgctccagtcatcatccttatgcttataatcacgccagctcacatcattgccattctcagtcaaagtaacaccgatggatttgatgtcaatctgagccagataattatcactcatatatgtaagagtcgcttttgtagatccaatcgtcgatgctgcaagcattatcgcagaggatgctacaagtataattggaagttttctcttcattactcttcgccctcctctttatcatattgtgctgtcgcatcccattttgcatcaggtgcgacacacggattgccattctcatcatatgtgacaggagcacactcctgaaccacaactacattgaagctggtctttaccttttcactaactgtgatagctgcaacaatcggctcggttttgcccccaaccggcactacctggctgtaataccagtagccatcatctgaaaggctccagtttgagcctgatgcctgtatatcaaactggcttgctgcaattacctttaccctgacaaaacagtctgcttttcctgtattctcaatctcaatagttttcttccagtccttaaacttctccttgacatcagttgtaggaccgatatctactgagataccgccctttgccgtagcataggttgtaaaatatgtcagtgtcggtttaactgaaacaccacagacaatgagcgttgcagcaaaggctgcacatacaagaatacggtgatttctattaagttttttacaagactctgataattttttcattaattctgcacccattcccatccggttccgtcatactcaaaatggttcacgacaccggtactataaatcaatttgtcgttgtaatcgtttgtgaaatcaacatctgcggtctcaccggccacaatctgtgtctctatgctgtctgaggaggtcacctgataactgccagcggcatatacctcctttactatcacccttgaccctgctggaatattgtcaataactacgctcttagctcctgtactgtcaaatctgattgacgcaatatcggaaaacaccaccttgccatccctgtcgtaggcctcaacatcaaatgcaaacaccggctcaccgagtgctgtattgtatgtctttaatgtcttgttaatctgtaagcttcccataagcccggtctgttcaggcttcagctcgatatcgatatcatcatatatccatgaatctgagccgcttcctgtcatggcaaactcattattaggagccgaaaccagatacggcacaaatgtgtatccaaatcttgccgaattagccggctttgcatacaccagatacagtcccgtcttagcacctgtgacggttccccttccgtttgaaacatctattttctcatctgctgtcagagaacctttgtctgcaatgtccgcagcagtctttgccatcttttcccagtcatctgcggtagtcttgctgcttatatctgatatagatttagccagctcagcaaactgcttcgttgcagtgtatacatcattctcatctacatctgccactctgtaaagctctacgggaaaatccacagtgtacagatcctcccatgtatcagggatatcaactgttatagagcatttcttatcaatatcaatatgcgtccttgcaaaaatgcttccacatggcagggaaaacaagacaatcgctgctataactatactgacagctctttttatactattgtgcatttttcctccttcctgattctatctgaatctatacaatatcgttttactaagtatcttacaaattataatatacaaaaccagaaacaaaatgccaagcactatggcttcatgtaacggctgtacctgctttacatcctcgacaataagtccctgtgcatcatttgcaatcctgtgacctctgataagaagcctgtgggaatttacaccatacggtgtacatgtgataagagtacagtaatcctgaccttcctcaatctttaagtcattaagctcatctggtaaaacaatccttatctgatcaacctcgtaggtcagtgtctcgccaagcacatacagcttgaaggtgtcaccctctgccatctggtcaatatccgtaaaaagcttagatgacgtaagtcctctgtgtcctgaaacagcacaatgtgtgcttgctccgccaaccggaagcgatgtaccctcgatatggccaacacctatctgaagtattgtattgtctgtgccgtggtaaatcggcaatgagacattgatggacggaatctcaacatagcccatgactcctgtgccagatacatcaagtaggctttcatactctgcgctgtccgaatcagacatatcatatctatcctgcttgcttaatagcttttcattgtaagcctctgccgcctgtctcatttcttcaagcttttgttcatctgtattgtctactgcatcgacatagcttgcaattgcccttgactgatggaatgaattccagtaatcactcaccgtcggatatagcagtaaggacagtcctgcaagaaacactatgacaaacaaaatagttgataattttcttctcatagcactctccttactgttatcatttgcatataattatgcctattgtaactgccacgaaccactaaagtggctcatggcagatatattttatcataaaatgatattatttaacacgcttctttgttacaagaacaattccgccacctacaactaatatagcaccgattacataaattgcaacacgtccggcaccaccggttgaaggaaggactgagccctttaagttctgtacaggtgtgcttaagctaccctcagctttatctgctttaagtgtaatattaccggtcaccttatctccgcttaatgacgtaagctctggagcatcagactcaattgagtggtctgctttgattgtgaacgcaatatcatttgcagtattgtattcatcaggagtctttgtctccttaagtacataatcaccatcatcaagaccgctgaatgtgaagacatcattcttatcaccggaaattaccgctttgatttctttttctgatccgtctttaagctttttataaagagtgaactccgcaccatcgagtgctttattgttctcatctaccttgttgattacaaccttgtatgtaaatacgattactgtatcttccggagtctcacctttgtctccctctccgccattgttagggttgttagagaactcaagcttaaccttatttgggtttccttttgagccgataacagcattctcatttagagttgcattatactcaactacaaccttatcaccatttttagcttcaaagccctttgctaaaatgttgtcacatgtaaaagtaagctttttgctagcagcgtcataatttgttgtaaagaatgatgtaacatccttatcacctaatttgacagtaacagttccctcattgaaatcaagtccctgtgaaagagtatcatcaaatttgaggaaatatgacttatatgactcaatatttacaggtaatgtagctgtaagctggaatggaaccacatctgtgatatcataatcggctgaatcctgccatccggttgtatcacctgttgtgtcatttgtatcttttactttcttctcaacagaaggtacatctgtctttggtgtgattgttgtattagcaacgatattgagaatatactctgtgtaagcctcgtcacctgttaaagagctgtccttatccttgatgagatagtaaccaggctcaagtcctgtaatctcagtcttggcattgtcctgtgttactgaaacagaacctgctgctgtagtgcttaaagcttgagcaattttctgtgcctctgccttaagggctgaagagtttgactgcattcctgaaagcttctctacataagcttttgcatccttattagactcaagatctgtctgtttgtcttcctggataccgctaccccagcctacgtttgaaagtgttttctctgattctgaaaggtcaccctttaaaatctggtaagcctcataagtgtggcctgcctttgcattattaaccgtgatggtaaatgtttttttggcgccttcgccctcagcaaatactgtaacgctcattgcaagtgtaagtatcatcgcaagaactaaagcaatgcttcttttgattgttttcatattgcattctcctttttataatgttttatgttttttatagaaaagtgttattgcagctattgctataagcacaactccacttaacatatacaaccatctgttaccgcttccacctgtttccggaagctgatactctatgagtttgtttgtaatctcaacagtaccggactctattgcattggcgctgcccggtgcaacgtttgcatcagtctttgtgatttgagtaccatttatatccttaaatatatatgaaacatcatagcctgacatactgttgttctgatttattccaacctctgtcacataatatctatatgtggtaccggtcagaataccattttcatttaccccctgcaatggcagattttcaaatacatatgaccattcacctgccgaatcagctgtcacctcaaccggattgccatacttcttatcattatcagctgaatccacctgatgcagctgcagataaatctttccatcagtcttacttaatggattgttctttgaatcagtccattttttatcaaccgaaatgcttgttgtcgaaacagctacatcctcataatagtacggtgtatttaccttcgccatatcacttccctgtaatgagctgttttcagctataacaggatgcgccgaggtatctgcactgaaatagaaatactccttatgaggctcagtcgagagtatataaccatccggagcctttgtctcaactatataatactgcgtattatactccagattatcagtactcatactgatatcaattctgccattcttatcagtggtatacttgcctaacgacttgtatgaaccatccgatgtgtatccaaacagctcaaactctgcgccctcaagctgctttccataattagtcttatctaccttatacaaggtaaatgtattactcttaattactccggcagatgattttgactctttgtaaacagtctggttatcctttctgtcttctcctttttcgacgccctcaagctttgctgtattgctgacatccatctttatagtattgtattgatccggcgtaccaagcacctttgcattcacctgatatgtataagtaagcattatcgccttgccatcaggtatatctgcactgattgtcctgtatgatgtatcattccattcatacgtgccatctttagttgtatacgcccacttacagccatctaccgtatcgcctgctttgtatgtgcaatcatcctgctttattgcctgcctgaactgaacagtagccggcattagatctatataccacaatgcctgtgggctgaatgtcatcgtcttgaattgaagcacatctgttagctttaatgtatcactattatgcagatagtccttgccatcagggtttattataactgtataacgcagcctgtgattatcctcatcccacttgaagttcttggaaacaaccttatcgccctcagtaggattatcactaccagactcgccaggctttgacatggtctgtgtctgttgagcccatcccatatcattgtttgtattcgaggatgctgtagccatattcttataatccactgatttaccggcctcaaaattctcaaagtcatctatcgtacacttatatactacatatatgtgagagttctcaaaccaaccatgtatcgttgtattgttctcatcaggctttgtaacccctgtaacaacggtattagtggactcatctaacgttgtacttgtttgaattccgtttatgaaccagtcgccgtcagttacggtatgc

SEQ ID NO: 1462 - DNA, 7319 bp, Unknown
  gut microbiota DNA sequence
taaacaactagtgcgacagccccttttcatttataacctcattattttatttcattaaacatctttttcaacaaccaaaaccgccaccagcgaacttaccagcagaaacatcggataaaacagatacggcagtatattaaaggctgacacctcatgtcccagctcatgcactgccgatatggccacgagcatctgcgctccatatggtatcactccctgaaaaatgcacgaaaatgtatccagtatagacgctgttttacgtggagttatgtcgtatttctgagccatttcctttgctatcggatttgccataactatagcaactgtgttgttggcagtggcaatatcgataagtcctaccagaagtcccataccgagcagtccacctcgtttgcccttgaacatcctgtaaatacccgaaagcagagcatcaaagccaccatattcacggatcagcgcacacatggctgccacaagcactgcaaccatacaggtttcaaacatgcctgacgctccacttcccatattggtaagcagatcgtatggtgctgtatttcctgttgcgagcattatgaccgttcccgatatgattcctattataagaactacaaatacatttattccggcaattccaccgaacagcacgagaatatacggtactatctgcaacagatgatattcctgcgatacagcgcccgcgatatctgtcctgaatgacagaattgctataacaaccagcgtcattactgccgccggaagtgcaatgaaaaaattctccctgaatttgtccttcatctgacagccctgtccgttacatgcggcaatggtcgtatctgatataaaggaaaggttgtctccgaacatcgcgccacccattacggagcctatacaaagcggcagaccaaagcccgatgcatccgatactgctgccgctatcggcacaatcagtgttatggttccaaccgatgtacccatcgcaatagacacaaagcatgccacaacaaaaagcaccatcaccgcgaaccttgccggtatcagtgacagcatgaaatatgccacgctctccgcactgcttcgacctactacacccacgaatgctcccgcggtaaggaaaatgagcagcattgttatgatatttttatcagccagtccctgtgccattatctctagcttttggtcgaatttcacactacgattctgcagacatgccaccagtattgccacgaggaatgctattatgatgggcacattataaaatcccatcggaattttcattacatattcaaaaagtattcccaatcccagatacagtacgagaaatactgctattggtaacagggctattggattttgttttttcacgtttatatgtttccttgacatttttttagcaatttttatcataagtaatcatcattagtatgtcaataataatatgctatttattataattttatgtaactgttcagtaccttcacagttgtgagccgcaagtgtttcgcacagagttaaaaggatagcagacatttgtcatactatttcttccttaacccatatcgactataacctctatatattaaaggcaacagtacaataaatagtaagatgtataagaacatcaagaacgaaatctgacgaaatacaaacgggccaatctgaaaaagaattggcgacctcactacattaagaatattagtcaatacagtcggcaacaaattgaaaaaagcatcaaatgccggtaatactcttgcgataaatggtaccatacaaagcaggaaaaacgggatacaaaccgccagattcggtgtatgcatcttaactgtcaccagcattgtcagtgcagcacaaaacatcgttgcaatatatccgcccacaagtatcagcaaataatattctccatatgtcataacataaatactatatggatcatcaatctgatacggtgtgaaaaatccactcgttcccattactgcaaatgagataagagacaatatccctactccgatccaatagataaccgttgacacgaagattcctgcaataatcttgttttttattgccttcgatctcccgtactttgtagcaaaaaaaacatcctctgttccggggcggaactctccggaaaatataccggctgccaaaaaacctatgatcactgccattaaaagtacataagtttgtgcgtacattgtcatcgtagcccaggaaccttttgcttcgaacgtaaaaggtatttctatctttttataaacgttttccagataacttctcttttcaggtgtggttccgtactcttctgccattttcttcatattatcttgatagattgtatagatgtcctgtaattgttcatctgagagctgatacactgcaccttcattccattctgaatccggagtcaatatgccaattacaaaactataaatatcgtaatatgactgtactgttttaccatattctgtattaggtatctcatcttgatacttagccgataatgtcttgtaatcatttatcacttcggaaattttctccgttgtaagtttccctttccattgattgacatcttcagccagaagccgtcccgcgtcaatacctgtgtggatctgtccgtctgcatccgtatagctcatactcccaattgccatacctgaataaataaccgtcatcacaagtactgccgcaagcagaaccttattcatcctctttgaaaaaatctttttcagttcatattttaacatcatctttatcacctgccttttctccaaaatacagaagaaatgcatcctctaatgttgcctccacctgtactgcatttccggtcggtggcatctttgaaaggactctcaactctactccatcagaaactgttcttacatttccaatcagatattttttcatataattgttcaactcacttttaggaataatgcaattccacacgaacatatccatagacaaaatgatctcatctgaagtacctgtatagaaaaattttccttctttcattaatataatctcatttgccacatattcaacatctgacacaatatgcgtagacaacagtacaagacgatcttccgacaattcactgatcagattacggaacctgattctctcattcgggtcaagacctgctgtcggttcatccaacacaagtatccgcggatcattcaacatcgcctgggcaattccgaccctccggatcatgccccctgataaagtccgcatctttcttttcctcttttcagccattccgacctgctccaacagttttaatgcccttttctttgccatgatgggcctgattcctttgatagatgcaatatacagcatgtagtcatacaccgaaagatcaggataaaacccataactctgcggcaaataaccgagtatttccctataagatgcccccagactaaagatatcctttccattccacaagatttctccgcttgttggggttatcgctgtacatatcatccgcattaaagtggtttttcccgctccatttactcccaataatccatatacacctttccccatagaatgtgttacatgttctactgcgtgtacattcccataatcttttgttacatttttaaattgcagttccactcgacttcacctcccagtttatttcacagttacattgcgatttgtgaacacaaaaaataagataaccaaacgatatgatcaacaagctcccccagattggcatcgaaatcctctgataaatagaatctgtcgatacaatcagtgtccagataagtatacatgctatacataggaaaacagcaatatactccatatcattccatttgctgtacaataaccggaagcagatacaacaggaaacattaaacggcactaagaaatctatgatgagtcggtatgccgaaatctgtaatgtataaactgaaacaccgaaaaaaaaggtagtcataagtaaatccaccactgcaaacagcaatatccttgcagcacagatctggcgcagtgaatagaatgctgttttttcaatttccactgctgaaaagctccgattcttccaaatttccggtattatcattaccgaaaacatcactgacatagcccccagtgttctctctgtatttgctcccacatccgagtccacaagcagtatccaaagcagaactaagattcctccctgcagaacccaccatctctttttgataaatttgaactgctcaaataaaaattcaaaatatgatgctcgtctgttatcctgtctgttcataatgtctgaacaccgctcttttactgtgtcaacagccgtttcccgtatatattccttctgtatcaaggatttatactcctcgatttttctctgatattgcttcataatttttccacctccaactgttttgccagcaattcttttgcctttgaaacacgatattttacaagcgacaattttatatttaataaatcagcaatttccttttgttttaatccctgaaagaaaaacaggattacaatctcttttatttcttccgggagctgctccagagccctctctatatcaatccggatttctatgtttttcggattctcatcttctatatccggcaactggtctgtcattatttccttctttttcttgtaattattctttataatattccctgctatgttatacaaatagctctttgccttcttgatctctgccccgcttattagtgctccgaagaatctctcaaaagtttcctgtaccatatcttccgcatattcctgattatgagtatgtaaataacaatattgatagatagaagaataatacttttcaaccaactgattacctgcttgattgtcaccgtttctgattttctgaactaataaaaaatcagcaatcatctcatatcacctctcttgtcctctataataataagacaacttaaggtgataaaaagttagtggaaaattaatattcatttaattttttataattttcacctcagtgactcgatatattcctccagacacaatccttttcctgcatttctatggcagattccacccaaaagaaatatctgcttctcttctaaatagattgaaactattaatcattggaatttcatcctgaatcgctatatacgaaacagcccgcaaaaaggcagcaaaaagagtcccccttttgctgcctgcaaacaattttgttttcaatttaatggtatcaagcttgtacttgacaaaatgaaaaaacatgagttcattccgactaatcatcttacagtaacatagtcatataaattggtatatacataattccgtcctgatattttaaatccttcgtataaataatgaatctgtgctcacactttaactgatatttctgaagcagatagtcaaatgatttgtgcgacatatagtttgaagattttacttcaatcggacatatcttctttttcttcacaatcataaaatcaatttcatatttcttttctctggtcgttccctccggcacgtacaaatattcatgaaaatacaactcatgtccagctgctctgagcatctgtgctacaatattttcaacaatcattccctgattaattcccagattgtctataatcagagccttatataaatcttcatctgtactgtcccggttcttcataatctgtgtaaccaatagtccggtatcacccatatataatttgaaattgcttctgtccgcaaacagctccagtgcaacctccggttttgtcacattgatacactcatttcctatcattgcttcagaaataaagctgaccgcatccatataattctgataacgcgcatttttatctaccatagaaagtttgaaatgtgaatttttattctctagctgctctggtattgttcgataaataactgacgctttttccctgttttctgtatcgtattttgccagatcctcttcgtaaaggctcagaatattccgtttaacaaaatcaatttgttcataacttttccctgaaacataagcatctactgcctgcggcatcccacctacaaccatataggtacgaaagcttttcataattctccggtgaatcgcatctccaagtggctttcttttttcaaaagcttctctgatcgtaggaattgtaacctcatcattgattgcccataaatattcttcaaaatccatcggatacatcttaatccggtactcttccgaaggaatcagtatatcctttacatttttccggattgagattagcgagcctgtctcaatatattcatatcgaccatcagcgacaagatattttatcgcctgccgtgcctgcggaaacaactgtacctcatcgaaaataatcacgcagttcttcccttttaaactttttcctttcagaagaaataagtttctgaaaaaagtatccagatcattcatgttctcgacaaaattattttttacatcctggttttctcttgcaaaatcaagaatcatatagtcatcatattccttttttgcaaactcctctacaatggtacttttcccgatacgtctagccccttcaagcaatactgccgatgttcctgctgccaatgttttccactcaatcaatttggcataaacttttcttttaaaaatcattcagcattcctcatttcattttacttggtagtattatagcatatttccacctcaattctaccacttttcacgaaaatgcaaaattttttcgcctattttttaacgaaaagcagaaatgtttatacctgctttttaacgaaaaacagaaatgtttatatcaagtttttaacgaaagcacaaaatgtttgttgtttcatttcttaaatgcgttatttccggtttattcgctcagaaattcagccaccttttctatctgcgcactattgtactccatgtattccagataatactttttcacgatcttattctgcacttcttttttatagagccactgtcttgttttagcctctggtgcaaacagcactgcctgatattgtggagaaaatatctcatcaaggctacaggctgatttgtccagcacgcaattgtagtccatatttttttccgcaaaataccggttcaatgcttccgcaaacttttttgcttttctcacatggacagcatattccaccggattatacggctctccttctattaccggcacctgccatactaaaatacattttttcatctctttgtactcctttcatttttgccaaatttatatagatatcttttatggtcttttacacgctttgtaacctcatctgtctcttatacatacaaaaaaccgcaataacaagcatcactatcagaacaggtatctgcaatgcaagcg

SEQ ID NO: 1463 - DNA, 52881 bp, Unknown
  gut microbiota DNA sequence
gagctgactgttactaataggtcgagggcttaatctggttaataacggagaaagacaaatcggatttgtatgaagttttgaaggtacaaaccttaataatcctcgatagctcaatggtagagcactcggctgttaaccgagttgttgtaggttcgagccctactcggggagttttttagtataatatatggtgacatagccaagtggtaaggccccggtctgcaacaccgtcatcgccggttcaaatccggctgtcacctctctcaaaaggactacatcagtttatgatgtggtctttcttttatataatttgcaaataaaatatattgtgaatttatgtaatattcgtaatatatgttgtacacatttcattattttttaattttctaaattatttttcaggatgttacactaaattaataaagagaaatataagcctgataaacagaattatatttctcttttttaacaactcttatccttttttgaatagttgtagtagtattattattcctcttcaggatatttcataccccattcagctcttatatctgacataattttcattacatcatatgtatattgacagtgcatgagggtttctatttcatctgatgatgctgagcttacagctttttccatatcacgtacttcgtaatacagtgcatctgatgtatcaccggcatcaattacttctttatgaccatcctctgtatatgtaatagttgcctgcattcctcttggatactcaaagatttccacatatgccttgtcaaaagagagcgtagcgcgttttggctgctttgaatgaagagataatgtgacagttgccatttccactgcatcattcataagcagaatacctgcctgttcatcaacaccggttggtgcatatttaacctgtgacgatacttgtgttggtgtttccttgaagaaccagcggataagagaaagtgagtaaactccaatatcaagcaatgctcctccagcaagcttacgactgaaaaatcggtttgtcatattgtaatccttgtagcttccaaaattgacctgaattaaatttagcctgccgagttgtccacttgcaattatttcgtttagctttttataaacaggcatatgatatatagtcatggcttcagcaagaataacgttattttctttggccagtgagacggcttcatcgagctctgcgatatttaaagtaatagatttctcacagagtacatgctttccattagaaagggcttttcttagataattgatgtgagtattgtgtggagtggagatgtaaatgatatccacatcaggatcataaaagacgtcatcaatgttgtcatatacctttgaaatgccatatttttgtgcaaaagctacggccttttcatgagttctgttggcaactgaataaagagtgcgtccttccttggagagagcatgcgcgagctcattagctattacaccgcagccgagtgttgcccaattaagctgtttcatgtgaaatcctcctttttaacttaaagtaatgtagctgtgatggtacataaattatttaaaatggtgtgaaataacaaaatataaactcattgatgataccttttgaccctttaatcataaaatatgtaccataatgaacatattctagcatgatgaattatgaattacaatgcatttagattcaaaacagtcaaaaacagtcaaatttgatagtgactaaattaaaattagttaatttgaactatattttagattataaattagtaatagaaaagatactaaaattagtaattaggcaagtattaatgatatatatgttatattctgcactaaaatcaatgttgtatttgcatatagtgcacaattttaaaacttgctttatatattttcaacaatttttagtgtgattatttgtgaatataaatgacggattatgattgacaatgacggattatgaaaatataattatactacaagttaaatgaatgttgaaatgtttaatacagtaatttgaaaataagcattaaataaatggcttataaaataagtctttgaataatttgataaactggggtgattagatgctggcagaagatagatgcaaaaaaatactcgatatattagattcgatgggaagtgtgactgttcagcagcttatggatgagcttgatacatccgagtcaacaatcagacgtgatctggttgcaatggacaagaagggttatctcaccaaggtacatggtggtgcgattgtaaataatacgaatatccatactcaggatgagaagtttatcaacaggcttaagcagaatcgcaacgaaaaggaacagattgccagatatgcggcatcacttattgtggataatgattttgtttatatagatgccggtactacaacagcagtcatgattgattatattactgcaaagaatgtggtttttgttacaaactctctgactaatgccaagagaatttccgataggggatatacagtatatattctgggtggcgagttcaagtctactaccgaggctattgtcggagatgaggccgttgtgacgctcgataaatataattttacgaagggcttctggggaaccaacggaattactgtgaagaatggatttacgactccggagataaaggaggccatggttaaaaagaaatccatggagaatagcaaggagaaatacattcttgcggatgacagtaagttttcacaggtatcaagcatcaagtttgctgattttgaagatgctgtaattattacaaatgcactaagtaatgacaactataagaaatacaaaaatattaaggaggtctaacatgatttacacagttacttttaatccatcattagattatattgttgatgtaacagattttaagacaggagtagtcaatagaacgactggagagaagatttttgcaggtggtaaaggcatcaatgtttccatggttcttaagaatcttggaatgagcaatacttcacttggttttacagcgggttttacaggaaatgaaattaaaagacttctagcaaaaaaaggtgttgatactgattttatagaggtggaggatggtatttcacgtatcaacgtgaagcttcgctcaaatgaggaatctgagattaatggtcagggaccggtaatcactgaggacaacattaaaaagctttatgagaagcttgactgcttaaaggagtctgatgtgcttgtgctcgcaggaagtattcctgatgttatgccttcatcaatgtatatggatatcatgaagcatcttgagggtcgcggaataaatatcgtggttgatgcgacaagaaatctgctcacaaacgtgcttccatataagccgttcctcatcaagccaaacaatcatgagctcggtgagatattcggggttgagattacagacaaggacgatgtgataaagtatgcaaagaagcttcaggagcagggcgcaagaaacgtgcttgtttcaatggcaggcgacggagcagtgcttgtgactgaggatggacaggagtttaaggcaaatgcacctaaaggaaagctcaaaaattctgtaggagcaggagattcgatggtagccggatttgtttacggatacctcaaatcaaatgattataagcaggcatttatttatggcgtatgtacgggaagtgcaagtgcattttctgaggagcttgctacaaagcctgaggttgaagcacttattgataaatgggacagtgcttccaattaaacaaacggtatcaaaaaggttgatataaataattaatatattctattaggaggaatgatgtatgacaatcagggatttgttggcagctgagagtatcaatttaaatggtacgcctgccggaaaaaccgaagcattgaatcagtgtattgatttgatggcaaaaagtggcaaaatagccgatgtggagaagtatcgcaagggtgtttttgcaagagaggaggaaggcacaacaggaattggaatgggtatagcaattcctcattgtaagtctgatgctgttactaaagcaggtcttgcggcaatggttgtaaaggatggggttgaatttgaatcactcgatggtacacctgcaaagattattttccttatcgctgcaccaaacacagaggataatgtgcatcttcaggtgctcagcaagctctctgttatgcttatggacgagcagtttacaaattctcttatcaatgccggttcagttgatgagtttttaaatatcatcgatagcgctgaaaaagcaaaggatgagaaagaggctgccaaagaggcaaaggcgaaagagcctgttgaggtgaagaaggacgatgtatttatcgttgcagttacagcctgtcctacaggaattgcccatacttatatggctgctgaggctatcgagaaaaaagccaaggagcttggatatcaggtaaaggttgagacaagaggctcaggcggagccaaaaatgtgctcacagatgatgaaatcgcaaaggctgcaggagttatagttgcctgtgatacaaatgtacctacagaccgctttgacggaaagaaggttattgagtgtcaggtttctgacggaatcaataaggcagaagagcttataaagagaattgcttccggtgatgctcctgtatttaaggcatcaggtaaaaaggaggcttcacattcatcagttagtggaaaggagagcattggacatcagatttataagcatctgatgaatggtgtttcacatatgcttccattcgtagttggtggtggtatccttatcgcaatcgcattccttatagatggattcagtgttgaccttaattcactgccggctgaccagagagcaaatttcggtactattacacaggctgcagcactgtttaagggaatcggtggaacagcatttggatttatgcttccaattcttgcaggctttatcgctatgagtattgctgaccgtccgggtcttgcagttggttttgtaggcggttcaatcgcagcaaacggtacatcaggcttccttggagcacttgtagcaggtttcgtagcaggatatattgtgctcctcttaaagaaggtattttctaaacttccggagagtcttgatggtatgaagccggttctgctttatccgctgcttggtatattcctggtaggcgttataatgcagtttgtagttgagcctccaatcggagctttaaatacagctatcaacaatggtcttaatggacttaacggtgcaagcgcagtagtgctcggagtacttctcggaggaatgatgtcagtagatatgggtggccctgtaaacaaagccgcttatgtatttggtacagcttcaatcgctgccggaaactacaatattatggcagcagttatgattggcggtatggttccaccaatagcaatcgctcttgcaacaatcttcttcaagaacaagttcacagcagaggagagaaaggcaggacctacaaactttatcatgggattatcatttatcacagagggtgcaatcccattcgcagcatctgatccgcttcatgtccttccggcatgtgtagtcggttcagcagtggcaggtggactttcaatggcatttggatgtacactcatggcacctcacggaggaatcttcgtagttcctacaatcggaaatccgttaatgtatcttgttgcattagtaatcggatctttcattgcatgtggattactcggattactcaaaaagaaagtaagtgaataagcaatcctcaattatcatttaatccaacctataaactaatcaacaaaggcactgcttcggcggtgcttttgttgttatgttgtgtattaaaaattaaaagtataaacattctctgaaataacagcctcatgccttgacgagtgaattttcgaagcataaagtagtattaggatgaaatagtaagtcaaaaaatcaattatttatgagacttaaataaaaaaacagtgaggcataaaatgggcaaggttataggtatagatttaggaacaacaaacagctgtgtggcagtattagagaacaatcagccggtagttataactaacagcgagggtcagagaacaactccgtctgtagtggcttttacaaaaaatggagagcgactggttggcgaggctgcaaagaggcaggcagcagtcaatgtggacaggacatttttctcaataaagagacagatgggaagcgatttcagggcaaaagtggacggaaagctgtattcagctcctgagatttcttctatgattctcagaaagctgaaaaaggatgcagaggactatattggtgaggcagtgacagacgccgtaatcacagttcctgcatatttttcggatgcgcagaggcaggcaactaaggacgcaggaagaattgctgggcttaatgtgcttcgaatcataaatgagccaacctctgcggcactcgcatacggactggaccacggacagcagcagaaaattcttgtctatgacctcggaggaggaaccttcgatgtgtctgttatcgaaataggggacaatctgatagaggtgcttgccacagccggtgataatcatctgggtggagatgattttgatgagagaatcacgaattatcttgtcacagagttttacagacagcagaatgtggatctgagaaaggataatactgctatgcagcgtgtcagggaggaggctgagaaggcaaaaaaggtgctttcatcctcatcctcaaccactatcaacctgccgtttatcaccactgtaaagggacagccggtccacatggagatgaacctcacaagggctgagtttaatgagataacaaaggatctggtggagagaactgctattcctgtcaatcaggcactttcagatgcggggatttctgcagcagagcttggaatggtgctgttggtaggaggctctacacgtgtgccggctgttgttgaggaggtcagaagaattacaggaaaagagccttcacataacctgaatcctgacgagtgcgtggcactcggtgcagcagtacagggtggcaagctcggtggagcaattgtcgcaggcagcagtgcggcagagattatactgatggatgtcacaccgctttcactcggaattgagacagtcggtggtgtctcaaccaaaattattgacagaaatacgactattcctacgagatacagccagatttttacaactgctggaagcttccagacctctgtggatataaaggtactgcagggtgagaggcagtttgcaagggacaataagctgattggaaacttcaggctaaagggcatcaagccggctccggcaggtgtgccgcagatagaggtgacgtttgatatagatgcaaacggcattgtgcaggtttctgcaaaggacctgggcacaggaaagcatcaggagattacgattaccgcaagctcaaatttgtctgattctgagattgagcaggcaatccgcgaggcacaggagtatgaggcaacagacggacagagaaaggcttatattgatgcaagaagtgaggctgatacgcttgtgcgacaggtggaaaatgtcatggctgacaaggaaaaaagaaaggctatggacagcgcacagaaaaagagtgtgaaatcgtcactttcatatgtgaagaagcttatttcaaggacaaagcccggaaatgtgagcgaagagcaggctgccgagataaagcatgcggcagatgaactgagaaatgcggcagcgggattgatttaattatagtaactactattattcatttggctatttacgagaagcggattttcatataaaatatgggtaagtggtgagtattcataaccaccctgaatagttataatgttaatttaaatccgaggaaatagaaaatgaatgcgaacgataaaacagaaaaggtactaagagaaattcatatcatgctctcaaaggcggagccgtataagccggagccgagcagggtgatcataaacaagcagcaaatgatagatttacttgctgagctgaataagtgtatatatgcaatacaggatgagtatgagcttactgaacagagtcgcaatcacgcagagagagagttcagaaagaagggggatcagatagtctgggatgcaagcagaaaggctgaggatgtgtatgcagcatcggttatctatacggatgaggcgctttcaagagtgcgtgatatcatcaatgataccaacgagtcacttgaaaagctgtgcaagaatatgaaggataagattgcagagcaggagaagatagttaaaactaaccagtatgagctcaagggacagcttcaggatttgtccgatacggagaagtatcttaagattatcgatgacagaaataaggagatagaacgtcagaaaaatgcaggtaaacctgtagaggagcgtactattgacaatgaagagaagtccatctatgcaaacagacagactgaaatcaaggtaaatatggattatatcagaaaactgggacttgctgagggcgaggacctgggagatggtgtagtgggtgaagtgaagcttgcagacgatacacctgatgccggattaaatcatagcaatgataaggatgaagccaaggctgccggctcaaaatcgtctgttgatgaggattataaggcaataagcagaaaagccggcaatccacctgttatcaacacaaaggaagggaaggagctcacagacggtatccacagaatgtggcagagcatcaccggaaataaagggaaatgaaacacacctatgtaatataaagcagcagttcaaaacagaacggctgctttttggcttatatttaaaagtgggtaatattaagcagattttaagaaaaacaaagtggataatctgataaaatatagctgactaacggcaggagaaggtttctgttcaaaattcatagaaggaggataatatgacaatattagtttgtgatgacgacaaggaaatagttgaggcaattgagatttacctgatgcaggagggctacgacgtggagaaggcttacgacggcatacaggcggttgaaattatgaagaataaaaaaatagacctcatgataatagatgtcatgatgccaaagctcgacggaataagagccactttgcagatacgaaaggaaagcagggtgccgataatcattctatcggcaaagacagaggatgctgacaagattttaggcctcaatgtgggagctgatgattatgtcacaaagccttttaatccgcttgagcttgtggcaagggtaaagtcacagcttcgcagatataccactctgtcaagcaatgatgcagccggagacaaggtttatgaagccggaggccttttggtaaatgatgatttaaaaaaggtgactgtggatggcgaggaggtaaagctcacaccgattgagtacaatattctgcttttactccttaaaaacaagggaaaggtctactcaataaatgaaatatatgagagtatatggaacgaggaggctataggcgccgacaatacagttgctgtgcacatcagacatatcagggaaaaaatagagataaatcctaaggagccgcgatatctgaaggtggtctggggagtaggctataagatagaggacaacaaatgaagcagtatacgataggaaaaaaagcagcggtcatagttttacatcagctatgcatgatacttatggtgacaggagtgtttgccacaggctatgcattcaggcacgatgcgcatggaaatattgatatatatacactaatatcgcttgcgggcctggtaggcagctttgtgagcctggcatatatggcaaacgtggccggcagaaaatcagaggatgattatacaatatactatttaccgattgacaaggtatactctgatgtgatgctggtgatatttacactgctcatggtatttatgggaaaagtgatttcaggcgtaaaaagccagcattttgactatgcatcactcattatgacggccggcacatttacttttttgtttgatctggcttttattattttataccagagcattgtaaggaagataaaaggcaatatactttacacacacagcctgatgtacaagggctatgagcttttgaaaagagttattgagaaaaaggatatccacacacaaaaaaccaaagagataatgcgcatacaggaggcacttgaagctatctcggaaggagcgcttgacactacactcaatgtcaatgagtttcatgggcagcagaaaaaggtggcggaggctgtcaaccatatacgccagggtcttatgagctcggtgaatgaaagtcttaagaatgaaaaattaaaggctgatttaataacaaacgtatcacatgatataaagacacctctgacttcaatagtcaactatgttgacctgcttaagagggaaaatctggaaaatgaaaatgccaaatactatatacatgtgctggaggaaaagtcacagcgcttaaagcagcttacagaggatttggtagagacatcaaagattacctcgggaaatgtgaagctcaatatgcaaaagcttgatctggttgagcttttataccagaccggaggtgaattcaatgagcgctttgagtcgagaaatctgacaatagttacaaaaattccatcagaacagatatttatctatgcggatgggcgtcagctttaccgttctattgaaaatctgtatactaatgccgcaaaatatgcactggaaaataccagagtatatgtagagcttgaaaaggcagataaaaaggcagtttttacaataaagaatgtgtctaagaacgagcttgacatagtaagcaacggaaatgtagacctgacagagcgttttgtgaggggagagaggtcgagaaccactgaaggaagtggacttggactttcgattgcaaagaatctgacccatttgatgggaggaaaattcgaaattaaggtagatggtgatttatttattgccacaattacctataatattatataatagtaaataaaagaattttgaaatacgcatacggaggtagaataagtgaaattatatgaaaacggtgcttaccttttaaacggtaaggaagtagtaattgatggaccgcaggctcaggcagctgtcaaaagcaagaccggcatggacatcgataaacagacagctaagcaggagacaattgcttacggtattttaaaggagcacaatacatccggcaatatggacaagcttcagattaagtttgataagcttacatcgcatgatatcacatttgtaggtatcatccagacagcacgagcttcaggacttgagaaattccctatcccgtatgtacttacaaactgtcacaacagcctttgtgcagttggtggaacaatcaatgaggatgaccacatgtttggtctcacatgtgcaaagaagtacggtggaatctatgtaccacctcatcaggcagttatccatcagtttgcacgagagatgcttgccggcggtggaaaaatgatacttggctctgattcacatacacgctatggtgcacttggtactatggcagtcggcgagggtggacctgagcttgttaagcagcttcttgaacagacatatgatattgatatgcctgaggtagtaggtatttatctgacaggagagccaatcaagggcgttggaccacaggatgtcgcacttgcaattatcggagaggtattcggaaacggcttcgtaaagaacaaagttatggagtttgtaggaccgggtgtgtctaatctgagcgttgacttccgtataggtgtcgatgttatgacaacagagactacatgcctttcttctatctggagaacagatgacaaggttaaggagttctttgagattcatggtagagctgaggaccacaaggagcttaatccgggtgaggtggcttactacgacagatttattgagattgatttaagccagatacgcccaatgatagctatgccattccacccaagtaatacctacactatcgatgagctcaatgcaaacctcatggatattctcgatgactgcgagaagagagctgaggtaagctttgatggcaaggtgaagcttgatttaaagagtaaggtaagagacggaaaactgtatgtagaccagggaatcatcgcaggctgtgcaggcggtggatttgagaatatctgcgatgcggctgacatattaaacggacattcaattggagcagacgagtttacactgagtgtttacccggcatctactccaatatacatggagcttgtgaaaaacggagctgtagcaaagcttcttgagacaggtgcaatcgtaaagactgctttctgcggaccttgctttggtgcaggagatacacctgccaacaacgcattctctatccgtcattcaacaagaaacttccctaacagagagggttctaaggtacagaacggacagatcagctcagtggcactcatggatgcacgttcaatcgctgcaacagcagcaaacaagggcttccttacatcagcagcggatattgatgtcaactttacaaagccaaaatatttctttgacaagactatatatgagaaccgtgtatttgacagccatggagtggcagatccttcagttgaaatccagttcggaccaaacatcaaggactggccggcaatgagtgcgcttcctgagaatatgctccttaaggtggtttcagagattcatgatcctgttactacaacagatgagctcattccttcaggagagacatcttcatatcgttcaaaccctcttggacttgcagagttcgcactttcaagaaaggatcctgagtatgtaggcagagcaaaggaaatccagaaggcccagaaggctatagagagtggtgagtgcgcaggaaaggctgttcctgaggttgctgaaatcatgggagtagtaaagaaaaaattccctgaggcaagccatgagaatatgggcttcggaagcacaatttttgctgttaagccgggggacggctcagcaagagagcaggctgccagctgccagaaggtactcggaggctgggcaaatatcgcaaacgagtatgccacaaagagataccgttcaaaccttatcaactggggaatgcttccattcatcatcgatgagggagagcttccgttccacaacctcgactatatcttccttccgggaatcaagaaggaaatcgaggatgcaaagacggagtttgaggcatatgttgtcaaggatggtgaattaaagccatttacactgaagatgggtgagctcacagatgatgaaagagagataatattaaagggatgtctcatcaactataatcgtaaataaggagagtttaatccgatggaagaaaccggaaaagctggtaaaaaatcaaacattgagataaacgcagataagggtgcgaagcagaattcgcacccggggcgtgaggaatggccacatctgatcagaataggtgtcatggtatttgtcacgtttgcagtcagtatactgtttttctttgcactgtacagatttgagggctttgcaggcatatggagcaagctgcttgcggcagcaatgcctattataatgggacttgtgcttgcatacctgatgaatcctgtcatgctgtggctggaaagatgctttaaaaagcttctttccaaaaagatgaaaagcgaaagcaagctgcgaaaggtttcaagagctcttgcaatcacaggctcggttattattcttgtagcaattatttcgctcctcattgcggctattgtgccttctgtcatagcaagtatatcaggacttatgaagacactgccaaatgatgttgcggcattcatcaacatgataaagaacggcaattttggggacagcaaaatagctgagctcgcgagcacaggtttacagaatgcaaccgactatattgagaattatgccacagaaaagctgattcctgaggcacagaagtatgttgcacagattacaaccggtgtgatttcggtagtcagaggcttatttaattttattatcggaataatcgtgatggtctatgtgatgagtattcaggagactcttgcaggacagagcaaaaagataatatatgctgtctgcaagccaaagacaggcaatatcatcattgagacgatcagaaagacaaatgagatttttggaggcttcataagcggtaagattatagattcactgattataggtgtgattgcatatttcggatgtctgattttaaggattccatcatcggtgctcgttgcagtgattatcggcgtcacaaatgtgattccggtattcggaccgtttatcggtgcaattccatcgttactcatagtagtaattcagagtccgtggcatgcgctttatcttctgatatttattgtcgtgctgcagcaggtggatggtaatataatagggcctaagatacttggctcatctaccggtctttcgaccttctgggttatgtttgccatactaatcggcggaggaatgtttggttttcttggaatgttacttggtgttccaacctttgctgtgatatactatattgtgaaaagagttgttaattatgctctcaggaaaaagaagcttcctgaggacacaagggattatacaaagacaacaggcgtagataccaaaaataataagcttaaatacgagtaggtgaaataagtggataaatacgaatacaatctcaagctggatcagataaaagccctaagcgccgaggagggctatatgagcgcagcagagattgcggatagcataaattggaacaaaattaaaaatgtaaatacactcgttaaaatcggcgaaatctacgagaaggccgaaagataccaggatgcaagggacatacttttaatggcctatgaccgttcaccaatcggcaggatgattatatatagactggctgaggtcgccatcaagatgggtgattatgatgctgctacagagtattatgatgagtttgttgagatagcgcctcatgatgatatgaagtatgtattaagatatgccatcaaaaaagggcagggagcttcatttgatgagcttatcactattcttgaagagtacaaggatgaagaatacactgaggagtgggcatatgagcttgcatatctataccacaaggccggaaaagccgataagtgtatagatgcctgcgatgagctcattctgtggttcggagacggaccatatgtggagcgtgcgctggagcttaagatgctttatcagccacttaccaaggctcaggaggaaaagtacagacgattcaaggcagagaaggaaaagccggctaagataaaggatgaggctgaggtcactgagataggtgccatggagatggtaaagggcggagagatagtgcatgatgacgtaactattccgcagattactgtaaatcaggagaagttcaatactgtaaatttacagcaggagattgccaagggtatgcagcagatcatggaggccaagggcaagaatgaagttgctgatacgatggataccatcaaaaagatagttgaggatattccttatctcaagctcgaaaaggagcaggaagagtatgtacagcaaccggaagagacagagcatatcgctacagatgaagagatagatggttcacttaagttgaatttcaaggagcttttgggtgaagacgctgacggacagatgtctatggtcatgagtgaaaagactcagcttgagcatcagattacaggacagatgtctatacaggatgtgcttgaagaatgggaaaagaccagacatgcggctgaaattgcacttaaagaggctgagcagcagaagcttgagtcagctaaggcaagagcacttcaggaggcaggagacatcatggagagactaaatgatgtcattccaaagctggatgcaggtgtcactccgaaggaacttcttgaggaggagtatttgaaggtcccggttgatattatagagcagaaagctgccgtgaaggagcctgaagaagagcagaaaccggatatgcaggagctttatgcagaggagactgtggatgaagtacaggagccgcaggaagcaccggaagatactatagacgaagcacaggagccgcaggaagcacccaaagaggctatagacgaagcacaggagtcgcaggaagcaccggaagatactatagacggagcacaggagtcacaggaagtacctgaagatactgcaaatgaagcaaaggaaccggttggagagccggaggatataattatggcagaggagtctgaggaagacgagatactaatgcagccgaccaccatgatgcctgaaataacagatgatatgttaaatgtcgatgatgatacatcagatgatgagacttcacaggagaaagaaaacgtttctgagaagagagattttgatcatgtgacatcatttatcgagcaggaaatagccaagatgacagcaaaaaatccgggactggagaagaagctggatatggctaagacaagaaaaatgccggatatttcattgccggaggatttagacagcgaagaagatgactcgaaattgaaagaaacaaaacatataaaagagcttacaagcgaacagaaagctatattttcatatttcataccggtaaagggtatggaggatcagatctgcaaggcatataatgcagtgcttgatcatttcaacaggaaagaaaacgcatccacaggcaacctcattatacagggagagcagggttgcggaaagacaatgcttgctacaagctttataaaggtattacaaaaagatggtgaacagcttacaggaaagatgggcaagattgatgctgccgcactcaataaaaaggatgtgcagcaggtagtcagaaagataacaggaggctgtctcatcatagaaagagccggtgatatcgaccgcagcatagctgcccagctatcatttttgatggagcatgatattacaggaacactctatatacttgaggatacatcaaagggtataaagaaggctctctcaatggatgagggctttgcatccaagttcacggaaaagatatcggttcctatttttacaaatgatgaactcgtattgtttgccaaatcgtactctgcagagcttgggtacaagatagatgagatggctattctggcattgcataacagaatcagcaatattgagaggatagaccaggctaccactctgacagaggtcaaggatataattgacgaggccatagacagggaggctcacagcggacttaagaaggctataagtattctgacagccaggcgatatacagatgatgaccgaattgtactcaaagaggatcatttcagggaaaaataaatacttatggggggtatatatatgtgtaattttacagcaatggattgttacctgtttggtcaggcaacacactatgatatctacaagaagatgggtgctcacttagctgagcgcaaaggaaaaaaaggagtgtgctttgacgtctgggcgccacatgcgagggaagtatacgtgtttggtgagtttaacgactggaatgagaccagtcatgagatgaagcgtgtagagccggaaaccatgggagtgtatgagctttttgtaccgggagcgcaaaagggtcagatgtataagtttattatagtcactgaacagggtgataagctgtacaaggcggatccatacgcaaactacgcggagcttcgtccgggaacagcgtcaatcatcacagatatcgagcacttcacatggactgacaaagagtggatggataagagagcagcaaagtcagatgctgatgtatattcttcacctatggctatatatgagtgtcatccgggctcatggatgagacatccgggcagggatgatgagggcttttatacatacagggagcttgcaaaatcactcatatcctatgtgaaaactatgggatatacacatattgagcttatgggtatttcagagtatccgtttgatggctcatggggatatcaggtgacaggctactatgcacctacatcgaggtatggagagcctgaggattttgcatactttgttgatcagtgccataaaaataatatcggagtaatcctcgactgggtacctgcacatttcccaaaggatgcgcatggacttgccaatttcgatggaacagccacatatgagtatgcagacccaagaaagggagagcatcccgactggggcacaaagatatttgactacggtaagaatgaagtaaagaacttccttatcggaagtgcacttatgtggatagaaaattaccacgtagacggactccgtgtggatgcagttgcgtcaatgctttatcttgactatggaaagaacgacggacagtgggtgccaaacaagtttggaggaaataagaacctcgaggcagtagagtttttcaagcatatcaatacactcatacttggaagaaatcacggaactgtaatgatagccgaagagtctaccgcatggccaaaggtaacaggcaaggtagaggaagacggactgaacttcagctacaagtggaacatgggatggatgcatgacttccttgattatatgaagctggatccatatttccgtaaaaataaccacaacaagatgacatttgcgatgagctataatgagagtgagaaatatattctggtactgtcacatgatgaggtggtacatctgaagtgttctatgctcaacaaaatgccgggcttagaaggggataaattcaagaacctcatggcaggatatgcatttatgatgggacactgtggaaagaagcttcttttcatgggacaggagtttgcacagaagcaggagtggagtgaggaaagagaactcgactggtatctgcttgagaatccggagcataaaaagatccagaactgggtaaaggagctgcttcatctctataagagaaaccgctgtctgtatgagctggattcaagctgggaaggctttgaatggataaatgcaaacgatgcagacagaagcatcttcagctttatcagaaagagcaaggatggcaagaataatatgctctttgtcatcaatttcacaccggtagagagacctgattacagagtcggagttccaaagcacaagacatatcagcttgttttagatagtgagaatcctaagtttaccggcaaaacggtacaagagcctgtaaagaaggctgcaaagggcagaggcagggcagcaaaacagtcatataagaagctggactataaggcagtcaaatcagagtgtgacggcagaccattttcatttgcttatccacttgcgccttacggagttgctgtatttaaatactaatatatcggtaaacagcagggtaaaggaccgcgccaatttaaggcgcggtctttatttttgcgtattatatgtcgatatataataaaaagataactattcagaaccacaaaagtacgaagtaagaatatccataaataaaggctgcagagatggtatatatgcagggcacggagcaggaaatatgcagatagagaatttgattaataaaagcacagatacgaaaaatacggacacaaaaaccataaatgacatgacagcgggtatgcgtgtgtcagactacataaagacagacagcagtgacaatatgtcaaaaaaggcggctgttgtcggttcgtcaaactctgttgatatgtcggatacgatatatgcaagaccacaggctaaaaacgaagccgggaacaaggatggcatagatatggcagaaaatctgctaaatgacatgaatcagacctcagaaaacaggcgaaatgatatgattgtcactgcaagcaccaccacgagtgatgattacaaagctgcaaaggatgacggctacgatgtcattgtcaccgagaccgataagataaaagcagtgctggcaaaggcaggtgtagatatatccatatatggagatgacctgagcagggagcagcttacagacatcacgggaagccaaactgaagcggccatgcttgtcaatcagatgaaagcatatgatattcctgctacagatgacaatataaaggcaggtacagatgccatagaccgggcaaagagccttacaaatatatccaatgagacaaaggcatatctggtcagaaataacatgaatcctacggtttccaatgtatacaaggctacgtacagcagcagtcaggtacaagattacaggcagaaaaccaaaatgacggagatatcagatgagctgtttgaggagcttaagccacagcttaaacagatattagaggaagctcatatagacagtagtgatgagaatctgaatcagtgcagatggctgatagatgaagatatagccgttacacctgataatgtgctgcttgcgaatcgggtagactgcatcaacgcagcagaagaaaatgtgagcagtgatttttatgcaagggcagtgacagaagcactggcaatgggaaaaaaggctacagatgccactatgtcacaagatggtctgatatttgacatggcaaagaaagcctgtgatgtattaggtgaggcgaccgcagatgacattgtcacattagagtcagataacatacctgtcacgatagagaatctgtcaaagcttatagctgcaaggggcagggatagtgcagcatcgcaagcctcagcgaataaagctgcggataatcagattacagacagccgggaagcaaggcttgtaacagctcaaagaaagcttgaggaagcgagactttccatgacagcagaagccaacctttcactcataaaaaaaggagtttcaatagacacagagcctattgaacatgtagtggagctgcttaagcagcaggaaaataaatactacggagcgctgtttggtgagagcagtgtagaggcatctgatgatagggtacgtatgtacaataatgtctgtgatattttcaatcagatgaagcagcagccggcgtatgtactgaccctggaatctgctgatgacactgtgtatgagctgtatacagcaggcaaagcaatgaagcagtcattagaagcagcagcctcaggatatgagactcttatgacatcaccgagggcagatatgggagacagtatatcaaaagcatttcagaatgtggatgatatacttaaagagcttcagatagaaacatctgaaagcaatcgcagggctgtgcggatacttgcgtacaacagtaccgagatcacagaggacaatataaagcagataaagtctgtagatgagcaggtgcagagagcattcagcgatatgacaccggcggtgacgattgagatgataaaaagaggcatatcaccgcttgatatgagcatgagagacataagcgacattgccagacagataaaatcagaaaatcctgatgaaagggatgaaaaattcagcgagtttctctggaagcttgaaaagaaaaatgaaatctcagaggaggaaagagactcatatataggtatatacaggcttatatcacaggtggagcagtcagatggagcagtcataggctcacttgttaatcagggcgcagatattacaatgaaaaatctgcttacagcagtccggacaagaggaaagagtaccatggactataaggtggatgatacctttgccggagtggaaggagtaagtaagggagctagaattgatgaacagatagaaagcgcatatcaggcaaactgtctaagggatgtgcttgatacactttcacctgagaaaatggagtttgtgcaggatgacggctggcttgagatgactccggagcagctcaggcaggctgtatatgaggcagacgaggataatacactatcagagcaatatgccacggagcagctcaggcagttcaatcaggcagtttcggtgcctgaaagtgtgtatgcatttttggagaaatacgatgtaaaaacaaccgcggtaaaccttatggcagcatcgcgactaatgaaaaatccgtcagaggcagtaagaaatctctgggagcgtggagacagtgctacggcaagggctcttttggatgagactctcagacggttttcggagtcggtcaaaaatccaaaggagcttgcgcaggcgcaggaaacactggctgatacagctgagcatgttatggattcgatgattatagaggataggcacacaggctcaatagacctcagacagatgaagctattatgcagtcagctaaggatagcttcaaatatgtcgagacaggaaaactatattgtaccaatagagactgcagacggggtcacaggtatgaagcttcgcatagtaagaggtgaagataaaaggggactggttgacatattccttgaggataaaaaatgcggcagggtagctgcatattttgaggcaaaggaaaactcagtatctgctatgatagtcacagacgatgagcagactaaaaagctgtttgaagacaatatcactatgtttgaggcaggaataagtgatggtgaacagcgtgtgcgcatagatgtggcactggagcatgatatatctgcaaaagagtctaagatgtcagatatgaaatcaaatactgagtcagataatgagactaaaaagcagcttgatggcagcgaaagtgtccagacaaccagactatatcacatcgcagagcagtttattgtaaatgtccagagggtgattgcgcaagatagtctgtaacaccgatatatattgcatgtgccaggtcatcctgatagttttcgtcagtaagaagaagtgtctcagcaggattactcaagaatccacattctacgattacggtcggggatttggattttttaagtataaagtattctttattgggcttaatgcttcgtggctttgcgacacaaagagaagtgtttaaagctccaagaacagaggatgcgagctcttttcctgcatcagaggcttcataatagaatacctgtggaccgcagcttgaattgtcctcaaagctgttttgatggatactgatgctgactgccacattgcttttagacatcagggcagttctctttgtcagatcatctgtctttggatgtttggaattatccggggcgaggtcgcagtcggtggttctggtcatgacaacagtaaagcctctgttttcaaacagctgtttaagagccattgcaatactcaggttgacatccttttccatgacgccggaggtggaaatcttaccgggatcacttccaccatggcccgggtctattacaataacagttgaattagtgtttttgccggtgttttttgcaagagcgcagacacctcttccgaggtagaaggacagaataaagagagctaaaataagacagtatttgtttttcttaataatgtacatatattttttcatataagatacctataaaaaacccgatgcacatagaaggcatcgggtgtgtttgtatattatatgattggctgatatcatttataacctataaaaggtactgagttagactgtagctgttaaaggtacggcctctttcagtaagccttaagcaatcagttcagatatttgataacagtatcccagacagatgaattttcaaagccgagcttccagaatgctgcaccggcgagcttattgtcgtcgacgagcttgagcctgttctctaaagatgtattgtcctcgagccataccttgtacagcttgttggatacagaccactcagcgtagttctgaccggattcttcatcaagagcagcagtggcattgtttgtggcaagctgtgctgcagctgcgtccatactatatacctgtgaggcaacagtgtactttgactgatcctcggtatcggttacggcatcatcgtcctcctttggagtgagctcccatattctggtataaaaaggcatgccgagaataatctggtcagcgggaacctccttcagagtggattcaacaccctcagttacccacggaatggaagaaactgagccggcatcagagcccttatagtgttcatcgtatcccataatcacaatataatcggcaaagtttgccatatcagagcgattgaagaacttgttgaagctggcaggtactgtgacatcaactgaaagtgatataccgttattgtgacactttatggcaagctctctgataaactctatgtaagagtctccatatgcgtcttctgtgatattttcaaagtcaatatttacaccatcaagctcatagttaaatgcagccgacataatctgattgatcagtgtagttctcgtggatgtatgtgtgagcacatatgctgcatctacatcagtattttcaaagttactgaacagtccccatacctcgatgccctgggaatggcagtagctgacataatctttgcttgctatatctgccagattaccgttgttgtcatttaaataaaaccaagttggtgacattacatttatgcccttggttgatgaaattacctggggcactttactgtttgctgactggcttgttacctgattccaggcaagacatatatccttatccttcttgatatgcgtaaaggtctcttcctcatagtcaggattcgtaagcttagtttttttactctcggacagagccttgctctttatatatccaataacaccatcctcagtggcaaccttatcccatttgtcaccggaatcaagaatagtaatcttatcatcctttttcacctcttttagaatagggctctttatgccgcccttcacgcggacctgggtagacttgtttacagtggcactgtctatttcatcccatttgcttgtaatgacgacgcgtgccggggcatcatatgacttaaaggtgatattggagtactgttttacatagtctaaagcaataagcgcagagtcagaggtggctttcacaatcggatagccaaagtcagtggtctgcttggtgacactgtagctattgctgtcagccgccgctgagatgatatcagatgcggttgtgtaaagaagcacattctcatttgcatcccagtaaaatctggaatttaatgagtcgtgaacaaatttgtaatcaacgtatatttttttatctattattttagccttgtaatcggatagctcattatctacaatgagagcagcctcatcatcagaagagatattgaaatactctttaagatcctctgtctttttcgtaggtgtgtatttattgataagagcagttatacccattattattacaacgaggataataagtccggttactataagtgcaggcaataatttctttttcatgtgtaaaaatcctttcctattatttggtgtcgaaattgcttaagctaattataccattgtgaaatagcatattcaaataatatgaaataaatttgtaataaattaagaaatttgtttatgcattttggcgcggaaggagcaaaagcttcccccgcgcacatagcttttctttttaaaatatgtcttttggttgtctttttgcatttaaacggggtaaagaaccaaaaatatgctgacatcgatttcttgtataattgagaaaaaatgatattaatcattaattattgatagtttatagaaattgatatttccggagctttccacacccaatttaattgctgatttttagtttcgtttaatttgataaaatatctgtaaaaattccaatatataaatatagtttattcttctataaaaatacctccgtctctatataatgatatgagtaaaaactgacaagtaacaaatggccttatgtcatgaagcgctatgtggcattaaaagtacaagccctccgaaggcttcggacataaaattgataaacagctggttaaagatgtcattttgcatcgtgatatattaattcctttctgatatcttatccagagtgccaaacaggctggtattgatgaggaacgggtcctctaagtaaggaaagcctaccaccggatacttaaaatgtttatggttaattgtctttttcttttccacgagattaaacaatatttttacgctttctgaatcagttattttgtttgagttgaatagctcgataattctgttcaaagcgccccggttccatttacttattgtacacacagcgattcttacatcacacctcataaattcctttaaggtgtttggattaagtatgccgaaatcaataatcacacgctcgtatctcatgtttaaaatctcagttagtgtggacatgactgcgtgaggaaagaaatctacattcttataagtaaaaaccttttcgtctgctgtctttgacagtgaaagaatttcgtgtgtaccattcagctcaacataggcggttctatacatgcatttattgctcatataattacaaagagcaaggcttatatgtgttgtgcctacattgtgaacgctgccacagaccccaactaactgtggtgcagaatggactttcttaaatatccttttaaagtgtctgatagtgatgctcctccctttagttctaacagcttttgaatcagcgtttccttttgaactgagctcttaaacatatcgctgtcataaggaaagtgataaacactgcaattaagtagtgccgcaatcgcggaggcatcctgtctgctgcacatattacatataacactcagggaagctgtcatttttttgagaatagaatgattcctgtagatatcattcagatgccaaaagctgccgttacatacatataatacgagatccatgtcatatattttctcgttgcacacatcagtgccaaggtcgtatatctgtattgcatcctttggaatattaaactgtataccatgactatagtctggtatgccctgaaagcttttgtaataataatatccgtttttctgcttgaaaatctgcagtccgtcgtgattaccatggcaaagtatgctttttgctgagtctatgtagataccatgatatccaaggatattgagttcgcaggtgagtgaaacggccacgtgggtggagccgcagcctctgtgactgcctaaaactgctattttgtgtatgagatgtggctgaccggttaatttttgaatttcctgtatttcctgatatagctctgcgacagtcacgtaacgcagtgatgcatcagatgttgttgctttttggataatatgctgaaacttatgggaaaagctgtctggggtaaaggtcagtatatactgcagaagctgacctaagctgtaaatgtctgccgccggtgtaattgtatcctcggtaaagcattcgggggcagagaattctatattcccatagtgattgaagttatttccctttcgggtaacatatgtcgatacaccaaaatcgataagcttaagcttattgtggcatactataatatgctccggtttaaggtccctgtagataatgggagtagatatctgtgtatgcagatagataaaaacattacataattgttcacaaatattaaaaaataaacctggggaaattaactgatgatgaagcaaaaatgaatctaatgtctcgccgtcgatatattcctcgacgatatagtaaaaagcatcgtcatcttcgaagtcaaatatacgtggtatagacggatgctcaagagacttgagtagtcttgcttctgataatgcggattcggcgaaagcagaagctttaggaactttctttagagctctctcctgatccatagatatgtgtctgacaagcgtaacgctaccggagctaccggttccgagatctttaatcatctcatatttgtcaaacaaagaatgatttgtatttttcatacgctccttttgggtcgagcgcacatctcatggataacttataacatacctgtaaaataattgcaacactttttttatttttttttaataggcctcgcgctttacaatatgacaggtgtttattataatagttttacgatttacacggatattttcggaaaaggatgtgaaaaatatgaaaattgagaaggtaaatgataatcagatccgctgtactcttaccagagaggatcttgaggacagacatataaaaataagcgaactggcatatggatcagcgaaggcgaaaagcctttttaaagatatggtagagcaggccaattacgagtttggctttgaaacaaatgatattccactcatggtggaggcaattccactgccatcagagtctatagtgcttatcatcacaaaggttgaatatccggatgagcttgacaccagattttcaaagttttcagaggcagatgacgactttacggacttaggaaatgcaggacagcctccggtgataaagggagctgctgatattttggagctgtttgagcgtatcaagaaggaaaatgagaagacagccgatagtgagcagagcactgaggatattacagaagaacaggctgaggctgacgtagtcaagctgtttgtttttgataaatttgatgatgtgcgcaggatttcgcatgtgcttgacggcttttacagcggcagaaatgacttataccgcgacgcttcaagcaataagtactatcttgtggcccacaagagtgagcatactccgaaggaattcaacaaagtgtgcaatattatttcagagtacgcatatcagaagaactatgtgcctgccaatgaagcatttttcaaggagcatggtaatgtgattattgaagaagctgccatccagacgctggcagcactttaacagaatattgattgcaaataaaagacggcctgcataagcaagccgtcttttcgtaaattaaccgaggtcgtgatcgatgaatgtgttgatttcaacgacaagatcatccgggtcaagtccgtgaaccatagcagcctcttcgattgtctccatctgtgatgatgggcatccgagacagtgcatgccgatatttaaaagtaatggtgccacgttctggtcaatctgaagaagatcaccaatcatagtgtccttagtaactctagccattattgtttcctcctattagtcttttaatgtgcctattataatacgatttgcatttaattgcaaattatactataaagattttttttgagtagttcgatatacttattagacaacggaatgttaatactacagcaaggatgcctgagaaattatcaggaaaggaaaacacatgaaaataaacaggaatatgagtgctgtcagggcaaataagcagctcctcggtacagaaaacagattatcaaagtctatgaaaaggctttcaagcggctacaagataaattcagctgaggacaatccggctggaatggctatctccaacaagatgaaggcgcagatagaagcgcttgaccaggcaaaatcaaattcgtcagatgcgcagaatgtcatgaaaatagcagacggagcacttggtgaggtaagcagcatgctccagagaatcagggagcttgcggtacagggcgcttcagatacatattctgagaatgataaaaaggctttgcagtcagagatagatgagctcaccaaggaggtggaccgtatatcgggggatacggagtacaatacaaagtcactgctcgacggttcgagtgatacacgcgtctatgtaaggcagaaggatgcaaatggcaatatgactcaggtgaacagctatattacgagaatcaatttctcagacaatgtggcgtcagataaatatgagctcacagtaaattcgctcgcaacacaggcaacaggaagtcttgcgtctgccacaaagcctgacgcagagggaacgatttccataaacggtgtgagtgtggctgtgaaggcagatatgactcaggatgagtatatccaggcattgcagtcggcagcgactacagccggtactactatgcaggtgaatggtgatagcatcagctttttatccaatgagtacggcagcgacagcacagtaaatatatctctttcttcatcgcttaaggctctggcaggtgcaggctatgagaatgctgacgatggaagtggaaatatgcagctcaaaagtaatggtaaggatgccgtggttacaggcggagaaaatctgtcggacaagacaataagagcagacggtaacagggtgtatgtggtaggaaacagtggattttcaatggattttctactgagcagtgatatggatatgacagcgggaagcagggatttgcagatagatatttccgatattggaaatatggctgtgcagattggtgcaaacgagggtcaggagatgaaaatcaggatacctgaggtatcatcacagacactgtatctggatacggtagacgtgacggtaaagggtggtgcagacaaggcaatgtctacacttgatgaggcgatagagtatgtctcaggtgtgcgctcaaggataggagccttccagaaccgtctggaatctgctgagagcagtctttctgagacatctgagaacatgaccggtgcatattccaatatcatggataccgacatggcaaccgagatgacggaatacgcagcacagaatattctcgaccaggccggaatctcagtgctgtctcaggcaaatgacctgccacagcaggtactttcactattgtcgaggtaataagcaatgaaaaatgaattgaagcaggagctcaccagaaggctttgtgagtgcaacaatggtgggcttgtgcttgttatgtatgatatatattttggattttcagaagatgtaaaagctgccctggcttcaaatgacagggcagctttgaaaaaggcagtagcggatgtacaggcagcgcttgatgagctgatgggggcacttgactttaagtatcctctcgcaggacagctttatccactgtactcatactgcaagaggcttttttccacagtgctttactcacttgatgtgtcggtggtggatgaggccgatgtcattatgaaaaagctcagaaacagctttgaaacagcagctgccgatgacaaatcggctccgcttatggacaatgcgcagaaggtctatgcgggcatgacctatggaaggggcaggctcacagagagctttataaacgatgataacaggggcttccttgcgtaggaggcctcttttttagttcattaagcctcattaaacctcattaagccgcttggcacagtttaaaagaaatttataccgcatggaaacggccttggcctgatagatgtagtagtcaattaaatcgggctcaaccacattttccaggttagtgtatacaatttgaagttcatctgttgtttttctgatgtcatcctgtaaggttttgtaaccgtcatttacaggcgtttctttaaataatttcatgaattcctccaacaaaataagtcttaatacaagtataagcaaaagagtttcttctattcacagattttgtaaaaagtgcttttgacatgtgaaaaaccagtaaaatcaaggttttgactgtggattaatgtgttgggtttagctgcattttgtggataactgacaaaaagtatttattttaaaaaaagctatagacaaaatcgggattgcgttgttataattcgtctcacgaaaggagaggtgatgaaaatacagtgattgtgaaattaatatcacacctcatgctgtatatactgcttacagtagcagcaattggggatttcaaaaattatagaatcagtaaccggctgattctgacgggacttggttgtgcgtttctatttcgcttagtggggggcaaggtagcgagcatcatctggtttcttccagatatagtttttccggttgtcattttatatttcttatatctttcaggcattttaggagccggggatatcaagttattttcagtagtatgtgcatttacaaatttaagatttaccgccttgtgcatggcagccgcttttgtggcggcagcgggatatggtctcataagtatggtgcttaaaaaggagctctttgtgcgtatgagggatggatttttatacttaaacggtatactgtgtggcagatttatgcggtaccggggacaggggaaagctgttagtttcgcggtatacgtgcttttgggaacggtcatggcagatatatggttttacggcatgaggtgatggaaggagggttaaagtaccatagatgaaaaaaatcagactaggaatttatattgaggattcagaatatggcgatagactgacatgctatttcatgaatcattataaggatcagctggagatacatatgtataccatgaaagagcagctggaacacttagagggcgagatagatatcatgctttcaagtgagcttgaccagtggaataacaagtatatcccactgatacagattgttgaggaaacacctattgagagtgaggagggtatatactttgtggaaaaatatcaggaagtaaaccgcatagtggaagagattttaaagcatgtgggcggtgaggtgagagaccttaagagtgagggctctttgataggtcagacgaggcttataagcgtgtattcacttgctgataatcagtatcagatgccttttgcgatgactttgtcctctattttgagtgagaatgaaaaggtactgcttatggattttcaggagaatagtggattatcacggatgcttgaacagagtgtggagcataatctggacgagctattggtgatggccgaatccggacgatactcgaccaacaggataaacagctgtatcggaagaaagcataagctggactatgtatatccgattgagaatacagagtgtctgtgtgagataaatacggtaatctgcaacaatctgcttcagatgcttggcaaggaaatgcactatgactgcatagttctcaatatgggcacaagatttaaaggcttttttgatatccttgacagatgcagtgatatctatttggtgcagaaaaagggcggaatcagtcagtggagagagtacgagtttactgaggagctgatggaaagaggcttaagcaatgtagttgagaggattaagctgattgagcctccgctcattacgatgccggtatctacatgtgagaagcttgtagagctgtggaagtggaatgagtttggagatgtcataagaaacatgactcggggtatttcgtgtgctggatgattttggacagagaataagagatattatactttctgaaatggatttgtccagagagctgagtgatgaggaaatctgcgatttaatcggaagtgtggtttcaagagaggcacgcgacagacctatgaccataaaggatagggcagagcttgagcgcaccatattcaactctctgcgtaagcttgatgtgctacaggagctggtggatgacagggatgtgactgaaattatggtaaacggtcccaatgatatattctatgaaaaagccggaagaatccaaaggttcaagggtcatttttcatcggaagagaagctggaggatgtgatacagcagattgtgggacgccataacagggttgtaaatcaggcatcaccgatagttgataccaggcttagtgacggctccagggtaaatatagtgctaaaccccatatctatagacggctcggctgtatcaatcagaaagtttccggagcatcctatgagcatggagaggcttgttgagatagaagctctttcgccggaggtggcaaggcttctacagatactgacgcaggccaaatacaatatatttatttccggtggtacaggctccgggaaaacgaccttcctgaatgccctgtcacaatatattcctgatgatgagagaattattacaattgaagattcagcggagctgcagcttctgggagctaaaaatatagtaaggcttgagaccagaaatgcaaataccgatggggttactccaattacaataagagatcttatcaggacggctcttcgtatgagaccggacaggataatagtgggcgagtgcagaggtgcagaggcgcttgatatgcttcaggctatgaatacaggacatgacggctcgttgtccaccggccatgccaattcaccacatgatatcatttcaagaattgagactatggtgcttcaaggtcaggattttccactcaatgcgatacggcagcagatagcatcgggaatagatatcatagtccagcttggcagactgagggacaagagcaggagagtgctggaagtttcagaggtagatggatttatggatggtgaaattgtgcttcatacgctgtatcgttttgaagaaaccggtgttttggacagtggcaggatacagggctttttaaagaaagcagggacactttgccacactgacaagcttatggcagcagggcttagtgtatagactgctatgcggcatataaagtaagaaaggctgtagctgtcagtgtaggcttatatgttactgaacagttacgaagggttttgattatatggattacagcagatattccatgtctgcaaaggactgggggattgttttcataaaaagtatgtctgccacagtgattatcgcctatttgttttatgacagtcctattgtggttattgcttttccggtggtgtttgtgtattgtgctaagctatgcaggcaggagggcgttagaaaacaaaaggaaaaactaaatgaagagtttatgaatgtactaaaggtgttgagctcgaatatgctggcaggatactctgtcgagaatgcatggcaggaggcagaaaaagagatgcagctcatgtatgggaatgactcgcttatgctgtctgagatacaggagatgaacaggcagataaagctgaatcagacatttgaggcagtgctgtctgaatttgctcatagaagcggtctggaggatatagtcaatttttctgatattttctcatttgccaagagaagcggaggccggtttgtggatatcatagagtccaccacatacaggatgtggacaaagtatgataccaacagacagatagatgttgcggtttctgccaagaggcttgagcaaaagactatgaactatattccgatatttcttttgacatttttaaagctgtcctcaagagactatatgtctgcactatatggaaacctgatcggggtaatctttatgagtacctgtcttttagcctatgcaggggcaattaaactggcaaagaaatttttacaggtaggaataggcatatgacgggaggaaagaggcttaaaatagcagcattatttgttatagttttggtttttgcttttatcatggatatgtcgtcaaatggcataactgacaatacacttacacgcaatgatacaggtgatggcgatgcaatatatgatctggtgctaaatgcggatggactcgacgaggattacagctatcagctcaagctgaaggaggagaagccttcggacaaacaggcgaacgagctgtttacacaggcaaaaaaagagatagatgacagcttttgtgaagaaggccagagtgtagagcaggtcagaggacatattaatatgaaggaagcatatgcccaaggagctgtggaggcagagtggacactgagtgactatgatgtggttgatattgatggagatgtgaaccaggaggcatttgagtcagtagatgatgaacagggaaagcttattagcgcaagcgttgagctgtcctgtggcgaacacagacaactgtacgatttttcatttatggtatttccggatgaactggatgcaggagagcgtctcataaaggatatcaacagacatattgacagtgagatgtcaaagtcagggaccaaaaagctcacgctgccggatgaggtagatggagtgaagcttagctggtcgcaggaaaaaagcaatacggcaggtaaaatagccatgcttgaggttgttgttatagttcttctggtgcttgagaaaaaggaaaaaaagaagacagcgcagaaggagagaaatatacagctgcagctcgaatatccggagatagtcagtaaaatggccattttgatgggttccggaatgacggtggaacaggcatggaataggattaccgcccgttatcttgataagcggaaaaataacgatgagaatattatgcccgcttacgaggaaatgcttgtgacggagagagaaatctcagatggcatgacaggcagaaaagcatatgcaggttttgctgaaagggtaaagctgccatgctatcagaagcttgtacgcattattttacagagtattcacaaaggaagtaagggtgtatgtgagatgctcgagaaggaatcagaggatgcatttgatgagaggaggcttttagccttaaagctgggtgaagaggccggcacaaaaatgctcatgccgatgatgattatgatggctatagtcatagcaatagtaatagcacccgcaataattgattttaagatgtagaaaggaaaaattatgttaggatttaagaattttttattagatgaggatggcgcaggagtagtggaaatgatactgataattgtcgtattaatcggcctggtgctgatttttaagaagcagcttacggcacttgtaaacaatatctttcagacaatcacgagagaggctggtaaagtgtgagaggcagtataacgatatttgccacgatgcttatcatgctggtgtcacagtttctgtttactgtacttgaagccggcaggaatctgacacttaccaatatagccggcatgaattcagaggctgtagcagaatccgtttttgcacagtattgcagaccattgtgggatgaataccatttgcttgcatatgatgccggaagtgatgcaatgggcaatgtggatatcgaaaatgtcaagtcgtatatgaagaagctgacgacggataattttaagataggcgattcgggcacttttgccggaggcactattgtaaacggcaccagcatgttaaggctgtcaatggatgagctcgaatccatgaaatatgtgctcatgacggatgatggtggtgatgtgtatacaaatgcggttgtctcatatatgaagaaaaatattggttatgagacagtcagaaatctttacagtcagtacagctcattgaatgaaaacaagtctgcaggtgagtatgatgacggtaaaatagacagtgcgctggaagccttaaaggtcaatgcagctcatgagggcggaggcaaaagcatagcgaagtcatcaccgcccagagcttacagtgctccttcatcggcttcaaagggaaggcagacatcagaaagcaaagcagaaagcaccggtagcgataatacagttgaaaatccgctagtaaaggtgcaaaaggtgaaggcatccggcatattatcacaggtggttgatgagagcactgtgtcaggaaacagtattgacacatcagccagagtgtcagggcgcagcctgcataaaggaacaggaggctggtcaaaaagcagtgacgactggtatgcaaaagtgcttatgcagcagtatattctgacatatatgagctgctacactgatacaaatccaaaccatgccctaaactatgaggtggagtatatcataggaggcagggcgagtgataaggataatctaaagattgttatagcagaaataatggctctgcgtacggctgccaatatggcatacctgtcaggaagcgcatcaaagcaggcacaggcgatggctcttgccacaattatcggtggaattactctacaaccggagataattgaaggggtggaaaagggaattctggcggcctgggcattctgtgagagtgtgctggatttaagggcacttttggatggggataagattccactgataaaaagtgataagtcatggacatccagtctgtatggcatgacaagtatgctcaccggtcaggtgaaggcaaaaagctcaaatgaaggaataggctacaaatcatatttgggactgttgctttttacaaagagcatgaaaaatatatcgtatcgctcgatggatgtgcaggaggctacagtacgtatgaccagtggtcatgaaagctttagaatggacaatgcaatttgtgagcttagtgcagatgtaagctacaaatatcatggcacatttttatgctttgtgaatctgttagatggagcggataacgagtataccattaaaaatcaggcaaagtactcttattatggacgctgacgaaataagaaaggaaataagaaaggcaggtgtatgaaggtgtcttttgttaataaagtaaagttccacataaaaaaactttatagaaaggccaaactcccaggcgatgatagttctcaaaagatgccctcatgcacctgcctgaaggcgtcatatacacttgaggctgcggtaatatttccgcttgtagcaggcttttttatatttatactttttttcttcagggtggttcaggtggagtcgcaggtaaaagccgcactgtactattcagcccggatgagtgcgctggcgagcagtgcaaacgattcgtcagttgtctcagtggccactgcagaggtactcttcaggagccaaatatctgactcgaagcttgttgatacatacgtgagcggtggaaggtatggagtgtcactgcttggctcaagtatggatggagacgatgttgcacttaaggcaaagtacaaggtaaagcttccggtgagtttttttactgtggatggggtatggatagaggattatagcaacagcagaaaatggacaggaaaaaacccgggtgaaaaaacggatccttatgtgttttacacggactatggcagtgtttatcacctgtccgagcaatgcaactatctggatttgagcataaagagcatcaaatggtcacaggtgggggcaagcagaaacaaagatggtaggaaataccacgcatgttactgtgccgcggataaaaaaacaaaaacatcgacagtatttataacagactatggcacgaactatcacggaaagctgggatgcagtaagcttaagcggacagtacacaaggcgcacaaatcggaggtgaatggaaaaaatctgtgcagtaaatgtaaaggagaaggaacatgatacagcttatcattttacttggaataatcagtataatcgacttttcaacaaaaaagataccggtcgttgtattgatagtaatgggaattgtgggtattgcaagctctttttatgcacagcagtcaattatatcagtggctgttgccctgattcccggaatagtgcttatggcagcagcgtttcttacaagggagcagataggatatggagatgctgctgttgtgactttgatgggattgtttgtgactgctgacatagtgtgcagcactatggtgatgggatttacaatagcaggaataatttccgttattttaatcgcatcaggcagagcaggaagaaagatgcagattgcatttacaccatttctgctgctgggatacggattgacggaggtatttatgtgactgaaaataaattaaatatagatttatcttatggactaaaaggcagttatacagtggaaggcacgattattatacctatatttattgttatgcttgcgatagcgatgaagatgggacttgtgctgtataacgaaatgaaagcagacagctcttatgagtatgctacggatatgtggctggtggatgatttctataattatcaggttttgaaagaggtagtaaatgaattctaatgaaatagtatatgagagaaagatgacaggcagctttatgaagctgcgttgtgatgaggtgagaccgctggatgaaaagatattgctgaaaaacaatattccgggttttttgccgattgagaagtgttatgtgaataatgaagggcagtactggtatgatatatccggagtccagtccttggaaatgcgctgccagtacaatgacataaagcttgagtttcttgaaaagcttgtggtgagtatctgtaacaagatggagcttttggagaatcatcttgttagcgcagaatctctggtgcttgatcctcagctaatacacataaaaggggtaaatcaggatgaggaaatatattttacagcatacccggcacagatgaagaccatttgcaatacattctcgcatttgatggagtatatgctcacaaaacttgatcacagtgatgctgaagcgatacatatagcatatggtatatacgagaaaaccataaatggcaattacagtatcgctgatattcgaaatgccataatcgaggagaggcagaaaaaggtggcagaaaagccggtggaggaggtgattgcgccgatttcacagccacaggtcagagtagaggagcctaaggagcagataaagcctacactgtacgataagcttcgggtgtatctgctggagcagctggatatcaggctgccggagcaaaagaagcaggcgtcagtgatagaaaagcctaaaaaacaggacataaacagaaaatggtttaagaaagaaaaacgaaaagaaaatcgtgaaaagttagatgacaccatgcttatacacccaggctcagaggctgcaccggagcctgtaccgcgtcagatacaccccacagtatgtctgagcgattacagagagcacccacagggcatgcttttgtatgagggcatggaaaaccgcagtaatataataatagacaaagattgtacgcgtattggtcagggtgacgaggccgatgcagtaataggcaaggatacaataagtcattttcatgcagttataaacagggaaaaccaggaattttatctggaggatttaaactccacaaatggaacctttgtgaataatgaggtgcttgcgtacaagcagaagaagcagctcaagtcaaatgatatcatcagatttgccgatgttaagtaccggtttgtataattgttgcaaataagctccttaaaatttataataagaaaaaagtatttaacaggaaaattaaggagaccccacagatttgcagaatataaaaagatttgatacaaaaccatatatgacaattggcataatagtggtaaatataatagtttttgtgctgatgagtttatcaggcagcacacttgatgcacagtatatggctgcccacggagccatgtaccctgagtatataaaggatggccagtattggaggctgctcacttctatgtttatgcattttggattgatgcatatacttaacaatatggtggttttaggcgctgtaggtcagatagtcgagaaggctatggggcatgtgaagcttctgattacatttcttgtgtcaggcatgtgtggaagtgtattatcgtacatcgttatgctttataataatgactttgcggtatcggcaggcgcctccggggcgatatttggtctggtaggagcacttgtgtggatagttatagcaaacagaggcttttatgaaggaatcagcaaacagcaggctgtatttatggttatactgatgatatactatggagtttcaacgcagggagtggacaattgggctcatggtggtgggcttgcaggtggatttgttatttcaattgttttatatcgcaaaaagagatataataaatataatatcaactagaattaatggtaggagaagctacatgaagataaatatttattatggtggaagaggcttactggatgacccgacactgtatgtgataagcaggatagaaaatgtgctaaaggagctccgcgtaaaggtagagagatacaatatctatgagcacaaaaatgaaatagctacattgccacagacctttaaggatgtagatggaatcattctcgcaacgacggttgagtggcttggtataggtggatatatgcagcagttccttgatgcatgctggctctacggtgataatgaaaagataagcaatacatatatgcagcctattgtcatgtctaccacatatggagagcgcgaggcagagaccacactatgcaatgcatgggagatacttggcggtctgccgtgctcagggttatgcggatatgtagaggatattactgcgtttcagctcaataaggagtataatctcataatagaaaaacgcgcggagaatctgtatcgcacgatatcccagaagattaagagcctgcctacaagcaatcaggcagtgaagcaaagtgtactcaggacacagcagctcaatctcaccccacaggagagtgagcagctgtcgaagtatgtgtctgatgatacatatgtcaagcagcagaaggaggatatcgaggagcttgcaaccatgttcaaggatatgctcgggcagcaggcttccacagatgacatgccatatatcaaggagcttgaagcccattttattccgcttcgcgaattcaaagcctgctattcatttaatatagaggggattaaaaatccattatatataaaggtggatgaggataagctgaatatacattacggcgaagaggatatagtggatgtatacgccaaattttcgaagagtatcatggagtctataatagatggtcacatgaccttccagagggcatttatgaccggagaaatgacagcaaaaggcaatttcaagacactgcgcatgcttgatcagatatttccgttttaatgggctttttgattcttaacagttacaaaataattatatatatgaggtgacaaagatgaaagatgacaactgtattttctgtaaactggcaaatggggatatcccgacaaattcaatctacgaggatgatgatttcaaggtaatactcgatgcaagtcctgctacaaagggacatgcacttatccttccaaagcagcattatgcaaatattttcgagattgaggatgagacacttgccaaggcagcaaagcttgcaaagaagattatgacacacgagaaagatgtgcttggctgtgaaggctacaacctggtacagaacaatggcgaggtggccggtcagacagtattccatttccatatgcacctgattccaagatatgagtcagatgacaacaaaaatgtcatagagtggaaccataaggagttcactgatgacgagatgaagaaaatctgcgacgagatgagcatgtagtagttattatatattatgatatgagggtcaaaagatattttgcccctcatttatgattaatcagattattgaaaaataaaaagcccggatatgcaaatgtagttcatatccgggctttttcttttttatgatatgcaatgacgctttaaacagactctgaccctatgacgacttcttcacctgagagttaatcaaatcgattatagtggcgatggaatccatctgaccgctttttgccatggcatccttatatttatccctgttgccgtacacctcttttactgcgctaagcagagaatcctttgtgagctcctcctcctcgatgacatatgaaaagccctgctttttgaaggattttgcatttaatacctggtctccgcggctggctgcagcagatagaggaattagaatatttggcttgtgcagagcaagcagctcgcagatggagttggctccggctcttgagatagccatgtcagccagagcaaacatgtcggtgagctcagcattggcgtactcaaactgtgcatagcctgtgattccggcaagcttgttgtccagattgccctttccgcagaggtgaatcacatagaaatcctttagtagttcaggaagaatctcacggacagcttcattaacctttttagagccgaggcttcctccgatgatgaggatgacaggcttattgtggtcaggaaaattacaaagctttatggcattttcggcaacgccgctaaaaagctcgcgtctgataggtgatccggtgagtacagccttgtctgcaggcagatatttcatggtctcagggaaattgcagcagacctttttggcaccctttatggcgattttattggcaagtcccggggtgatatctgactcgtggataatggcaggcacatggcagtgctttgcggcaagcacgacaggtacggaaacgaaaccacccttagaaaatactacatcaggcttgagttttttcatgaggcttacagcctgaccgtagccctttaacacgcggaacgggtctgtaaagttcttccagtcaaagtatcggcgcagctttcctgatgaaatgccgtggtaaggaatcttttgggcttcgattagtcccttctccattccgtttactgagccaatgtattcgatatcgtatccggcctccttaagtgccggcataagagctatatttggagtgacatgacctgcagtaccgccgcctgtcataactattttcttcatatatatgtatcctttcttgcattcctgtttgtctcatatttatattatactcaacacaataaaagtcaataccaagttaccggtgaaagtttgccctgcaataccaaacaaatgtcgaaacttgcgaccgataggaactgttaagttcaagtgaattggttataataatcaatagtacatcatcctgcgttataggttaagttaaattttgaatgatgtatcggaaaaagaatagtagggaggacacattaatatggaattatcaatggacaatatggacatcgtggcaggaggcatacttgcgataatgcttgcacttttcatgctgacagtcattgtgaccttgttcgcactctcacacaggataagacttttgagcaacgaaatttataaaatagaaaaacaggtgagtgactacatagacgagctgtcgagaagcgaaagcgacaagcttgagatagagcataaggcacatcagaatggggtgatttcatcggtgctgcaggagatttttccatgaaatttgacaaaatgttattactgtgatattataccgactgtaacaaagttgtaacaaatgcaacataggtgtaataaacgtaacaaaaacaacatatactacaccatatggaggattatatgaagctaaacaaaaaagtaatcgatagcattacggtctgtggactgtgcgccatgctgacggttaccgcggttactaacagcggacgctctgaggtcaaagcagaggataaggtgctagcaaacactggtttagagcatactggttataatagttatgctggcgtggcagcgactctttttgattatgagaagggtctcacagcagagaatgctgttacagtagaaaaagaaaatgttgagatggtggcagcagcacaggatgcacagcaggaggcacagccacagctcacacaggagcagcaggaatggcagacaaagcttatgccaaaagttgaagaatcactcaacgtaagagcacaggccgatgaacagtcagatattgttggaaaactatataaaggaagtgtggcagacatcgtagaaaacgatggcacatgggctcacatcaagtcaggaaatgtagacggatatgtcaatgtatcttactgtgtgaccggaactgacgcactaagctatgcttacgacacatgcggagaaattgctacagtaaatacagacggacttcgtgtgagagagacagcagatacaaacagcaaggccttagaggtagctgaccagggcaagacctatcaggtggaccgcgcagcgcaggcaccggacggctggattgcagtagtcagcgattcacagacaggatatatcgcagcagattatgcgacacgttccctcaacacaagagtgggtatcacaattgaagaggaacaggctcagatagctgcacagaaagaggctgagagaaaggcagcaaaagaagctgcaaaagcagcaaaggaatcaaagaaaacagagaccacacagggcgaggcggtaagtgcaggagcagatgacctgacacttcttgctgcaattatcgagtgcgaggcaggcggagagagctatgaatgtcagcttgcagtaggagcggcagtcatcaacagagtaaagagcggctcatatccaaacagcatctcaggtgttatttaccagaaaggccagtttggaccggcatcatcaggaaagctcgcaagaaagcttagcggacgcatttcttcttcatgctacagtgcagcacaggaggcaatgtccggagtggacaacacaggaggatgtacatccttcaatgatcacggctcaggaatatcaatcggaaatatgaagttcagataatatacagccaatacaaagaaataacaaagaggctgcaaatcaacaaagcttgttggtttgcagcctctttaattatttgtacggcgtggttttacagtcagagcgtcaatgcttcaaacctcttgcaacataccacaaaatagagtaaaatgacatcattatagcaaactacagatataaattatagcaacctgcatctataaacgatgcaaataaaacccaggaggcaagagcaatgcagttaaagggacgaaactttttaaaacttatggattacactccggaagagattacttatctgattgacctctcacaggagctgaaggaaaagaagaaaaaaggcatcagacatgatgaactcacaggcaagaatatagcgctgatttttgaaaagaccagtaccagaactcgctgctcttttgaggtagcggcacatgaccttggaatgcatgtcacataccttgacccgagcggttcacagataggtaaaaaggagagcatcgccgatacagcgcgcgtgctcggcagaatgtttgacggaattgagtaccgtggatacggacaggaaatcgtggaggagctggctaaatacgcaggcgtaccggtatggaacggcctgacaaatgagttccacccgacacagatgatagcagatatgcttacaatccgtgagcacctcggcagactcaagggcgtgaaatttgtatacatgggcgatgcaagatacaacatgggcaattcactcatggtcacatgtgcaaagcttggcatggacttcgtggcatgcacaaacaagaaatatttcccaaatgatgagcttgtaaaatactgtaaggacgttgcagaaacaaccggcgcatcaatcacactcacagaggatgtggcagagggcacaaaggacgcagatgtcatttacacagatgtgtgggtatcaatgggcgagccggaagaggtatgggcagagcgaatcaacgacttaaagccatatcaggtaaatacaaaagtatttgaaaatgcaaaggatagcgcaatctttatgcactgtctgcctgcattccatgatttaaagaccacaatcggcaagcaggtctatgagaagtttggactgagcgagcttgaggtgacagacgaggtatttgagtcagagcgctcagtggtatttgatgaggcagagaaccgtatgcactcaatcaaggcaatcatgcgtgcaacacttgcagactagagcaaaactaaggaacaaagtatgaaggaagaaatacttaggcttctacgcagcgctgacggctatatttcagggcaggagctatgcaaccggttcggagtatcgcgcacagccgtgtggaaggccataaaccagctaaaggaagccggatatgagatagaggcacaacagaataagggctacaggctcatggcagcgccggatctgatgacagaggcggagataaaaagcctcatgcacactgactgggtggcaaaggaagtgctgtattttgatacaatagactccaccaacatcaaggctcaggagcttgccgaaaaaggctatccgagcggcaccttagtcgtagcggacaagcaggagtcaggcaaggggcgccgtggccgcagctgggtatcgccgtcaggcacaggtattttcatgacacttatgataaagcctgatatcaatccaaacaatgcatccatgctcacgcttgtggcagcgcttgctgtcgcaaaggcaataacaagcgttacaggcgaggaagccctgataaagtggccaaacgacattgtgataaacggcaaaaaggtgtgcggcatactcacagagatgaatgcgcagtttgactacatcaaccatattgttgtaggtatcggtatcaacgtgcataatgagagctttccggaggaaatcagtcagatggcgagctcactcatgatagaagcaggtggcaaaagatttcaccgtgcgcagataatcgcagagaccatgtcgtactttgagcagtattatgatacatttttaaagacgcaggacctttcagccctcgtcagggagtatgatgagctgttggtcaacaggaacaaatcagtaagggtactggatccgaaggagccgtttgacggaaaagcgatgggcatcacgcctaagggcgagctgatcgtggacacatgggaatcgcgtaagctggtttcaagcggagaagtatcagtgagaggaatatacggatatgtctaaagaggtagtactttgcgtgtcaaacgcatatcagaaaaaatattatctgaacgagaattttaacggacttccacagacaataagggacgagctcaaaatcatgtgcgtcctgtatacagaggatgtgggaggcatactggagctggtgtttgatgaggacggaaacctcgatttcagaacatcctgcaaggaaaatgactttttctatgacgagataggaagcgtgctaaagataaagcagtaccgcaacgagcgaagagagctgctcgagtcgatagagacgtattatcgcatagtatttttgggagaaggactcgaggaggaataacacatgattttagcactggacgtaggaaatacaaacataacatgcggcgtgtttgatggtgacaggataaaagcgagctttagaattacaaccaaaatgccacgtacatcagatgaatatggcatgcttctgagcactctgcttgaaagaaatcaggtaggcatggacgacatacatgatgcaatcatctgctccgtcgtaccgaatatcatgcattcactgcagaatggcctaataaaatacttcaatatcaggccgataatcgtggaagcgggcatcaaaacaggcatccgtatcgccacaccaaatccgcagcaaattggcgcagaccgtatagtagacgccgtagctgcatatgaattatatggaggacctgttttggtcatagattttggcacagcaaccacctacgatatggtcgatgaaaacggtaccttcatgggaggaatcacagcaccgggcatacgtatctcagccaaggcactctgggaggatgcggcaaagcttcctgagatagagattaaaaagcctgataatatcctcggaaaggacactatcaccagcatgcaggcgggacttgtgtatggacagataggacagacagagtatatcatcaacaaggtaaaggaagaaacaggcatgtacgatgcaaaggttgtagtgaccggcggactcggcagaataatatccaatgagacagaaaacgtggatgtatacgatccggatctgacattaaagggcataaacctcgtgtatcgcaagcagaaccgcaagggagtgaagtaatagtatggctattcatcagatacgaaagcttcaaataggaagtgtgacactcccaaacaacctgatactgggacctatggcaggcgtgacagacctgccatttcgcttattgtgcaaggagcagggagccggccttttatgtatggaaatggtcagcgccaaggcaattttgtacaaaaacaaaaatacagagtcgcttctttcaatagatgaaagagaaaagcctgtttcactccagatgtttggctcagacccgcagataatggctcagatagcaaagcagatagaggaaagaccatttgacatactggatatcaacatgggatgcccggtgcccaaaatcgtaaacaacggtgagggctcagcgctcatgaaaaatccgattcttgcaggtcagattatagagagcatagtaaaagcgatagataagccggtcaccgtaaaaatacgaaagggcttcgatgatgagcatatcaacgcagtagagctggcacatgtggctgaagaaagcggcgcaagcgcagtcgcagtgcatggaaggaccagagagcagtactactccggtaaagccgactgggacatcataaggcaggtaaaagaggctgtctcaataccggtcataggaaacggagacctgctttgcgcagaggatgtcataaaaatgcaggagcagacaggctgcgacggctttatgatagccaggggagcgcagggcaatccatggattttctcacagatactgcattactttgagaccggcgagcatcaggaaaagccatcctttgaggaagtacgccggatgatactgcgccatgcacgcatgatgatagagttcaagggcgagtacacggggatacacgagatgagaaagcacacagcgtggtatacggcaggatatccgcattcatcaaggctgcgcgcggcggtgaatacggtggagagcttagaacagcttgaggagcttttgtataaggaaaagctttgaaattgaaatcggtcaaatccttgacagcgtggggattttcaattataatacacgcgttaaaataggctttaaatttagtatgtgaaacttcccacattcagtttatcgaagttaccggcatagcatacagtatattcctcagaaaaatatgaagttagccacgggtgcgaatcgcggatagagggtttttctttgctgccggatttccgttgccgggtgttatgggactccgtggcagttcatatttttcttcggaacatactgtatactttccggtattgaagaccttggtgtgggaagttaatatactaaatgagtacaataaatatcaaaaataaaaaaggaagatagaagggtaagaatcatggataacaagaaaaatattctgacatatgcaggtcttaagaagctcgaggatgagcttgagcagttaaaggttgttaagcgtaaagaggtttcccagaagatcaaggaggctcgtgagcagggtgatttatctgagaatgctgagtatgatgcagctaaggatgagcagcgcgatatcgaggctcgtattgaggaaatcgagaaaatccttaaaaatgcagaggttgttgttgaggaggaggttgaccttgacaagatttctatcggatgtaagatccgcatcttagattgtgagtttgatgaggagcttgagtacaaaatcgttggttcaacagaggcaaacagcttaaagggcaagatttcaaacgagtcacctgtaggtaaagctcttcttggaaagaaagtcggagatactgtaactgttgagactcaggtaggagagctcacatacaaggtacttgagatccagagagcagaagagaactaaaagaggtaaaaaatggcaaatcagaataataacaagggtggacagcagcaggacgtaaaccagcttcttaaggtccgccgtgaaaaattacagaatttacaggaagcaggaaaagatcccttccagattacaaagtacaatgtcactcatcacagcagcgatgtaaaggagctttacaatgctcatgaggctgagatcctcggtgacagaaaggctccggatgttgagggcttggatgacgctgcaaagagagaggtaatcaacaacgattacaacgagagaagagaaatcatggatgcaaagccaatcgaggtaagcatagcaggacgtatgatgttcaagcgtgtcatgggtaaggcttctttctgcaatattcaggacttaaagggcaatatccaggtatatgtggcaagggacaatatcggagaagactcatacgcagacttcaagaaatcagacatcggtgatatctacggtgtaaagggcttcgccttcagaacaaagacaggcgaaatctcaatccatgcagaggagataacactgctttcaaaatcacttcagatactcccggagaagttccatggactgacagacacagacaccagatatcgtcagagatatgtagacctcatcatgaatcaggagagcaaagaggtatttatcaagcgctcacagatactcaaggaaatccgtaacttccttgcaggccgtgatttcatggaggttgagacacctatgcttgtctcaaacgcaggtggtgccgcagcaagaccattcgagacacactacaacgcattgaacgaggatgtaaagcttcgtatttcccttgagctttacttaaagagacttatcgtcggaggacttgagcgagtatacgagatcggacgagttttccgtaacgagggtgtagatacacgtcacaaccctgagttcacacttatggagctttatcaggcatacacagactacgagggcatgatggagctgacagagtcaatgttccgttacctcgctgagaaggtatgcggttcgacaaaaatctcatacaacggtgtggaaatcgaccttggaaagccattcgcacgaatgacaatgatagatgcaatcaagaaatacgcaggcgttgacttcgaccaggtacctgatgatgcagccgcaaagaagcttgcagacgagcatcatatcgagtatgaggagcgtcacaagaagggtgacatcgtaaacctcttcttcgaggagtactgtgagaaagagcttatccagccaacatttatcatggatcacccaatcgagatatcacctctcaccaagaagaagccaagcgaccctacaaaggtagagcgttttgagctgttctgtaatacatgggagatgtgtaacgcatactcagagctcaacgacccaatcgaccagcgtgagcgtttcgcagcacaggatgccaacgcagcagcaggcgatgatgaggcagagcacacagatgaggacttcctcaacgcacttgaaatcggtatgccgccaacaggtggaatcggatacggaatcgaccgtcttgtaatgcttctgacagatagccaggcaatcagggacgtattattgttcccgacaatgaagagcttggataaataaacctagtgtttatgcgggattgaggcatttgagtacgtcaaaggacgcattaaaagacgtattttggcatagtcatttacatcagtatgaaagagtacacaatctga

SEQ ID NO: 1464 - DNA, 4886 bp, Unknown
  gut microbiota DNA sequence
ttcttagctaattaatataaaagtctgcttaactctgcattatctgctatattatcaaatttacgtttatactcaccactgttaatataagctgaatttactatagtttccttgtttcttccctttctctgttgttccatcattcccccttacaaaagctttaaagtctcttaacgagacatgcctttcctcatctttatatattcacgaaatacaggccggattggatcagaaatatcctccggaatatcatccacatcgaaaaacttaagctcctcgacttcctcctcctgacgctttatcgtgccatgatatttgcggcatatgtatattatttccacattatagacttcatcaccattcggatagatgtagtgtgtttcctcgcctgaattgatataaaacagctccatctcgtctgcaacaagtcccatctcctcaaaaagttctctttttgcagcctcctcaaccgtctctccaagctctatagaaccgcctgcgtagccccactggcgattgtctgtacgctttccgagaagcacctgaccatcttcattttcaattataatgctcgctcccgcctgcagtaaaggggcatgtccgaccacctttctaagatccattatataattgctcattttgtgtcctctcttattatcccatcaagcaaaaaatccgctgtactataatacctatagtatagcggatttcaaatttgttttccatatataaagcacataaaattcatcagctcacagccctgtattcctcaagcgcttccttagcccttggtgtaagctgccgtggaaccgaaatctcaacagtcacatactggtctccctttactgaaggattcttcatgctcgaaatacccttgcccttgagacggatcctgctgccgccctgtgtacctgccttgatgctgcactccacatctccgtaaagagtgtgaacacgtgccttgccgccaagtgcggctgtagtaaacggaacacggattgtactgtatacattctgcccttttcgctcaaactcactgctcggtgtcacatttacgttgagaagcacatctccggcagcaccaccgtttctgcccggatttccctgtcctttaagtctgactgtcttgcccgactcgattcctgccggaatatggatggacagattagaaaccttgcctgtggacggatcctgtaacgaaatagatttctcacatccgaaaacagcctcgtcaaatgaaatcgtaaggtcagccatgacatctgaacccttgcggccggctgaacttctgccacctgaaaaattactccaactaccgctatttccggtaaatccactgttaccacttgtactccagccactgtgattaccgcctccgtgcgagaacatatctccaaacattgaaaaaatatcatccatatccccggagccgttttcaaaatggaattcctgatgtgtaaatggtccgccatttgagctgtatgagccactgaaagagccattgccgccaaaaccaccgaagccaccctgtgcagcctgtcttgcagcctcctctgaaaagccctcctgcagtcctgcaaagccaaactcatcatagagcttacgttttttctcatcactgaggacattgtatgcttccgtgacatccttgaacatctcctcagcgcgcggattacctgcattggtatcaggatgatacttctttaccagcttacgataagccctctttattgcctctttatccgcactcttgttcactccgagagtctcataataatctctctttgctgccattatactcacctgcctttctattcacctgtaacattacctgtaacaatttatcatcataattaaacaatatacattacaccatatagtataagcggactgcacaggcagcccgcttatcatttgcaatatctgattatccctcgatggagatacatttcttttcctcaacctgtggtttaggctgcttctttggaatatccaggcgaaggatgccatgcttgaaggatgcctttatgtcatcctgctcaatctcgtcacccacatagaaggttctctgacagcttcccgaatagcgctctctgcagatatacttcttgccggcttcctctttctgatctttctctaagtctttctctgctgtaatggtcagataaccattctctaaagaagccttaatctcatcctttttgaatcccggaagatccatctcaagctcatagcctttgtcactttccttgatatcggtgagcatcattctctttccgttgtgtccgtataatttcttctgtgccttctgtacgtccctgtcatcaaaccaaggatcattgaaccatggatcactgaaaaatgtatcaaataagttgttgtttgtagttgttaataacataggtcatacctccttatatacctgtaactttccttttggaaatttgctttcttttgtttacaagtatgttatagcactattattagcactcgtcaatagcgagtgctaataaaaattataaactttttattaaccattacagcacaaccttatcttctgtggataatactgcagcaccatatacagcttcatcttatctaccctgttccagtctttctttgatacctgctgctcattcattgtatatggtataacaaaggacgcttcctcaccggcattaagctttatctccaaagcttccaaagttggatttaatttaaaaaacagctccatgtcatactgattacctttggtttccatttcaaatgcaaggcttgtaagatcaagtgatgttgtatcgtcctttactttggtaactgacaaggttataagccccacacgcacactgtctaaaggatactctgaaccatcatccatctgatgatatacataatccggacatttttcttttaggagactgccatcgccccactcccatccggtctgctttatctcataatttccaagctttatagtgtcattgtctgtatatgtgatgacctttggggatggatagcaatgattcagataaacaatccttgccaaaacagcaatcatcacaattcctatgagtattcccgataaaagtcttacttgttttgatttcctttgcttcataataaattctcctcgttacttcaatttaaaccttccgctgtccaccagatagattacatctgatagattttcaagctcatccttatcgtgagagctaagcagtataagacttcctttatcacgcatatcccttatgatttctgacagtttttcctgtccctctttgtccagagcattaaaaggttcatccagcaaaagaagctttggttcctccataatggcacaggcaattcccagtctctgcttcattccaagagaatattttctatactttctcttatcctgcgggttcagtccaaccgtttcaagtgccctgcttatatcaacttcacctttatttattgatgcaagcatttttagattgtcatagcctgtataactatctataaaggcaggattctcaataagcatacctatcttttccggaaaagccatattttttccaagtaccttgccatcaatactgatggtaccgcttgtaggatacataagtccgcttaccgctctcatcagcattgtcttgcctgagccgtttacgccctgaaatccatatatattaccactttccagcgtcatgcatacatcatcgagtaccagagcatcctttatctttttagaaacatgttctatctctatcttcataaaaatacctcacaaaatattttttctattaaaatacacacttccgagcacaacagaaaccaccatcacaataatgcagcttattattccggcagccgcatccattccgcccgcacagagcctgttgtttctgatgatcataagataattgcccataagaaacggactcacccagtaaacagacaccacaagataaactatggaaacaatatatccagcgatcgcaccggcaaaaatactgatagtaagctgcaccaccgcaattgtacaggcgcataacattggcagtatcagccatacaagcacttcatttccggtcgcaaactgctgcatatctattccaatttccatgagcatatcatcaggctttgtgctccacttcccgattgcacatgtcacagccgcaagaaccagtatcattgcaccataatacataatcacatttatgaccgtccatatgtacttactccataaccacttaaacctgctgccggacaatataagtgtctttttgcctgcaccatacagatctgacgatggataaaatcctaccacaaaaaataaaaatgcataaaacaaaaaccatgacaccggaatggtaaatacgctgtcatctgtctttatgtatggcggcataccctgaagtatatttgtaaagtatgccaaaaatccaagctccggtgaatttacactaaaatcactgacggtgataaatgaaaaaaatacaaatatgaatactccgactatccattttatcttgttttccctaaatccttttctgatatcatataagatcagatttgcaaaaattctcctattcataagcaacaagctctttctttaccgcatgtatgtaaaatatcacatttaccactataaggataataaatgcacagattacaaccctgatatcatttctaaacggcgcacttggtctaagaaacattaccggtgataaactcaccctgtttacaaaatgaaccatgcagaacacaaacacgtatatgataaacggtgtcagcaatatccagaaccggtttcttacaaaattaaccgcccacaacaccgcacagtttaaaagtccccagaagcagccatcaatcagcacaaaaatcagattgtatac

SEQ ID NO: 1465 - DNA, 17848 bp, Unknown
  gut microbiota DNA sequence
atacattatgacaaacaaagttgtcaaacagacaaaaataattgtcacacggaggcgctatatgacactgaagaatcgtttaaaggaacgcagggccgcgctgaatgtcaatcaacaggagatgggcaggctgtgtggtgtgtcgagacagacaatcagccttatagaaagaggcgactattcaccatcagttaccctggcactgacgatagcaaaggtgtgcggtgttacagttgaagatgtattttatttgcaggaggaagatgaagatggagagaaatgagattaaagaagcaaaccgcaaggctatgccgggatttctgcttcttgcactcgtgggagcaattgtggggggtattgtcggattttattccgcagaatatgatgttgaacagttggcaggcagtatgaaaagcgcgggagcatttttcggcaaatatgtttcgagctggatattgcttgctatagccgtcatcacaccgatagtggtcatacctgtttataaaaagacaaaaaggctgcttttggcatgggatggagaggatgaatctatatgcgacatcgcagagaagaagcttaatacggtactcatgataatcagcattgcaatgatatgtgcatttttccttatcagcgcaacatattcaggtggatttgcaatgattgaaaaacatttgaatatgtatgtgcttgcaattgtgacatttctgataatagtggctgaggggataatcatccagcaaaaggcagttgatattaccaaaataatgtatccggagaaaactgcttcggtatatgatctgaaatttcaaaagaaatgggtagacagctgcgatgaagcagaaaaaatgatgataggcagatgtgcctttgaggcattcaaggtgaccaattcagtatgtggcgcactatccattattctggcaataagcgctatgatgtttgatataggatttttgccatcatttgtcgtctgtctgatatggcttgtcaaccagtgtgtatattgcagggctgcggcaaagtgctctaaagtactttaaggtgacctgatgcagtagggaggtaagctatggataacacatggttcatttattatttgcttttgatgattataatattgtatcttccgtggaaaagacggaaacgatatgcagcaaaaagaattatgaaaaaaggtaaaataaacaatagtcaaaggagtgcaggaaaaattatgagagaattagcagaacgttttataggaaaagatgtctatatcaatttattggatggaagagctgatggagtaataaaggaagttacagataatggaattgtgttggaaaataaaaatggagtgcaggtcgtgaatctcgattatgttataaagctgcgtgaatatccatataataaaaagggaaaacgtagcacgattatggatatgtagtgacaaaacatgaaaaggtggccgaatttccgggaaacagtcacgaaataaatacgattaaacaggtgggaataggggtgtttttgaaaaaaagcataaaaaatgctacatacgtgttatactacattatatagatgtcgtatgaaatatgaacgataaacacataaataaacacagtataggagaagtaatcgcaatcacaaatatattttgtgaaatacaacaattgccttctcataggaaaaggagataaaaatgccggaaaacagtagctgtagcagcgcgggaagctgcacaaaatcaagctgcgagggctgtccatcacataatggcggaccacagagcttcctcgtagagcagaataaattttcaaacatcaagcatgtaataggagttgtcagcggaaagggcggagtaggaaaatcattcgtcacatcctcactggcagtaaacatggcaaagaagggctacaaggtaggtatcctcgatgccgatatcacaggaccgtcaataccaaagatgtttggcgcacatgaccagatactcggagacgaaaacggcctgatgcatccgtatgagacaaaagagggcatcaagctcatctcagtaaacctgctcatggacaacgaggaggatccggttatctggagaggcccagtcattgccggagtagtaaaacagttctggaacgagacagcatggggcgatatagactatctattcgttgatatgccaccgggaacaggagatgtacctctcaccgtattccagtccctcccggtagatggaatcgtaatcgtcacatcaccacaggagcttgtcaatatgattgtcaaaaaggcctacaacatggcagaggcaatgcatatcacagtgcttggtgtggtagaaaacttcagctatctcaaatgccctgactgcggcaaggagataaagctttttggagagagccatatagacgagatcgccaaagagctttcagtaccggtacttggcaagctgccgctcgatacatcatatgcagctatcgccgataagggagatttctacagcatagaaaacgaccacctcgcaaaagcaaccgaagtacttgagcgcatttaaatattttgtaatgaagcaggcatatatccgccgggtgcggtatatatgcctgtatttaatagaaaacctttaagcataattcgtacagaatcttaatcgcatagcgtagctcacgggtgtgtggtctgcggcacctgaatttgtggcattcgccccacactattaaatattaaactttctttaaatatgcgatttccctatttacatttcgtttcattggcttcataatcatattacccacggattaaacaatagtttttatactcaaaatttacgaaaacaaccaaaaaaggtaaaaagagttaattttattatcaatatttacccaaaaacaataattttaacatcaatttttataaaaaaatgcccttgtttttgtgcatatttttgtctatattatcatgtagtaaagagaaggtaaaagaaaggcaaataggaggaaaatatgaagaaaatatttgatgtattgaatgtcattaaacaaaagctctttgtaaagaaagacaagattcattcagaaaaatattatcgcagaattgattttttaaataaatattcgcttttattccatgcaatcatagctatggctatcgtatttatagtggagattatttcgcgcaggagctttatctctgcatgtaagttcgtagatgcacatacacttgcgttcatgtacaattcatttttagtgtttgtatcattttcacttgtgtatctgttcaggcgcagagcttttgcaagggtaataattacaggcttttggactatcctcggaatcatcaacggctgtgtgctttcaaaccgtgtcacaccgtttggttatactgatttaaagtgtattccggagcttttagccatgaacaataccagctatttcacagcgcagcaggctacaatagttgtagttggacttggtgcatttgcactgtttcttgtggcactttttatcaaggggcctaaatatacaggcaaaatccgttatgcaggtgtttcagtggcatttttagcactgcttttcgtggcaatccctgtcacaaccaatgtggcacagaataccaatgtagttgccagctactattcaaacatcgcccagggctatgatgattatggctttgtatactcattctcatctactgtagtggaccgtggaatgaaaaagccggaggactacaataagcagaatgtggaagatgtagagcagaaggtcaattctcagaagcagaccaccacagtggacggaaagacaggtccaaacatcatctgtgtgcttttagagtcattctgtgacccggacgagattaatttccttcaggtgaatgaggatcctattcctacattccatgagcttgagaaaaactattcaagcggatatctgaatgtacctgtagtcggagcaggaactgctaacacagagtttgagatgcttacagggcttagcatgcagtatttcggtacaggagagtatccatacaagactatcttaaagcagacagattgcgagagcattgcctctgatttatctaagattggatatgcaacacatgtagtgcacaacaacggtggtaatttctacagccgtaccaatgcattttctaagatgggctttgatacatttacaagcaaggagctcatgaatatcacagagtacactccaaacggaagctggcctacagatgatattctcgtcagcgagactatgaagacctttgatgctacaccggatcagtctgattttacttatatcatcacagttggtactcacggtgactatccaaaggagcctgttattgaaaatcctacatacaccgtatcaggtgttgaggatgagggcatgaaaaatgcctggacatattatgtaaaccagctcaacgaggctgaccgcttcatcaaggaactcacagatgagctttctaagagagatgaggacaccatcgttgttatgtttggcgatcacctccctacaatgggacttcagaattctgatatgaagtcaggtgatatctacaagacaaagtacatcacatggaacaacatgggactgccaaaggaggatgctgacctttatgcttaccagcttcttgccaagactacagacactgtaggtatccatgagggaactatcatgaactatcatcagactcagatgaacagtacagatgaggcatcatatcaggatggtcttgacctgttacagtacgatatcctttatggaaagcgctactgctacaacggcacagatttatatccggcttcagatcttgtcatgggaattgacaaggtggaaatcacaaatgtgtctgattcatcaaccggtgatacagtatatatttacggtcataactttaccaactggagtaaggtttatatcaacgactccaaggtggcttcgacttatctctcagcaggtgtgcttgctatcaagaaggaagacatcagtgatggtgatgagataactgtgtgccaggttggatctagtgataccattttcagaaagtctgagaatgcgtatacatatgtggatcctgcagtggagcacgacagtgagtcggagacagatgaaccgacagagaaccagtagattttaatgaattttttcttgggtggacggggcgcaggtcccgggtcccagtgtggagtggcgacatgtactctcgcgttcgctacgcttcgcagccaagattctgtacgaaattatgcttttagggtttctatgcttgacgaaaccggattatatgcgccgtccatggcgcatataatccttgccccgccgtccttggcggggcatttctgcgtttcatgggcataatttctacagtatctaggcagcttcgctatgcgctcacgcgagagcacacgccgccactccacaccgagacccgggacctacgccccttacgttgtggcaaaattgtcacgtgtgtgcatcgatgataccttttgaccctttaatcatgctaacttgaaaaagtaaattccagtgcagaagtaaattccacactcatttaaaagttcttgattttctaagagttttataagctcaaaacgcttatttctgttataataggagtaacttcttggaaaaaactgatttgatggtatgacaaacggaccactggaaggtagtgtgcgagactaaattccaccggtcatgtgaggaaaatgtgaaagtttaatttccagtccgacagcagatttctaagtggttgttaatggttgaagcgaatcagcttaggcgttagattgaccaaatcagggtcaatgcgcttaagctgaaatgcgtttagggtttcttttccgagtgtctctaatgcggcgtcataaggcgtgcttccattaagactttcccttggagtggagttgatgtgattcacgattagattcacatcccattgtgtcaaaaattcaaaactagttcctttgggaagcaccatgcgaagcatggtgtgagcctgctcaagacctcctttttgtccgctacgcatgggatcacaatagtagatgctggtacgctgaatttcatccagtcctgtttcaagagcgacaggatctccgaattctgaacctctgtctgtcaagatatattcaaagacagataagaactcataggtgcccatacgtttttctaaacggtcaaaaataagccggacagcgcctttagtacaacgattcaggagaaaggcaaggaacagcttttccttagtgaagaaaaaggtcagtaacgtcttgttggattctctggatgagtgtaccgtatccatttctacaaaagaggataactgcagctcactaaaatcactgaataaccttttctcgaagacggttctgtttgtaatctgtgttttatggcactttcgtggcttgaagccgggcttacgttttaaatcaatgtttctggctgtaaacagaccttgatccagataggtgtacaaggaacggactgacatatccagttctggatgattggtaatgatttgatatggagattgtccctgctcgattaaaggagaaacaatgccatcctttttgcgtaattcatgttttgtcatgtttataccggctctggaaccggaaagcttttcacggtattttctatcagcaaaacgtgcatcgtatctgtatttctgggcgatggtgcaatgatttatcttttttgtgcagccattacagacatagggcgccttatccagtcttttgcactgttccttcacaaaatccttgcaagtttgattacaggtggggcaggaagtgcattttacatcgcagagaatgatttttccgcagacattggttttccggcaatggaagcgatgaatacaaaagttatgggcattatagaaagtacctttgtgataccagtcggatagacggtgagcccttacttctttggaaatggttgttggatccttgcaaagaaagcgggcaatgttcttaaaggtttctcccttgttcagttcgttttcgatatagatacggtcttcaagggaaaggtgcttctggtttcctggaatatatttactcatggatatccttctttctactgctgtcagaaagaaagataaccttaccatttttatatgaaagagtaaacctttactgtgcgggagtaaattccaccaccaaatgtggtggtggaatttaaaatttcatttttggtgggggtaagcggtatctttctttgcttgtaatcgtttcaaaagaattatataatagacatatatgattttaggagaagaaagtatggcacagactataagtatcggaaaacaggattttctataccctctttgcctggctccggataaaagatcaaggaaaccattggaagaaatcattgagtacagatagggaaactcaagatattagatcaatttaaaggaggatattgcatgtacaacgaaaattattctataatattcagtagtatgacaggcaacacacgtaagctggctgataaaattcatgaaatcctgccaaaggagagctgtgattattttggcacggctgatgcgcaggggataaaatccgaattgctatacattggattttggacggacaagggaaacgcggatagcgatacattagatttcttatctaaattgaaaaataaaaagatatttctgttcggaacagccggttttggaggaagtgatgcatattttcaaaagattcttggcaatgttaaaagcgccattgattcaagcaacactattgtaggagagtatatgtgtcagggcaaaatgccacagtctgtgagggagcgctatgtgaaaatgaaagaaaacccggagcatccggataatattgatgcgctgattgaaaattttgacaaggctttatcacatcctgattcagatgatttggagagattaaaaaatattattatttagcaggaggtattatatatgtacaatttcacatttaacattccaacaaaaattcatttcggaaaggataccatttcgagcttatcagagcttaaggcatatggcagcaaggtgcttttagtgtacggaggcggctctataaagaaaaacggtctctacgataccgcaatgaagatccttaaggatgcggggctgaccgtgtttgagcttagcggagtggagccaaacccaaagattgagacagtcagaaagggtgttgaaatctgtaaaaatgagggtatcgacatggtgcttgcaataggaggcggcagtacaattgattgctcaaaggttgttgcagcaggtgcaaagtatgacggtgatgcatgggatctggtgcttgatggctcaaaggtcaaggcggcacttccgatatttgatgtgcttactctttccgcaacaggaacagagatggatccttttgctgttatctctgatatgtctaaaaatgaaaagtggggaacaggatcgccgtatatggtgccaactatgtcaatattaaatcctgaatatactttttcagtatcaaaaaaacagactgcagcaggaaccgcagacatgatgagccatacaatggagaattatttctctatggagaatgctgactgccagaaatttatggcggagggattgttacgtacaatgattaaaaatggaccggttgctctcgcacagcctgacaactacgaggccagagccaacctgatgtgggcaggcacacatgcaatcaacggtgttgtgggcgatggctgttcaccggcatggtgcgtacatcctatggagcatgagctgagcgctttctatgatattactcacggagagggacttgcaatactcacaccggcgtggatggagcacatactaaatgacgacacacttccgatgtttgtggagtttgcaaaaaatgtctggggactttccggtgatgatgactatgcacttgcacacgcaggcattgatgcactgaagaaatttttctttgagacaatgggcattccggcaaatctaagagctgtgggaatcacagacgacaggaactttgaggtgatggcaaagaaggcctgcgagggttcaaagggatcgtttgtaccgcttagcaaggacgatattgtggagatttacagagcagcattctaatcgatcgttcatgcaaataccgcggtattcatcaaaatctatatccacaaatgaaacatgactaataccatcattgtcaaaaggatcatttttgatgtcaatatctgaaatatcacttggaacaggagggtgttaactataaattaataagcgtagagtctgtaatgatcgggctccacgcttatttttatgtttaagaattattgacgtatagattcaatcagtgcagaaatggccttgatttggctaggtgtcagtccattggtgtctagtaaaattgcgggcatatcattacttttcccaagtaagtagtctgtgctgcatttatacagataagatagagaaagaagaatttctgcactgggtgtgcgttctccggtttcataaccggaaatgatgcttggtgatatgcccaatagctctgaaacctgtttttgtgttaatttattctgaatacgcaattcttttagtctaccagctaaattctttatcatactcttttagcgaacctccacacttttagtgtacatattttaatattgaattctacgcaataggggttgttttatacatataaactacactttaagtgttgacatactacactttaagagatacaatgcactagaagaaaatttagtttttatacatgagaggtcagaaatggacgactatagaaacaaaaaaagacaaaaaatgagagcaagaagaaggcgtgcacagaggattaaaatgacaggtatgtgtattgctacactaattgtgtttatttttatagtgttccttgcaataagtaatttgtcaaagataaaaaagaatgtaaccttagaggcaggtagtgaaatcaacattaaagatttcctgaaaaaggaaaatgcagatgctaagtttgtgactgacgtttcacagattaatacaggaaacataggcagccatgaaattgttgtaaaggttggaaaaaaagaatatacatcaaaattgacaattgaagatacaaaagcacctactgcaaaggcaaatgatgtgacggttaataaagatggacaaattgaggcaaaccagtttgtgacggatataaaggatgcaacaaaggttgatgtgagctttaaggataagcccgatgtatcaaaagacggagagtcagaagtgataatcgtgttaactgatgaaggaaaaaatcagaaagaggtaaaagctaaactaacggttgtgagtgattcacagccacctgtgattgagggagttaaggatataaccgcatatataggtgaaacggtctcatataaaaaagatgtgactgtgactgacaatatggatcagaatccaacacttgatattgataacagtaaagtgaatctgaataaagcaggaacatatgaggttgtatatacagctacagatagtgcaggaaatacatcgtctgcatcatcaaaaattacaataaaagagaagcctaagggatatgtagataaagaagacgtatatgctcttgcgcaaaaggttgttgaccagattactaatgattcaatgactgatatggaaaaagcgtttgcaatatacagatggacaaaaacaaacataggatatacgggaacatccaacaaagatagttggacaatcggagcttatcaggcatttacgaaaaaatcaggagactgtttcaattattatgcagcagcaaaagctatgcttgatgtttgtggaatacaaaatgttgatatagtgaaaagtgatacttcacattcagcacattattggagcctgataaatcttggagatggctggtatcattttgatgcaactccaagaaaaggtggaggaaattttttcatgttgaccgatgcagaactggcagcgtattctaccaagcataaaaatagtcatatttttgattcttcgctgtatcctgaacgagcgactgtatcagtacaggacaaaataaattatgcaaagggaacgataaacaaataaggtggaataaatgagacttggtataattggtggtcttggaccgatggctactgcctattttatggaactgcttattaatatgaccgatgcaaaatgtgatcaggatcatctggaaatgattatttataattgcccatcaataccggatagaaccgcatatatcttaggaaaaagtaatgcaaatcctgttgttccgattataaaaatcgggaaaaaactaaaggaacagaatgtggattgtatatctattccgtgcattacagcacattattttcatgatgaaatagaagaaaaaacgggctgtaaggtgattcatgctattcgggacacctcatatatgttaaaagaggcgggattaacaaaaatagggataatggctactgatggtacaattcaaagtagaatttttcaaaatgaaatagaaaagaatggaatgcatggacttgtaccggataaaaaatatcagagaatagtgatggatattatatataaggatataaaggcgggaaagatacctgacattgaaaagtataatgttgtagccacgcatttgaaaaacaagggagctcaggtaattatcctgggatgtacagagctttcattactgaaaaaacaatatgatattaaaacaggagtcatagatgcaatggaggttcttgcaaaatcatcattaatacagtgtaacaaaagagttaaaccgaaatacaataagctgtttgtaccattcaactaaagtattttgatatgaagtataggagaaaaagatgcaaattacaaatgttttggaatacctggaaaatacagtaaaacgagttccggataagactgcctatgcaaatgaaaatatggaaatgacatttggtgaggtataccatgatagcagagctatcggaagttatttggcaaataacaattattataaagaaccggtagtagtttttatgaaaaagcatccacatgctattacagcattttacggatgtgtttatggtggctgctattatgtgcctatagatgatgaaatgccggaattcaggattagacttatttttgaaaacctacatccaagagtaatgatatgtgatgatacaacaataaatgccgttgaaaaatttgattataatggagaaattctattatatgatcatgtaagaaaaaatgagatttcagatgagctgttatttggaataagggatagacagctggatacggatcctatttatatagtgtttacttcaggttcaacaggagttcctaagggtgttgtagcatgccacagatcggttatagattatattgaaaatctgtctgaggtgttatgttttaatgagaatacaagatttgcaaaccagacaccgttatattttgatgcgtgtcttaaggaactatatccgacattgaaattcggtgctacaacatatattgttcctaaaagtttgtttatgtttccaatcaaactggttgaatttttgaatgagtataagataaatactgtctgctgggttgtgtcagcattgactatgatatcagcatttaagacctttaacaagattaaacctgaatatttgcatactatagcgtttggtagtgaggtatttcctattaagcagttgaaaatatggagagaaactttgccaaaagccagatttgtaaatttgtatgggccaacagaagcaacaggaatgtgttgttattttgaggtggaccgagagtttgagttggatgaggtggtgccaattggacgaccattccataatacggaaatattattgctggatgagaataataagctggtagaagatggaaatgttggtgagatctgtgtcagaggaacttcattaactttgggatattacaataattttgaaaagactagtgaggtatttgtgcagaatcctctcaattcgagatatcctgaattgatatataagacgggagatttaggaaaaaggaatgaaagaggtgaactgatatttgtatcaagaaaggactatcagattaagcacatgggacatcgaatcgagcttggtgagatagaggtaaatgtcaatatgattgaagaaatatccacatcatgtgctgtttacgataaggaaaagggaaagatagttttatattatatcggagaacttgaacctgataaattggttaggatccttaaagataagcttccaaggtacatgattccaaataaaacagaaaagctggagcagatgccattaacagcaaatgggaaaatagacagagtatttttaatgaaaaaagcacaggaaagataaaggagaaaaaagatgaacgaattattagaaattataaaggaattacacccggatgtagattatgaaaattgtacaacactgattgatgataagatacttgattcctttgacatagtttcaattatatctgaggtaagtgattcatttgatgttgcaattccggcagaggagattattccggagaattttaattctgcaaaagccttgtatgatttaatagtaagattagaggatgaataaaagatatgctgtttacatcttatagctttatagcatttatgacaatagtttttgtcctgtattatctggtgccaaaatcgtgtcagtggcctttattattggtatttagttatattttttatttcattgccgatccaagatatctgatattcatactggtgacgacaatatcaacttatttgataagtcttaaaatgaatcagattaatatggcgcaggataagtttattaaagaattcaagggaaatttaagcagagagcaaaaaaagaattataaaagccatatgaaacataaaaaatggatatggcttttgatatgtcttttcataaatattggtatattaagcgtaacgaaatatactaattttgtgattcaaaatattaatgatatgctgcatggagtttccggtttacatactgtcaatatgattgtaccgatgggaatttcattttatacatttcagactatgggatatataattgatgtgtatagaggaaaacagagtgttgaaaagaatttctttaagctggcattgtttgtttcattttttccacaattggttcagggaccgataagcagatttcatgatttatcggagacattattttcaaagcattattttgaaagcaatgtggtagtatcaggtttgatgcggattttgtggggatatttcaagaaagttgttattgcagacagaattattacaggagtaacaactctgatacacagtccttctgaatatcaaggagcatatgtgtttatcgccatgttgttttatgcattcgagttatattgtgactttaccggtggtattgatattacgattggtatagcagaggttatgggtattcgtgtgacagaaaactttaatcttccatatttctcaaaaaatatcaaagaatattggaacagatggcatataactatgggtacatggtttacagattatattttttatcctatttcagtatgtaaacctatgcttaatttgtctaaattttcaagaaaacattttggcgaggtaattggtaagcgagtgacagtgtatttgtcagcctttgtagtatggtttacaacgggattatggcatggtgcagcatggaacttcatcgtctggggattaatgaactttgttgttattatggtctctcaggaactggaacctttatatgaaaagtttcataaaagatttagtgtaaaaggtaaagttccatatgaagcatttcagattctaagaacatttttattgatgagctgtataagaatgtttgattgctatagagatgttcctttgacttttaagatggttggaacaatgtttacaaagttcaatataggtgaattatttaatggttcgctgctttccataggacttagtgtggctgattatgttgtgcttatagtgggatttatagtagtttttacagtgagtctttttaaggtaagagtaggaaatgtgagaacggttttattacaaaaacctccaattgtttattttggaattatggctgttatgattatgcttattatggtgtttggcgcatatggtataggctacgattcgtctcagtttatctacaatcagttttaaggagagtgcgatgagaagaaaaaaaataacagcatgcattttggttgctgtcctgcttattggagctctgtatattgttcaaaggcttctggttcccaaatatcagacaggaatagttgaaggctctatggttgaagaatactataaggatagatcagatcacgaagttttatttgtgggcgattgtgaggtttatgagaatttttccaccatagaattatggagaaaatatggaataacaagttacatcagaggaagtgcacagcaattaacatggcagtcatattatttattagaggatgccttgaaacatgagactcctaaagtggtggtgtttaatgttttggcattaaaatataatgagcctcagagtgaagcttataacagaatgtctatagatgggatgaaatggtctatgtcaaaggtaaatgacattaaggcttctatgacagatgaggaaaactttgttgattatatttttccgctgttgagatatcattccagatggtctgagcttacaaaagatgatgtgaaacatattttttccaaagacaaagtgactcataatggatattatatgcgtgttgatacaaagccacaacaggaatttccggatccaacaccacttaccgattataagcttggtgataaagcaatgggatatttacagaaaatgactgatttatgtaaggaaaaaggggttaagcttgtacttataaaggcacctacagaatatccttattggtatgagcaatgggacgaacaggtgcaacagtttgctgatgaaaatggtgttgactacatcaattttattccattgcaaaatgatataggtctggatatgtcacaggatacctatgatgcaggtttacatctgaatactacaggcgctgaaaaaatggcagattactttggacaatatctggttgaaaattataatttaactgattacaggaatgatagcaggtatgcttctatatgggataaaaaagaagctgcatatgattctatgaaacaacaacaatatgatgaattgaacaaatatggtgaattgaagagctttggtgcaaatgcgattcaaaattaggaggaagaacgatgaagaaaattatttcaataatgttatgtattatgctttcagtatctatgatgacagcatgtggaagtaaagagtccgacaatgataaaaaagatgttggttctgagacaaaacaggatgcatttacatatgatttaaagggtgtaacagtagccatgaatgaaaacatggagccattggttaaaaaacttggggatgcagataattactttgaatctgattcctgtgcttttcagggaaaggataaggtatatacatatggaagtgttaagataacaacatatcctaaagatgacaaggattatgtatatacaatagaattacttgatgatacagtttcaacaccggaaggaatatcaataggttccgacaaaaaggctgttgaggaaaaatacggagatgcttctgactcaactgagacttcgtatatttacaaaaaaggagacagccagctttcatttatatttgatggagataacgtgtcttcaatagtttataatgcaattacagagtaaaataccagtgaagaaaacaaaaataatagtgtgtatttgtctgatagttttgatagtggtgtgcagtgttttaagtaataaggaaatcagtaaacataagaacgattcgagtcaaaatgtatctgatgatataaatattcagaaaaagactacaactgagacgtcagaattacaagaaaaaaaatcagatatatttgtaccatcaacagatgataaaacggtagatgtatcttctgataacaacattgtaagccaatatgcagtgttggttaatgcggacgatggaactattattgcttcaaagaatgcaaatgaaaaaatgtacccggcatctatgacaaaggttatgacacttttggttgcagcggagaaattaaataatgagagtcttggccagaaaattgaaatttctattgaagcaactgattattcttttgaaaacgactgtagtgcagcagggtttctggttggagagcaggttactgttgaggatttattaaatggcattatattgccttcaggtgcagaggccgcgtatcaggccgcaattatgacatccggaacattggagcagtttgtggatgatatgaataaaaaagtacaggagctgggaatatcacagacgacacatttttcaaatcctgtagggatatttgatgaaaataattatagtacagcatgtgatatggcggttattttacatgctgcgatggaaaatgaaatatgtaaaaaggtgttgtcagcaagaaattatacaacttcatgtacacaacagcatccgcagggaataacattttcaagtaagtttttgaaccgaatagatcgtaaatttggaaaaggaaaagttgttggagcgaaaacaggatatgtaaatcagtcacgatattgtgcggtaagtatgtatgaaagtgaagcaaataataaatatatatgtgttaccggaatggcagggaaagcctggcagacagtatatgatcatatagccttttaccaaaattattgtaaatgaagtgtatgcattggttattaaagagataaaagatattaacaaataaactg

SEQ ID NO: 1466 - DNA, 4892 bp, Unknown
  gut microbiota DNA sequence
aagaactccatttcaatttcaactactttttcatccgaatctctgatatccgtcttttctgtcaatgacatttcctccttttccctgaacgaaaaaaatcgcccagactagaatttttaatctaatctgagcgatacttcgtcaggcctgttttcttcaagcaagaaaaccatttttacattcattgacaacctaaatcttatcctacactttagttatctccattgggtgcttggatagatttagttctcggtgcccgttttgtcttttcggtgctccaattaatcatttttatattttttcggtgctcgcaagcaccataaaataaaaatgcaacaatgaattttcacgatcattgttgcaaaaaatcgatgttcccggcgggaattgaacccacaactagcgcttaggaggcgcttgttatatccatttaactacgagaacaaatgtatattacaaacaaatactaccctgcatccagatgtttcctttgaaacgtctgccaaccatcggctcaccgatgaggtcatttttgtttatacacacgctaaatattatatcattacatgatacttttatgcaatatattttttcatttgtaatgatatttttttcttctgtgaactcaataatatctcccagcacgctgtactggtcactttcgatgccatatggcatgaaatatgttgttacgattgaaagaatatcctcgttttggattcttctcgtaatggatgagtataaatctatatcttccattgtgaggctttccatagcgccctcatcgccatccctggcctctgcaatcagctgctttctatcttttttgtctgaatcaactgtatttaatgttttagcctttttttgtttcattggtagcaaaatacagccatcaactgatagtcctgagagcactgctccctttgcccttacctctctgtttatgtatgccttctctgacagataatcacacacattctgcagataaaatataagtgttacgccgagattagggtcatcacatacgcctgcatatgattccttctctgagtgcttttcgatatctattatctcatttgtagtcttttcgcttcccgtgaaatacggatagtaataatctatgtcaaagctatcatcgtcattgtatattcctctgactgtaattcccatattgggtgccacatcacatgacagctcggcaaattcattgccctcggaatcctttgttacctttagtttttccggcttatcaattatattgttaattacctcgtttaactgtttctttgttatatctgaaaatcctattgctctgaggaattggtgcattacttatttctcttttctttaaattacctgaagaattgaaatgtttttatcaagcatgagattcaatctgttgtgaagcatcaatttgccattattttcatttccaaaaatcatgataataggattctccggatctactgtctgggaaactactactccctcttcttcagcattggtctttactgttgtaccgacaggatatctggctattgatgatagcaggcacttaataattttgttatcatatctgccgccatcattttcctttatctgatttatggcttcctgcacgcaaatacgcttacactccataccgcttatcagcgaatcaaacgcatcacatgcctgaattattctgcattccagttctttattcttttgcttcataggaaaacctgtgcctgccatattctcatgatgtgataaaaccatcttcattgatattggcgctatccagctttcctcatccaatgccgaatatcctaaaatggtatgctttttatattcaaaaagctccgcaggatttgcattggaaaaatccctgtttttatatcgtgtgacaataaaacgcagcccgatgtcatgtaataaacatcccaccgctatgttatactttcgcttttcgtcaagctttagttttcttgcaacaagcactgataaaagtgtcaccatgactgtgtgctcatataagtccgaattacgctcttttatatcaacaatcacatcatatggcatatcatttatatcatggactatatcatttgcgattatttcaaattcctttaaggatttgccatcatgatatatatgactttccatcagtctgcgcactttttccacgtatttgttgaaaatagccgggtctactatagaattcgggctttcataattttcatacggatcctctaccatcactgattctattccaagtgactctataagtggcacataatcaggcttaatccttgtgccatttggtattaaaatatcatttttttctgttagtattggttccgcaagtacttcaccgccaactaagctgctgactgcttttatcctcataaactaaaacaccccattgttatttttctgcaggcatatttgcctccttggccatattcaacgcttcctgctcttcatctgctaaaacaataatggaatttccgccaacaatctccttgatgtatgtatagcaaccctcacgactgtgaacggcattgagtacaaagccatcatcctttccatttaacatggcaagtgaaaagcttagctttccgcccatctcattgaatgcatcatacttcacaagtcctaccttctggtatgaacacttcatgttagcaaataattcttctatattctttttgattgatgagtttgctgcaacaagttcatctacctcgtcaagtctcttgataattgtgtcctccaatgactttgcagtttttccactcataaacactttgtatctttttttgagcttaccgatctgcaccatatttgtaattatgaggatgagcagaataattaccactcccgccaatcctaatataatgtagtcggaatcgaatcctaaatattcagaaatcatttttttactcctatctatattgtcgtacattttgcataaaatttaaatagtctctttgtctcattttctgtatgattttattatttcttttcattaaatatacaaaatctaaatactatctaattatttctattgattttggactgaattgagcatgtttactattctatccaactcatcatgagaataatattctatttctatctttccggaattttcatttttcctgttaattagaacttttgttcccatattcttttttagcttttcctcaagatccttgtagattgcttccatctgaggattaaccggtttttcagactttgtctttttcttattcttctgtaatgatttaacaagcttctctgtatccctgacacttagcttttggtcgaaaatctgttgtgctaccacatactgctgattctgatcttctataccaagtaatgctcttgcatggcctgtagtgagcatttcatctatcaccatctgctgtaccttttcattgagcttgagtaaacgcattgaattggtaactgctgttctgctctttgatactctctctgccacatcatcctgcttcagtttaaattcctcaagcagacgcttgtatgccaaagcctcctcaattggattcaaatcctctctctgaatattttctataagtgagatttccataatctgctgattggtcaattttttgattatgacagggacttcctttagacctgccagctttgctgctctccatcttcgctcacctgcgacgatttcatagtaatcatccctttcctggcaaagtaaaggctgtaaaatgccaaactgttttatcgattctgataactctataagtgcatcctcatcaaatttctttctaggctgttctctgttaggctctaccttattaatatctatcattacagcatccgctgcatgattgctctttggttttaccggctttgataccttgtctgtaattaatgaatcaagtcccttacccaatcctttttttgccgccatactatcttaaatatcctttcttgctattatttcctttgccagatttctgtagctttctgctccggccgatttactgtcatacatatttatcggaataccatatgatggtgcctcagctaatctgatatttcttggaatcattgtattgtaaatctttgtatccagattttcttttactgtctctacaacctgatttgacagatttgtcctgacatcatacatggtgaaaacaactccctcaatctgcagctccggattaagtctctcctgcaccagattgattgtatgaatcagctgactaagtccctccaaggcataatattcacactgaataggaacaagaactgtatctgcagtagtcattgcatttactgtcagcatgttgagtgaaggaggacaatctataataataaaatcatagtcctcttttatgtaatcaactgcactctttaatatatattccttatcatttatgcccaaaagctcaatctctgctccggccaaatttacatttgatggaatgacatataaattgtccaccaccgtattttcaatactctctgcaattgaacactcatcaagcatgagattgtataccgtattctccacttcgtccttatttacaccaaggccgcttgtcatattaccctgcgggtctaaatcaattgccagcacctttttctttttttcagccagacacgctgccaaattgatagaagtagtggtctttccaaccccacccttttgatttgcaactgctataattcttcccattataaatcctttcgcaatttacttaaaatttctgccgaatcatcatatttttaaattgtaaattgaaatcttacacactcaaattattatatcactcttaactgtataatgctataaaattccactatgtatgcacattatttttaataattgaaataatttattcatcgtattcttt

SEQ ID NO: 1467 - DNA, 4715 bp, Unknown
  gut microbiota DNA sequence
attgtctgactgcagcactgctttctgactcacttcttgcaatgctttgattctcaagcagccgggtgtaaagctgctccacatcatctgtcggttcaaaaagctgcgactgctcctcaaccggacgctttaaagcattgcttagagcttttaccttgctgctatatctgaaaaatccaaccaaaactgttatcagaagaagtattgcatcaagcactgccgcatacaccagatcctgtttgcgcgcaccaatcaggtacatgtaaagcaaatggatacatgacattgtgactatcatcagaatccatatatagttttgttttataaagtttgtcagatgcggtttattttgtatttttgccatgacctctcaccccagcctgtacccaagccccttttttgtgacaataaagctctcaagccctatagaatccagctttttacgcagcctgttgacattcaccgaaagtgtattctcgtccacatacgcatcactctcccacagtttttccattagaaggctgcgtgatacaatcctttctttgttgtcaaaaagtgtctgcaatattttgagctcattcttcgtaagctcgagccttttgtcgtcataggttatggtggcatcagatatattgagcatggcgccattatgctccaaaacactgttgtttgcaccaaaatcatagcagcgcctgatgatagcctgtatctttacggtcagcacatcgaggtcaaacggcttcgctataaagtcatcagcccccatactgactgccatcactatattcatattatcagcagcggatgacaggaaaaccacaggaacctttgatacccttctgatttccgtacaccagtgatacccattgtaaaacggcagaccgatatccataagcacaagctgcggatcaaatgatgcaaattctgacattacagcatcaaatttctgcaccacatgcacatcataatcccatttttccaaatgtcttctgacaagctttgctatggtctcgtcatcctcaaccaaaaatattctatacattatttttcgctttcttccatgataatctcagccgcatcgatgatgagctgtgatgccttcatacgaagtaaatccggcttgagctgtgcctttggaatcacctgctttacaacgtcaacaggctgaccatacttctgtgaaataagctcatactgctcatccatctcctcgtcagatacagtgatattttccactctgatgatttcatcgagaacagcctcaagctttacctgcttctgtgctacaggcttgagttcatcctttaagctatccatagtcttgcctgtcatctgaagatactgctccatagccacaccctgctgtgcaaatgatgctgccatctgctgaagctgcatatttaccgctgtctctactgcctgtggcgaaacaagacatgagctgctctcaagaatctggtcatagagcttttctcttgccgcatctgcctttcttgcctctacctggtactcaagatactcgttgatatatttctttaaatcctccactgactgtacctcagggaaattgagagatgctgcaaactcatcgttcagctctgcttccttctcattgtaaatctcgtgcagcttaaccttgaaaacaaccgctttgcctgcaagctccggtgcatgatactgctcagggaatgagagattgatgtctctgtcctcaccgatttccatgcctacaagctgctcctcaaagcccggaataaaagagcctgaaccgattcccagaggatatttctcagcctttccgccctcaaacgcaactccgtccttaaagccctcgtagtctattactgccgtgtcgcccatcgctaacgggcctgttttctgctctctgacaggatttcctgaaagaagtgtcgctatctgtgaattaacatcctcctctgtatatgcaatataagggatgtttgcctttaatcctttgtaatttcctaatacgatgtccatgattatacctttcttttatgtgtatttatatctgcttaacgaagctgttatatgcaaatagtatacactagttaccaaataaagccaataaaaactcattgcatgctttaaaaaggattgtaaggctgtgatacgtgaaaatggttctaatcttacgcaatcaggctattaatagccttcaattcatacaatgtaaatggatcaatatctatacaatcactttcatccatttttccggaaatatcccatgcaagcgttccattcattaccgtacatgtatttttaaaattttcaatatctctcaaaggctcaaaaattgaagatttaagatcctgtgttgtatcataatcaactattttaccatcatcaaagaaaacctgtacatgataattatctaaaggtattacctgtacaactgtaggaaaatattcattcatatatttcacctctcattatataagtggattaattttgttcaatggtttcatgtccttggccaattcccaattctgcattaattcatcctgatgaatcgtacaccaggccaatatcaatcgtaattgtttattcggcaaatagcctcttattacttgtatattattaatatctactaatgctttatgtccattatattcagcatgaaaatgtggtggcatatggtcattataatacatagtgactctaatcccataaaataatgatatctcaggcatattttaccctctttctatagaaacaaatccgcaatattacatcaatagtatagcggatttacatccaaaacacaaattacaaattatccttttatttcctgtattctaaatgtttatgtactacgaccaatattacaattcaatcaggaaaagaaatgccagtccataataggtcacaactgccaccagatcattcactgtagtgataagaggacctgacgcaaccgccgggtcaatctttatcttgtggaaaaacatcggaatcactgtgcccacaaggcttgaaattgccattgccacaagcagtgaaactcctacacagcctgataccgcaaatgctccaagccatgtgtagcccttgaacagatgcacatatattcccagaaatacaagtgccattattccaagcaagccaccatttacaaggcctattcttacctcttttactacaagcaaaagcttctgcttaccgcttagattctcatccatgagcactctgattgtgacagccagtgactgtgttcctacgtttcctgccatgtcaagcaccagcgactggaagcagatgactatcggcaaagccgctaccacattctcaaatattccgactacggaagacactatcattcccaaaaaaagcaggatgataagccatggcattctctttttcatgctctgcagtgtggtctccttcagatcctcctctgcggtcagtccggcgagctttgcatagtcctcacccatctcattgtctaccatctctacaatatcatcagatgtgatgacaccgaggatatgcttatcctttgagagcaccggaattgaatcctcagcgtagtccttgattgtgtcgatacaatcatcgattttctcatggtctagcacatatggatatgaatgggctataatgctttccagattcatgccctccctggctgtgattaaatcctttaaatcgatagctcccgcaaagcattcatctgaatcaaccacatatatagtcatgatattgtcgttttcgcccgcctgcctcacgagctggctcatagcctgcttcactgtcaggccacccggaatacagatgtagttggttgtcatatagctgcctatttcatcatcgtcatatgacagaagcatcctgacatccttttccgcttcctcatccagatgctctacaatctccttcttgtcctcatcctccagattttcaagcaaatcgacagcatcatccgaatccatcagcgatactaccctggcagcctgctccacagacagctcatcaaaataggcctgcggctcatcaagatatgcaaaaatctccgctgtccgctgtgttccaaggagcctgtaaagacgtttgcgctccttctcgttcattcctgcaagcatatcagcaatatcattctcatgataatctgacaaaacctccagaatttccttatccgttttgtggcttctcaatagaacaagaagctcttcatatttctttgtattcatctccatttctctcctttctcatttccgatagcattttccacataaaataaacatatgtggttctccaaaatcccgggattttggaacataaaaatcattccatgatagaaaggacgaaacccgtgcactcaataaatttgcgcacgaaaaaagcacctaacggtgctctgatatataaacaagtatgcatttgtgcacagcaaaacacagcacggcgtaagccgatattccttaatatgcctacactgtacctctaaaaactgccaggtgacgaatccttccacggacagaatccactatgcctgccaatacaatactcacttgtatatcaacaccgatgtcgttcttacttcgcccaagaccatcactactgtccatgaaattcacctccatacttaaattctaaaattaatgtaatcattaaccgttgaaattgtatcatcaatatacacaattttcaacccattaattatatgagatagtgtcaaatgacctatgaaaaaa

SEQ ID NO: 1468 - DNA, 47577 bp, Unknown
  gut microbiota DNA sequence
ttcattttttaaaatttatataaatggttaatataaaaaaccggcagccaacggctaccggttttcgatgaaagaaaggttaaattatgatgaaaaacaagagtctaacattccggttcgataagtccgtatgtatgtccttttctcttgtagactacatttacttcgtcattctctgcatttctgaatacgaagaaatcgtggcctgagagctccatctggatgcatgcatcctcaggatacataggcttcataccaaatctctttgtacggacaatcttgatttcctcgtcctctgcatcgtctgcctccacgaaatcatcctggaatatcgccggtgcatacttctttgcggaaatcttggttctgtatttgcgaagctgtctctcgattacttcctctactaggtcaattgatacgtacatatcgttgctgacctgctctgaacggataacatgtccctttgccgggatagtaacctcgattttctgtctatccttttctacgctgagtgtaacgtatacgtctgtgtccggtttaaaaaacttctccagctttgacagcttctcctctactgcctgcttaagcccctctgttaattcgatgttttttcctgaaattgttattctcatgatgtccaacccctttatcgtttatttgatacgttgtctgtatcatgtaaatattataccataaatttcgttttcatcaatcatttttatgcaatttatataaataatcaagggtttatttacggtttttcgcgaaatcgcttgatttcgctatgattagggatttcatcagaataaaaaacatcaagtcgagtgattttttatacactatcgcaacatttctcaactacaacagcacatctaagctatcacaacgttctaagctaccacagtgcatctaacctatcccagcgcctcaagctgagatgaaagctcctcccacgcctccatatctataaggatttcttcctcgagagcgtttatttcgttctggatttccgtgagctttgagtagcttgactgatactccggcttcataagctcggccttgagctcatcgagctttgcttccttgaccgccaggtcctcctcggcctttttgacctttttttgtatctttgagcgttccttgcccgggttgtagtatgccttgccggttgatgagacagccatgccgcctgcctgggctgcgctatttgcattggtgctttcgcccacattacctgctgcagcggtttgtgacgtgctccggtttgcatcactgcctgtctgactgctgccgttctggcttatcgcaccgccaaatattgcattgcctctgtatacatttttgctttcctctgcctcacgatcgagcttttcctgatactgctcatagccaaactgatagagattggtcgtgccatcctcaaacacaagcagctgtgtggctacctttttcacaaaatatctgtcgtgtgatacaaaaatcagtgtgcccttgtagtccttaagcatgctctcgagcgtttccttgcccacgatatccatatggttagttggctcatcgagcacgagcacgttcggtctggtctttaaaatcttgcaaagcgccagtctgaccttttctcctcctgagagcatatttacgttcttgaacacgtcctcccctgaaaaaaggaaggctccgagtgcatttctggcctcggtttccgtgagattcggatactcatcccaaaaatcatcgagcacagtcttgttgcttgtatacacggccatctgctggtcgaaatatcctatctgcacgttggttccaaagcggtactcgcctgaaagcgcagggatcttacccacgatagtctttaaaaatgtcgattttccaagtccatttccgccgagtatgccaagcttttcgcctcttttcaaatcaagcgacactacggagagcggatggtcatagccgattgcaagctctgatgtataaagcacatcgtttccggtctccttttcgggctggaaattggcatggaaggtcttgttgtcgtacttgtccggcgcctcgataatcaccatgcggtcgatagccttctgctttgactgcgccatggatgtcttggtcggcttgcccttgaagcgcgtaaccatacgctgcaaacgctctatctccttctgctgggcgatgtgatccttcatctgcttgtcgtagttttcctttttgcgggcgataaaattggtataattgcccggatagcgccttgctgtgccgtactctatctcgtataccacatctaccacattgtcgagaaacatacggtcatgggatacgacaaccactgccttcgggtacgacttcagatagccctcaagccactcaatcgtcgtgacatcgaggtggttggtcggctcgtccaaaagcagtatgtcaggctttgacaaaagcagctttatgaatgctatcttggtctgctgccctccggaaaagtcacggattggctttttacgctcatcatctgagaagccgaacttgcggatcatgacctcatattccttctcataatagtagccgccatcatccttgaaggcctcctccatcgcggtatatctggctaccttttcatcggaataatcatgctcgagctctgccgccgcgcgcgcaagctctgcctttcgctcgtccattttcacgaagcatttacgcacctcctgctcgagtgtcacatcaggatcatcaaacgcaatctgcttcagataccctatctccggatttcctgcctttgcaataaaggcgctctcatcgctgtcgagcttttccatctcaacctcgcctgaaatgagctttaaaagtgttgtcttgccacagccgtttctgccgactatcgctatcttttctgtgtttctgatttcaaaatctatactatgcaaaatgacgtcgtcgccaaatgcgacagcgccattacttatctggtagagcatatactatcctttcatgcttatgcctgctgcttaattgctagccataatgtagttgacaaactgtgttgcagtacgtcctgaaataccaccgtggctgagttcccacttgtttgcctccctgcacagctcctcgtctgaaagtgtgcagccgctctttctcgcaagctctgttacgatattgaagaactccttctgcgatggctttgagtagctgatcgtcacaccaaaacggtttacaagtgacagcttctcctcaactgtatctgagtgatgcttgtcattgctgttgtcctggtcattgcggtcattccatgtctccttgatcaggtgacgacggttagaggttgcataaatcagtatgttatcaggctttgtctccacaccgccctcgataactgcctttaggaacttgtactcaatctcatgctcctcgaatgagaggtcatccatatatatgataaatctgtagtttctgtttttgattgctgcgataatctttgacagatatttaaactgatgcttgtatatctcaatcatgcgcagtccgtcatcataatactgattgacaatggccttgatgcttgttgattttccggttccgctgtctccgaaaagcagcacattgttggcctttttgccctgtacaaacgcttctgtattgtctgtgagctttttcttctggatttcataaccgatcaggtcatcgagcatgaccgcatccatattgttgattggcatgaaggagaagccaccatccagatgctcctcaatcctgaatgccttgttgagaccaaacatgccaaccccgtatgccttgtaaaagcctgttaccacatcaaagaactcctgctcgtccttagctgcctcaagcttcttgctcagcgcccttaccttctcgctgacattgtgattgtacataaggtcctttttcacaatggccttataattgctgatctgtgtgaagcagtctattccgagtgctgactcgattggcttgaaatcataatcgaaaagcttcttaaaaatcctgaaatcgtttgccacaagcccgtttacgctgccatcgctggctccgaccttctcacaggtgatggaaaacggattctcactcatcataaggaagaaagtgagatagttgtgccacagattgtcatcaaaaccatagtctgtcgctacctttaggattctcttgacctgtgtattgatgtcgcgcacaagctctgtcttgttgtactcgcccacctcaaactgctcaaagagctgtcccaatttataaagtatctcgtcctgaggtaaatctccgtacataagtaattttgatatttcctgatacatggctgttcctcctggttttgccttgttttcactgctaacatatgattataaacactgcgccacgattttgcaagggcttgtgtgcttacgtcccgccctgcatgcaaaaaggcggagctaaaactccacctttattgttgtgccacgccccacctcactgtcgagcgtaagccctgcatcatgcagctccactatatgctttactatcgcaagcccaaggcctgtgccgccggtctccttcgagcggctcttgtccactctgtagaagcgctcaaagacgcgctcctgctgatcctttgggatgcctatgccgttgtcctcgaccgtgagaacggtcttgccacctagcttgtgtaccgtcacatttacggtgccgccctcattgttgtagcggatagcattctggcagagattctcaacgagctccgtgagaagctgcctgttgcctcgtaccatacagtcggtgccgtcaaaattaagtgctacttttctctgctcggcattcacctgtagattttccatgcagtccttgaccagaccgtacagatcaagctgctcaaagccctgctgcgcctcgctggaatcaagctccgagagctttatgatatcattgatcaaggaaagcaggcgctgtgcatttcttctgatttcagtggcaaaatgaatctgctgctccttttcgaccatgccgttttctatgagctctgcgtagccggagatggctgtgagcggagtctttagctcgtgtgacacattggctgtgaagtcctgtctgctctttgccgcggcaagcacgccctcatgctgtatccttatcgcattcatgaacggcacgagttccttgtactctgtctttttctggatgacagaggcctgctccaggttgcctgcgagtgtctcgattggcttcatgagctttctggtcaggctctttgcgagaaccacacatattcctactattataaccgtcactataagcatggcaggtatactgcttgcaaacatgttccagatacttcttgctgcaatagagacacgcagtaccgttccatcattgagctttatggcatgatagaaggtattgctgttcatggtggctgatgttctcacgctgtctcccgtacctttatcaaatgctgattcaacttccggtctattgccatgattttcaagttttttcacattattttgattgtcatacagcactgtgccgtccttgtcaatccaggtgacacgaataccctccacgtcaatctgcgggatttcatttatatcctgttttagtattccggtgctttctattgtctctgccatgacctgcaggtcttcctttacctgcttctgaaagaggtaatagttgattactgtcatggaaaccatagtggcaattgctacaaaaagtgctgttgctaccagatagtaattaatcttctttttcatgctgtacgctccgcttatgtatattagaaatcattataacagctattattctataacatagcccacatttctgactgtctttatcctgctgccatagtcacccagcttatggcggagtgtctttatgtgcatgtccactgtacgtgtctcgccctcaaagtcagtatcccagacgcttctcatgatgacctccctggtcatgactattccctgactgcccatcagaagccttaaaagctcgtactccttgtatgtaaggtcaaccggctcattgttcactgtaaccacatggcgctcatggtcgatcaccagatcatccagctttaaaagcttcggctcctccttcgctgttctcctgagcagtgcctttactcttgtgataagctccatgattgagaaaggctttttgatgtaatcatctgcgcctccgtcaagcccttttatcatatccatctctgttgtcttggctgtgaccattataataggaatatcctgtgtagccggacgttttctgagctttctcacgatatcgtagccgctctcatccggaagcatcacatcaagcagtatgaggtccggtacgagttcatccagcttcttgtaaaattcctttgcgttttcaaatgcactgactatgtaattactgtttttcagagcaatactctctatctcacgtatgctctcatcgtcctctacaatataaataagtgccatagctttctccatttcaaaaatcttatgtaaaatttttacctgctttttactttcgattatacattactaatgtaaaacagacgatggttttatgtaaaatttatgtaaaatccatcgtctgtatcaattttgtctgtatataactatgatttaatttttcagcataaagattaaatcatgatttgcgaactttgtcatcaagcgcaaactcaacccactcagcaatatttgtcgcatggtctccgatacgctcaaagtattttgcaaccatgagaagatcctctgcctgctcaccatcctccggatgctccctgatgaaatcaataagctcagcctttaccttatcaaaaagatcatcaaccacatcatcctgcttcatcactatgtgagccttgtcattattcttctcaacatacgcctcgattgccctgataagcataagcattgtctctgaagccatgctcttgacatgctctatattgaccctgtatggcttgtaactgctcatcaaaatggtcatctcgctgatatcggctgcgtggtctcctatacgctccatatcagtaaccatcttcatcgctgcagaaattgttctaaggtctcttgctacaggctgctgctgcatgagcagattaaagcacaggctctctatctttttctgctctctgtctatctctgaatcgccctccatgatggctttggcgctatcggcatcctgatgtataaatgcctcgattgctttctggattgactcctcaatcatgcttcccatgtgcatcatttcttcattcagcttcttaagctgctcgtcgaatttcgatctcattaaccaaacctccctgtgatgtaatcctctgttctcttgtcctgtggatatgagaaaattgtctttgtgtcaccaaactcaaccatatctcccacaaggaagaaggctgtatcgtctgacacacgcactgcctgctgcatgttatgtgttacaaccacaactgtgtactttttctttaaatcctccatgagctcctctatctttgaagtagagatagggtcaagcgctgatgttggctcatccatcaaaagcacctccggctgtacggcaagcgctctcgcaatacacagtctctgctgctgtccacccgaaagtcccatagcagatttctttaatctatctttaacttcattgaatatcgcagcaccttgaagactttcctcaactatctggtcgagtatctttttatccttgatgccatgcactctcgggccatatgcgatattgtcatatatgctcatcgggaacggatttggctgctggaaaaccataccgacctttttgcgaagtacggttgtatcgactgatggtgcatatatattctcaccatctatctctatgcttccctcgattctgacgttgtcaaccagatcattcattctgttgatacactttaaaaatgtagacttaccacatcctgacggtccgatcagcgctgtcacgctgttttcttttatgtccatattgacaccatgcaatgcatgattctggccataatacagattcaggtcgcgaacctgaattttgatttttttctccatttgtatctcctgcaacatgtaataaatttcttgtcttcgagaatacattatatggatgctttgtaaaatgctctatcagatgtatgtaaaatctatgtcaaatttatggtctctttaataattaaaagctcatccattatcctgtctgcatcaatattggagtaattgataataaactgatgtctgtcttcctttggcttactcaggttgaaatgggtaatcgcctgaagctttatgccttttttcaatagcagctcttcaactgttttgtccggaatgttcgtgtcaaactgtatgataaaatgcagtccggagtcattttctattaccctgcattccttttcagtgaagcagtcttttatggatgaaagcacgctctggcgctttctgccgtagtgcagcctcatcctgtttatgtgcttttcaaaatagccctcgctgataaatcgtgccagcgtgtactgctcgaaggtggataccgtacatgagtaaaatgaaagcctcctgtaaaactcatttgccagatgctccggcagcaccatgtagctgattcggatggtggatgtgagagattttgaaaatgtatttatatagatgaccttttcgcacgcatctatcgagaggataggcggtatcgggtgtccgttcatgcgaaactcactgtcgtaatcatcctctatgatgtatctgtcgctgctctcgttggcccatgccaaaagctcatagcggcggttcacaggcatggtgattcctgtcggaaaatggtgtgtcgggctgatatgtgctatctgcgcgttcgctttctttataagctccacgctgatgccctgctcatccatctgcaccggcaggcattttgcattattacactcgtatatctggctgattttcttatagcccggatcctccacgcagtataccttgtccgtacccaaaagcttcacaagcagtccgtacagatactctgttcccgctccgactattatctggtccgggtccacattcataccgcgaaacgatgacagatggcttgctatcgcttcccgaagctctctcactccgccacacggcgacaccgataaaagctcctgctccctaagggaaatcgtctctcgcatgagctttgcccatatggaaaacggaaagttgcctgagtctgtcctgtttgacgagaagtcaaatatactctcatcctgctcaggcggcagctttatgctaagctccttctgcaccggtgccttgattaccctgatatcggacacatcggctatgaaatagcccctctttggtcttgcaaacatatagccctcgcctatcaactggtcataagcattttcaaccgtaatggtactaactcccagattcttggcgagggtacgctttgatggcattttctcccctgagcttagtttcccctgtgatatatcgtttttgatgcactcatacaggcatttgtagagtggaccgtctgtttttgtgaggtcgtaggtcagcatttgattcaccactttctggcatttttattttccttattttgaatattttaatattaccagatgtggcgtaatattgcaaccatgatatatggctggcatgaacaaatgcagcccggtggctcaggtggcgtgtacactctcgtgttcgctacgctttgctgccaagatactgtaagaattatgccttatagtttttctatgccagacgaaaccgtcgctactcgccctccatggctcgatagctccttgccccggcttccatgccggtgcatttctggttttcttgggcataattcaacagtatctaagcagctccgctatgcgctctcacgagagtgtacacgccgccagcgccacctaaacatatttgctcacgcctgactaccttcgtcatataaattgacataaaagcaatataaaaataaaaggagacttaacaaatggagaacaataagaatactcaatacgaactcaacaaaggacttgcacaaatgctcaagggcggtgtcatcatggatgtcactactccggagcaggctaagattgctgaggcggccggtgcatgtgctgttatggcgcttgagagaatccctgctgatatcagagccgcaggcggtgtttctagaatgagcgatcctaagatgattaagggcattcaggaggctgtcagcatccctgtcatggcaaagtgccgtatcggtcacttcgtggaggcgcaggtgctagaagctattgagattgactacattgatgagtctgaggtgctttcacctgctgatgatgtgtaccatatcaacaagagagatttcaaggtgcctttcgtatgtggtgcaagagacctcggtgaagcactccgccgtatcaacgagggagcttccatgatccgtacaaagggtgagcccggtacaggtgatatcgtgcaggctgtcagacatatgagaaagatgaattctgagattgcaaagctcacttccatgcgcgaggacgagcttttcgaggcggctaaaaatcttcaggttccttttgagcttgttaagtttgttcacgataacggcaagcttcctgttgtaaactttgcggcaggcggtgtggctactccggctgatgcagctcttatgatgcagctcggtgccgagggtgtgttcgttggttcaggtatcttcaagtcaggcgatcctgccaagagagctgccgctatcgtaaaagctgttacaaactttacagacgccaagctcatcgcagagctttctgaggatctcggtgaggctatggtcggaatcaacgagagcgagattaaaatcatcatggaagaaagaggcaaataaaatgaaatcaggacttaagattggtgttttagctgttcagggagcgtttattgagcacaagcgcatgcttgagtctcttgggtgcgaatgtgtcgagctgcgccggaaatcagatatctgtgacttagacggactcgtgctgcctggaggtgagagcactgtgcaaggcaagctgctccgtgagcttgatatgtttgatgagcttaaagaaagcatcgcaaacggacttccggtgcttgcaacctgcgccggtcttatccttttagcttcacatatcagcaacgatgacaacgtatatttcggcactttgcctgtcactgttaaaagaaatgcctacggcagacagcttggaagctttgaggccacagcaaggtttgacaatagctttgactttaccatgacatttatcagggcgccttacgtggaagctattgacgactccgccaaaaatgatgtacatgtgctcgccgagtatgacggcaaaattgtcggtgtacagtataagaaccagattgggctggcttttcatccggagcttgatgatgatacacggattcatgagaggtttttggagttgatatgatgattaaggataattaaatcacgtacatattaatactcgcgctttatctacactccgtagcagctaattttgcttatatatatgggggctttattcaagttcccctgagaacaagaagaactgatgcatcatgcttgcatgcaagtatggcacatcagtttttttatagtaaaatataaaatacttttttttaaatatatggtataataagaaaataaagcgaaagggggaacaacagtatgggtatatatttcaacccaagcaatgatagcttcagaaaagaccgaaattataagatatatgttgataaaacagagctgcttaattacacaaatgaatggcttagtacaccaagaaactgcattgctgtcagtcatgcccgcaggtttggcaaatcacacgcggcaggtatgatagatgcatattacagtctggggtgcgattctactgatatatttgccggtaccaggattgagacatattccgattataaaaaatacatgaataaatataatgttattcatgttgatgtttctaccttttgggattcatataaggataatctgatagaaaaaatacaggaatatatttacaaagatttcaggcgtgaatttggagataagctgaattatgaggatagtctgagctataatctgatggtgatttataaagatacagggattccttttgtgataatagttgatgaatgggattgcgttatccgtaacagtaaggaagaggagcttgttcacaaatatctacagtttttacattcattattcaagtcggaggagtcaaaatcatttttggcactagcttatattaccggaattttgccgattaagaagataaaagatgagtctgccctaaataattttaccgaatttactatgattgattcgtaccctatcacacagttttttggatttacagaagatgaagtgaaacaattatgcgaacagtttcaactagatatggataatacgaaggcttggtacaatggttatttgattaatggacttcatatgtacaatccaaattctgtttctatggcaatagagaggcacagattcgattcatattggaaaaacacatcttcatttgcctctataaacacatttattacgatgaattatgatggcttaaaagatgatataatgacaatgttatcagatggcatggtttacgtgaatacagatacctttcagaatgattttgtatcaatttcatctaaagatgaagccctcacagctttaattcatttgggatatttaggatataacatagatgaaaaaaatgcgtttgttccaaattttgaggttaaaaaagcctatcaggctgcactttgtacaagtggatggagtaaagtagcagattcgatttcaagatgtgatgaacttttgcaagcaaccataaatggtgacagtgaaaaagtggccgagctcattgaaaaagctcacgatgcctacacatcaatacttaaatataatgatgaaaattcactaagctgtgttttatctatggcatattttacagcacctgcatattataatgttgttagagagatgccagcgggcaaatgctttgctgattttgttttcataccaaggctaaatgcaggagaaagacctgcaatgattattgaacttaaatataatcaatcggcatatagtgcaataaggcagataaaggaaaaacgttatcacggggttttaaaggaatactctggtaaggtactgcttgttggaataaattataatatggatggcaagaataaaaaacatcacagttgcattattgagcagctggtctgaaaataatagtgtaacagccggggcagatgccccggctgttgttgtttcttatgccttataagtttaaaactccaaagtcaccttaaaaagatcgccgtccacagtcagctccaaagtaccattcataagcttcataaggctatccgcaatagacagtccaagtccactgccctcggtatttcgtgaactgtctcctctgacaaaacgctccttaagctcatcgcttgagatattaagcggtgtagctgatacattcttgaaggttatgatggctccgctgtcctttggaatgatgtcaatatacactctcgtacccggctgggcgtatttgttaatgttgttcatcagattatcaaacactctccacagatgtcgtccgtctgcctgaatcatgacaggcgtaacgtcatttttgataattaaatcaagattatttttctcgaatttttctttgtattctccggctacctgtgacaacataacagccgcatccagttcctcaagttctacatttatgctgccggtcgatgcctttgaagcttcaagtaaatcctgaattaattttttcagacgtgatgactgtctgtcaagaacgtcaagatattcgcgtaccttctcgttatctatatcctccttctgcaacaggtccacataattgataatggaggtgagcggtgtcttgatatcatgcgatacatttgtgatgagctccgtcctgaagcgctcgctcttcattttttcagagaccgcggcctctattccattgctcacattgttcaaatcctcaccatgctttctgaaaaacagcatgagccttgatgtatcaacgggctgtgaaaaatctccgtttgctatagcttttgcggcgcatcttatcctgtcatactgcatgatgaatgtgataagcagcgcaagctctataagctttacaatgaatataaatccaatactccctattccaaagcctataagctcgagcaggcatatgaaaccgaatgcaagcatactgatcaaaaacagcggtacatttctttctatccaggcaaagccatatctgattggggcaaataccatcctgcatagctttttgacaggctttaggaaaaatctcacaacatagtagcacaatgtatgcttccagaactcatgcgccctgattcttacgtatgttgaaaggattgcttcaagcgaaaccatggttgccgccagacaaatgagtgccaccaccggaagctgctttataagtaaaaagcctgccggaaataccataaagtctgcaagcattgtcactccaagcatcaccccatacggcagcctgtcatataatcgtaatttaatttcttccgaatcctcgcgttttccggcaaccgtcagcagataccccgccgtaattacaaaaccaagtataaatacgacaaacaatacactcaaatgtgtctctgtaaattccatgatatccagtacgctgtctgcctgattgaagtaatcgcccttttcctgaagctgctcaggcagctttgcatacacataatagtacccaggcttatcttccgttgaggtgtatggatagtacacaattccgttgtctgatatcttaaatgtatccggtaaaagctcataactctcattcacctgctccaccacttttataatttcgtaacggtcataataaacatcctcatcataatcgtagtaagagccgtcactttcaaagcccgaattatcgttatcctccagattcatgccacactttatatgatttcctttttcatcgtagcactttacatttttccactcggcaaagcctgaaatatctagtggctggcctgtaaacatctcctcgtaggcaaagtatttatttccattctcatctgttttctcaactaccttatataagccaagcgagctgttatcgttagagcctgtcatcaccctcacctttggaatgacataagctgtgccatcattcaggcacagataaaagagcccatttgtcttggaatacatgattgagctgattctctcactgttcatatcgcttgaagcagcgtctgactcctcatagctgccgctcattgcatcccacagatttgatagcctgttccactttaagttctctgccttgtagctaaaaatataatccggatttgatattttatccacacttgaatatacctttgcagcatcagatttcacatctaccttgtcctctgatgtttcattactctttaccactgcggcctgcagattggtatcattagtcatctgcgaaaatgcattgtcatcaccggattcataattgtacaccatctgtctgctataggctcctgcaatattcgcatgaatctcatcccttagctgtgctgtgctttcataattgtttgtgtacactgcaactaacgttgtcacaacaagccctgccgccatgaccgagcagactataaatgccacaagcttaagccacagatttcttgatatttttttcatatcattcacctttcattttattcagcatcaattttgtatccgcggccccagatgacctttaagtatcttggctctgccggatttatctcaaccttttctctgagatgacggatatgtaccgccaccgtgttttctgtcccgtatggctcatccttccagacctttgcatatatctgattcggcgaatacacctcgcccggatgctccatgagaagcttcaaaatatcgtactctgtacgtgtgagattggctgcctcgccatcaactgtcaccgtctttgatttgtcatccagctcaattcctccgattaccagctttcctgcgcttgtattgcctgcgccaagaagcatgtatctcctgatctgcgacttcaccctcgcctgcagctctaccgggttaaacggtttcgtcacatagtcgtctgctccgaccgtgagcccgagtaccttgtcagtgtcctcacttttggcagtgagcagtatgaccggcacattagagatttttctgatttccaccatcgcctctatgccgtccatgacaggcatcatgatatccatcaggacaagatgcacatcattgtgttttactatatcgagcgcctccagcccgtttcgcgccgggattacctcgtagccatcgctggtcaaataaatgctgattgccgatacaatgtctttttcatcatcacatactaatactttatacataattgcctccggaagttttatgttgatcttattgtatcaattgtaacattaaaatccaattatgtaacacattaagatttgtttaagaaataatcttaatgaaactcaaaagaagctccgatttactgatatcaaatcgaagcttcttttcttagttagttcattatatttgttatttactatattcgttaatttattattatgattaaaggggtaaaataccttttgaccctcatatcattataataaccggttgatttgtttacttcgcctggaatttctttgccagcacctttgtcaggatgttgattaagaatacgattacgagaagaacaaccgcaattccaaatgcctggtcaaattttccttcacttgtcgctgcaaggtagagcttgatggtaagtgttccacctgactgcattatctttgagaaatatccgctggcaacctttggaagcattcctgcgcttcctgctgtaaagaggagtgctgctgactcaccgactattcggccgattgcaaggataacacctgtgatgattcccggcatggctgacggtagcaggatggtgcggatggtgtgccattttccggctccaagtccgactgctccgtgtctgtagctgtccggtacagttttcagcgcctcctgtgtatttctggtaatgagaggcagcaccatgagtgtcagtgtcagcgagcctgtcaggatactgtagccaaagcctattgtctgtccgaaaaacatcattccgaagaggccaaagatgattgacggtattcctgcaagtgtctctgtggcaaactctattgtggatacgagcttacccggctttgcatactcattcaagtacacggctgctcccactccgacaggagttgctatgagcatggtgataattatgatgtaaagtgtattgagcaggttgcccgctattcctacggtgcctcttaatacagatgtctcgctggtcaaaaactgccagtttacctggccgattcccctgacaaatacatatatgatgattcccgcaagcagcactaccgataatgctgcacacagatatatgaaaaaatatactacatcatcgcatattctgcggcgttttccatttatactagtcattttccacagctcctttctttttgagtttcataagggtgaggttgattatcataataaacacaaaaagcacaagacctactgagaaaagcacctgtctgtgaagtccgctggcgtatcccatctcgctgacgagctgtgtggtaaggaaacgcactgagttgaacggaagtggaaagcttaccgttccaccggctaccatgttgatagccatcgcttctccgagcgcacgacctattccgagcacaattcctgtcatgattcctgactttgctgcaggaaccgtcactttaaatattgtctgtatctttgttgctccaagagcaagggatgccgctctcatctgctgtggtactgcctgtattgatgatacgctcatgttgattaccgtaggaagaatcatgattgcaagcactatgattgctgcaagcagatttgatccgccggtaaactgatgtgttgctgagtttgcaaaaacatgtttctccagcttgtataataccggattaagtatcataagccccaaaagtccatagattactgatggaatggctgcaagcagctctactgccggctgcactaccgctgagagctttttgtttgacacctcagtaagaaatactgccgtaagaagagcaatcggtactcctatgagtatagatactgctgttcctataatggatgtgaggattatgtacaatattccgtagcttgggtctgccgctgtcggcgcccattttgttccgaataagaggttcaacactccgaccttgaaaaatgccggtgcgcctttaaggaacatataaattgttattgataatactgcgaatattgccacaaccgcacataccgtgaatattattttggcaacattctctactatggatttatgtttcatttgatactccttgtttcaaaaagttccccaggaaacctgccatttcctgaggaaaccatgtatcttatcgatatgtattaatactgatgtctgtatttcgtatcattaatatgcccgatactttctactgaggaagaataagacctaccttcttgataactgcctgtccctcatctgaatttacatagtcaaaccaagctttaacaataccgttctgctcgtcaatcttgccctttgtagccattacgaatggacgagaaaggagatatttgcctgctacaatgttttcctctgttgcctctactccatcaattttcattgctgttactgtatcatcaagcacgtcaagtgaaacatatccaattgctcccggtgttgagcctacctttgcaagaactgctcctgttgaatcaagctcctgtgcatatttgcactgatcctttacatcaagaagctcctcgaaggctcctcttgttcctgaagctgcctcacggccgattgctacgattgcctcatcttttccaccaatgtctttccagtttgaaatctcacctgtgtagattttctttaagtcatctgatgtaagctctgttactgagttgtccttgtctgtgattactgcgattccgtcgattgctacgatgttttcctcaacgccgtttgctttctcatcatctgtaagtgctcttgatgaatctccgatatctacgcttcctgctgtcactgactcgattcctgaaccagagcctgtatactctactgttactgttactccagggtttttctccatgaatgactccttgagtgcctcacaaagcttctccattgaagtacttcctgcaagtgaaagtgaaccgcttaagttctcatttgatgcaccttcatctgcgcttgtatctgcattgttgtctgctccgtctgagcttgaaccacatcctgtaaatgctgctgtcatcattgttgcagcagttgctaaaactaaaagttttttcatacgatttttcattttaatttcctctttcatttctttcttgaatttgtttctttgttcgttacaactgatatagtaatggggaaatgtaaaatgcaaaatcattagtgtgtaaaatgcatgtaaaaaaatattcatatcccctatttcctgtccctttcttaaagcaagccaatacactagtactatttttctgcttttttattgataaagattccccaaaaaaccaaataaaaaaacacgctatacgcgtgtcctaaaatgaaatagtcgataactattcagatacattcataaataaatcggcgtgacaagattcgaacttgcgacctctacgtcccgaacgtagcgctctaccaaactgagccacacgccgtctgcaattcgttttgcaactattaaataatatcacaatgtataaattttgtctaccccataatatatatttatggtatgatttatgctgtataagataaaaatttacactgttgtgcccagcctcacagtgaggtatcatacccatgactgaacggtaatttaatcacgtaattattttctttatactatgaagccggctcggcggcgcagtaaccggcttagcaccacggtatataaattataaggagaatatcatgacaaatcagacaaatcacataaataaaacagctataataaccggagcttcacgcggtatcggtgccgccattgccaaaaagctggcttcctgtggctataacctctcactttgctgccgcaattcatctgacaggctaaaggcactggctgatgagcttcactgtgcatacggaattgaggtgctatgctacaccggaaatgtaggagactttttctttgccaaggatatggttacgaataccatttcccattttggccatatagatgtgctcattaacaatgccggcatatcgcatatcgggctgctgagcgacatgacaccggaggaatggaacaatatcgtggcaataaatctgaccggtgttttcaactttacaaagctcgtcaccccttatatggttgccgataaatgtggccgcatactacagatttcatctgtctggggcaatgtcggagcatcctgtgaggtggcatactcagcctgcaagggcggtataaatgcatttaccaaggccctcggcaaggagcttgcgccatcgcatattccggtaaatgccatagcctgcggtgtcatagataccgatatgaaccgctgctttgatgagacagaacgcgctgagctggccgatgaaattcctgccggacgctttgccacagccgatgaggtcgcagatatggcttactccgtcatcactgcacctgattacctcacaggacagataatcacttttgatggtggctggatttaaaattgtaattttaattttcgtattttttagatatttgttgatttttgtaattattgtgttacaattcatttatgaatagtataaataactttctattagaaaagcaactatcaaccattagtacaactgtgcctgacaggcttgattatctgatgaggctccacaacttgaccaacattgctctttctgaaatcatgtgctgtgcagaatcaactatttcaggctacaggacaggtcgtagagtgcctgacatttttgtcatttgccatttaagtacaatttttggtgtcacacccaattattttcttggattcacagacgaaatttgtccaactcacaactgattatgtgatatatacaaggccttccggtatcacttcacaaccatcaccggctgctgatgcaaatgtcacataaaatatattgaaaaatgaaagggggaaatgttacagtctaagccaaaaccgtaacgaaaaaacagcccggtgcacatatcacaatgtgtgccgggctgcagattttattgttattctgccacaagtattatcgtggttctcgcaggaactcttatggtgttgacacccaaaagctctgtctttgccgtgaagtcctctccgtcaaaatactctgcattggtgttggtgtccacatgccagtgttttccgttcggaagcaccggaagctgcattacaagcggctcccaatatgcattcatgcaatagaatacaatatcatcctccgtgtcctcctcatttcttccggcatacatgatgccgataagctttgtcttgtaatcagtcgaggcattgaacggtgtaccgttgtgcacactgatttccgggaactggcaggatgaaggctttgtcatctttctgagtataggatgctctttcctgaactgaatcatatgacgcacgaaatcatggatttccttgaattcctcaagcctgctccagtcgagccatgaaatgatattgtcctgacaatacgcattgttgtttccaaactgggtgttacagaactcatcgcccgcaaaaaacatcgccgggccacggctgcacaaaagcgctgcaaatgcattctttataaggcgccttctaagtccgtttacatttggatcatccgtctcgccctctgcgccacagttccagctatgtccgttgttgtctccgtctgtgttattccagccgtttttctcattgtgcttttcattgtatgagtaaaggtcatacagtgtaaagccatcatgacatgtcatgaaattgactgatgccttgtgtcctctgctctccgggctgtaaaggtcgcgtgagccggtgatacgtgtgatggcatttcccgccataccgtcgtcgccctttaaaaagcttctcatgtcatccctatatctgccgttccactcagcccatctgttccatgacgggaagcttcccacctgatacagtccgcctgcatcccaggcctctgcgatgagcttcatcttgccaagtaccgggtcgaatgccagcgactcaagaatcggcggattggccataggtgcaccgttttggtctcttccgagaatggaagccaggtcaaatctgaagccatccactctgtactcaattgcccagtgtctcagacagtctatgataaagctgcgcacaacaggatgattacagttcataacgtttccacagccactgaaattgtagtagtgtgcatccggtgtaagcatatagtacacgttattgtctattcccttgaaggagaagcacggtcccatctcatttccctcagcggtatggttgaacaccacatcaagaatgacctctatgccattttcctttaaagcctttatcagcgatttcagctcgtctccctcgtggttgtgctcctcgttgaaggcatagctggtattcggtgcaaaaaatgatactgtgttatagccccagtaattgtaaagctgcacaccatcgaccactctcgcgctctccatctcatcaaactcaaaaatcggcatgagctccactgcatttattccaaggtccttaagatacggaatcttatccttcaatccggcaaatgtgcccggtgcgctgacacctgaggacttatcctttgtatagcccctcacatgtgtctcataaatcacaaggtcctcaaagggttgctcaagctgctttatgttgccccagtcaaagttgctttttacaactctggctctgtactcaaaatccttgccaccctccggcttttctccccattttcgctgtccagtgaccgctctggaatatgggtctaaaaggacattttcctcgttaaacaaaagtccctttgccggctcatatggtccgtcaaacgaaaatgcatactcaaattcatccggctttatatcaaaaacaagcatggagtaggtatctcctatcctatatgaatcaggaaacggaatcctcgcatacggctttggtgcctgtggtttgaacaataaaagagtacacctcgttgccccatgggaattgatagtaaagctcactccgttcgatgccacgcacgctccgtacattctgaaaaagcccggacgtatcttaaatccctctaccacatcaagcggcagcaggcctgtatttactacatcctcatgcttttcttctttactgcgctctctccacatatacatattgctctttgctcccttactatatttgtatgatggtacatgctatttgttgcatgactgctttttatcttaattcgttaaaaaatcgtaactgttcagtaccttcacagttgcaaaatatgctattaatttacatgcagctttccaagctcatcaatttctattttactataattttgtgaatatgtgttcattaaattgcatatctcctgagctttttcgcccgaagccactgtcggcctgaaatcattgtatgagcttacgctgcttaaggtgcatggaataatctgagcatctatgcccggctgcaattcaccatttatcaaagtaaatgcctgctgataaatcgccgtgttcttgtctgccggatttttattgcctccgaagcagaaatttccaagactgtagcatatcattttgccgttgtagacctccatcccctgcaatacatgagggtggtttccgactaccaggtctgctccccagtcgatgatacgatgtgctgccgcctgctgatagtcattagggtaatggtcaccctctatgccccagtgacagcatgcgataactatcgccgctccctgttcacgaagctgcgctataccgttttggatatatgcctctcggtcaccgttttgtgacaaaaggctgaccgacactattccaatccttgtcccatcagccgtctcgtaaataccggtatgatcattgaagccatacactatcccggcattgtcgagcacatttctcgtatcgtcaagtccccgctgtccatagtcgtatgtgtgattgtttccaagactgcaggcctcgatggagctgcccgtcattattccaatgtactcaggctttcccttaaggttccaacgcttttctacgcgctccgtcgcatccgatagcacacactccagattgatgagtgtcatatcgtcagcctcaaaaatatctctcacaccgccgaaaaagtagtcctgtccctttgagtcataataagaattaaagctgccgtcatagctttgctcctgattgttgccgagtgtacagtctcctgtagccgtaatcactatggttgacatctgtggctgctgtgtatccgcttctgttgcctcagctttggttgcatcagactgtgtactctctgtgccttctgccgtactgtcaacggcattctcatcttcttttccggtatccgatgtgtctttaactacatccacaccattccggttagcggcttcctttatattatctccaatatattcttttcctataagtgctcctgccataatgatgcataaaaccaaaagcacacataatagaatttttaatcccttgtttttcatagttctcctcatatgtaatcttatactgtgttatatttgaaaaagctttattcagaatcaccacacacccttaaaatatcaaccgtgtgcgcacttgctcccatcaggtctgctctctcacatgttgaaagatgatactgtacaaacatatcaaactcttcctcgtcaagagcattcaaaaatggtctgatataatttgccgcgccatcggctgctattatcttttcgcgtgtaagggctgcctgtgcgtttaatacctctatatcttctaatcggacaaaactgtacaaatcattagctttttctgtacaatggaagctctcatccagcattccgccctctatgccctcttttatatgcttctcctttatggcataggttatcacgctgtactcattcataatgtatgccacaagtatgtaaccgcccggttttgtcaccctttttgcctcattcaatgcggcaagcttttcctccgccgacttcagatgatacatcggtccgaatacgagtgtgaggtcaaattcatcgtttccaaactttttaagctttgtggcattgccctggtatgcctttactttatcgctcttttgcttcagtctgccgaggttatgcttaactaactcaagtgccgtcacatcatagccctcctcggcaagaggcactgaatatctgcctgtacccgcaccgacatccaggattttaatctgtgagcgaagatcaagctgcttctcattcatcaagctgccaagacaatcgtgtatatacttcatggaggtgataaactctaccctgccgtgacggctgttcaggcgcttttcctcgttgaatttgttatagtattcttttaattctgtcacgtatattcctccctgtattattcctcgatatgctcacgtccttgcgcaatgattgtgcgcacatgtccgtctgcaagcgaataaaacactgatttgccctcacgtctgctgtttacgagcttgtttgcctttaatatcctaagctgatgtgatatggcggattgtgtcatgttgagcacctttgcaaggtcgcagacgcatacctccgcttcaaacaacacaaagaggattctgatccgggtggagtcgccaaataccttaaaaagctctgcaaggtcgtagagctcggtttcctcaggcattgtatcatttactattttcagaaggtcttcgtggatttcgttgcagtcgcagcattctatctgttcatttatgttttcgctcatggtgtggtgtcctttctgcgttattttttcattatttttgcgttatttttactttattggctatggggcgggtgctcggcataaattgcatgtgccctcgctcagtattgcgatattaagactctgtaggaattatgatttaggttttggctataggacgcaaccggcttttagcgccgtccgtggcgctaacgccttgtccgtacgtccatgcacggacattgctgtgttttgacataattccaacagactctaaatatctccatattcgcgatgtcacatgcaatttctgcaagcaccctttggttttggctcattgaagggtatggacgcgtcgtattggcgggagcgtaactgctcagtgccttcgcagttacggggctggtccggatgcgtgtaagggcactgcaggaatttacttagcttttgtttattagctattgccgtttaattgtcttttgttactgtcacactttcgtgtgaacagtaacttcttttattatacgcgaaagacagagtgcacctcttgggtgcattctgtctggtattttttatatagtggttttatggcattttgatatctgctctttgatatctgctcttttggctctatgcatttagagcttgtgtacgaataatgcgcggattgcatttagcactgctatcaccattactcctacgtctgcaaatattgcgagccacatattggctattccgactgctccgagcactaggcagatcagcttgatgcctattgcgaagtatgtgttttcatatactattcgcaggcatttgcgcgatatttttattgcttttgctatctttagcggatcatcatccatgaggacgatatctgcggcttcgattgctgcatctgagcccatggcgcccattgcaattccgatatctgctcttgagagcaccggtgcatcgttgattccgtctccgacgaaggcgagcttttctttgctgccctttcttgcgagcagttcctccacctttgccaccttatcccccggtaatagctcactgtatacttcatcaattcccagctctgccgctactgagtcggctactgtcctcgaatcgcctgtaagcattattgtaccttttattccggcttttttcaatgcctttattgctgccgctgaggttggttttatcttatctgaaataaggatatagccctcatatctgccgtctattgcgatatggactatggtgccgaccttgtcagtttcactgtagcttaagcccagctttttcataagcttgtagtttcctgccgctacagatacgccatctacctttgcggtgattccgtggccgctgatttcctcaacgtctgtcacgcgggttctgtcgattccctttccatatgccttctgtaagctcctgctgattggatgcgatgagctgctctctgcaagtgctgcgtactcgagcaccttttctctatcgagcgtattgtcgtagactcctgccacctcgaaaacgccctctgtcatggtgccggtcttgtcaaatacaacgtatctggtctgtgataaggtctcaagatagtttgagccctttacaagaacaccctcgcggctggcgcctccgattcctgcaaaaaagctgagcggaatactgatgaccagcgcgcacggacagcttattacgaggaatgtaagtgccctgtatatccatatgccccactgtggttcagctgacatgaaaagtattctgacaatcggcggcagtatcgcaagtgcaagtgcactgtagcagactgccggagtataatatttggcaaattttgatatgaagttttctgattttgatttctttgagcttgaattttcaacgaggtcaagtatctttgaaaccgttgattcgccaaactctttggtcgttttaatctttaaaacaccggacatattgatgcatccgctgattatctcatcaccgcattttgcatccctcggcacgctctcacctgtaagcgcgctggtgtttaatgtagatgaaccctcaactatcacaccgtcgataggaaccttttctccgggctgtaccacgattactgagccgatagcgacctcatcaggatcaacctgggtgagctttccgtccacctcaatattggcatagtcgggtctgatgtccatgagctcactgatattcttacggctctttccgactgcatagctctgaaacagctctcctatctggtagaaaagcataacggctatagcctctgtatagtcaccattctcatagagcgcaaccgctatcgcacctacagtggcaaccgccatcaggaagttttcatcaaatacctgcttgtttttgattcccttaaatgcttttttcaggatatcgtatcctatgaccagataaggcaccatgtaaagcaggaacctgataattcccttaaccggtatgaaatgtaatataatcatgagtaccgctgcgattatgatacgcgcaagtacttttttctgctttttattcatacgccatagctccattcattataatctcttgataatcacccttactatagcgcaggcattgaaaaaatatcatttgtcattcctgcgcccggcaatttataagaaaatctcgcagtcgtcctctacctttttacagttcttaagaacctcctgcataaccgcctttgcatcctgtccctcttcaaactcaacgctcatcttgagtgtcatgaaattgactgtagcatcctttacacctactgtattctttgcggcatcctccatcttgttggcgcagttagcgcagtctacatcgattttgtaagtcttcttcatagtggtgttctccttattttcatgaattatttgttttactgtacgtttttcattgaacatatgaatgattgttcatatgttaattttattatagcaccttttatactgttgtcaatacacaatgtgcatctacacaaaatttattcacatactctaatcacataattaatctcatagtttatgattcaggcttcatctgtgatattttctttccagctgcttccctcttctatcccatttgccgtaagccattcatcctcaacctctacatgacgctgtctgccgttttcgtcctcgagataaaccacgcattttgcttttgcgccgtctgctctttcctcacagccaaaatcagcctcatatatatgtgttaccgtatacatctgcactctaccttctttcatatgattttgcatgacataaatatatagaaacttcccacatgtacaggtggatgtgtccactctaaatatcatgtgggaagctgtttatcaactatatttatgattagaggggcaaaataccttttgaccctttaatcataatgctgctttaatcgctgcaagcagctcatcatatgtctcatatgcaggaagctcagggtaatccttcttgatggcatctgtgcttctgaaaaggaaacctgccttgctggcctgtatcatgcctaaatcgttgtggctgtcgccgcttgcgatggtatcgtatccgatagactgcagtgcctttacagttgtaagctttgactgctcacatctcattctaaagcctgtaatctcgccatcttcagcaacctcaagctcgttacaaaagattgtcggccagctgagctttttcatgagcgggcctgcaaactgtgaaaatgtatcactgatgatgattacctgtgtgattgaacgaagctcatctaagaattcctttgcacccggcattggatctatctttgcgattgtctcctggatttcttttaatccgagtccgtgctcctttaaaatatttattctatagttcatgagcttatcataatccggctcatctcttgttgtcttttcaagctcaggaatgcctgtctcctttgcaaatgcaatccagatttcaggtaccaatactccctcaaggtctaagcatacaatattcattttgattcctccgtgtgttttattctgtggatttcgatgaagctcaatatacttgtcaggtaactatttaagcagccttgaatagttacctgatatttagttcaccgatttaatccagtaaagtatatcatacaagacgacggtctacaatagaattatacgtgattttcaaaggattttcagtaaatcattattaccgtccattacgctcgctggcttttgcacacgcaccggcttccgcagagaagacgccctcatcatctattatgtttccgctctcaacatgctttttcaggatattgttaaacgcataatcccagattttctctgagccaagtgctgtgcgcttatttctgccgagtatctgcgacagctttacactgtgctcacgccatgaaagcccgcccgatgcatcgtttaggagcattggctggatattgtccatggtgcgggcaaatctggcttccggtgtctgctgcgcctcaaattcctcccacagctttaaaagcggctcgccctgttcctttggcaagagtccgtatatacgctccgctgccttctgctcacgctcatgctgtgtggccttgcctgcctcatcataggcatatgtgtctcccgcgtcaatctctactatgtcgtgtatcaaaagcattcctactgtctttagcacgtctatcttctcattggcatactcactcaagagcattgtcatgatagccatatgccaggcatgctccgcatcattttccttgcggcttgcatcagctaaataagtctggcggaatatctctttttccttatctatttctctgatgaaatcaagctgtttttctaatctttctttttgctgcatcattttacttgttccttcttcctatcctatccgatttttaaatatggtctcaagtgtttaatcaattcatgtacttttgtgcctggagctgaatttgcaggagtttttccttcattcattgcatccaagcgttcagcatttgttattgcaaaatccatgaaaggtctcagaatttggaacatatctgtccttccctttgaatattctccctgtccaatattctttaaccattcagatagttttggccagtaatcacttctatgaatatctgactgaacaaaactgaaatgaagcaaaaaccaaagttcaatacactgatttgaccagatagcatgatattgtgtttcctctgtagatatattaatacataattcattcgttttattgatgcgttttgccggaaaatcatcagtatcatagactatccagacatgcttatatccattcggattgttcatgaccagattcattgccttatccaaaagactaagcgtattgtctcctgcaccatgaatgtcaagctgaattttatctcgatactgactgtttatgattgtcctgattgcttcgaaatactgtggttctgtttcagttccttctgttactatcaaatggtactctggacatatcaatatattcttatctcgccgcggtttcatccaactctttcctaaatcacttttcttcggaggttttaaactcattgccaatctcctcctgccagcatatttgtaagatatggatctgcaccataacgcccttccagatattgtttatcataggctgcagtactatttactcgttcattgttttctcttctgatttcatatagggaatatatttcactttcgtgcctttcattttctgccgcaaaccaaatttcatcccgtctgaaaactgtatttttcattgttgtcatatcatgggaagtaaaaagtaactgcgctccctttttatttacattcttattcttaaacaatgaaataacataacgaagcagcttaggatgcaattttgcatccaattcatcaataatcaccagccggccttcttgcagtgctaacaaaatcacaggtaatgccgcgatcattttctttgttccatctgactcatcattaaaacttaattcataaatctttccctctatcatacgctgcgtatacagttcatgattttcttcatcataccgataacctgatacatcaatatcaacatcatttagtgcacgaacaattctctttcgatatgattcatcatcagaaaacattatttgtctgtctgcaattggatttgcatagtttttgacaatgcatgattcaaaccacttctgaacttccacaattaccggtatatcatagttgattgccagaaaagataaatatggcatcttggggtttaccgagcggttaatactcgctttattgatgcttgcacccaatgtaatttcagcaccttccctatcaaaaaccatacccgttctctttccaccaatggatttccaatacagagattcttcaacaatgtcatccccgcatattgataagttgtacctgtattcattttttccctgtcggaaatacacttcaaattctgtcggcattttcctagatatttcattaaaatagaatggtgccgcacttatcttctgctgaataataatcttttctcttgccttctccaattcatatatcggcttaaccactgtagaaatcaaacatgaaagagctagtaacagattggttttcccgccaccattcggaccatatataacccctacgggaagaagtgcatctgctttctcgctttttaacaacgattctgaaaactccggaatagatgttgcctgaaaatcgaatgttgttgtttctttatatgatttaaaatttttaaaagaaaattgacacagcatcctgatattcctccctctgaactgtcttatttgcacttattatataattaatatattcgtttttcaagttttatacccatatttcataaattttatttttgaaatatgggtataaaagtcatttttctgattttataatattattttaagtttccttagaaaatctcctttacatacataaaaatacaatgcctctacagcgcatccttcattgctttaacatactcaccgacatactttggtgaagcctcaccatactcatcgattatcttgatgatggcagagcccacaatgacaccatccgagatatctgccatcttctttgcctgcttgggtgttgaaatgccaaaaccgatagcacatggcacatctgtgttttctctgattaccttgactattgaagccagatctgtcttaatctcgcttcttgtaccggtgactccgaggcttgaaatcacataaatgaagccggttgcctcctttgctatcatcgcaatgcgatcctttgatgtaggtgcgataaatgaaataaggtccacatcatatttctcgcagagtggtaaaaactctcccttttcctcatatgggatatccggcagaatgagtccgtcaattcctatttccttacatgtactgataaacttttctgcgccgtatgagtaaaccacatttgcatatgtcatgaaaaccatagggattgtgacatcttttctcaaatctctcacaaggtcaaaaaccttgtctgttgtaactccggctgcaagtgcctttatgttggcgccctggattacaggtccctctgctgtaggatcagagaatggaataccaagctctataaggtctgctccgtttgcaacagcttctcttacaatttttgcagttgtctctaaatttggatcaccgcaggtgataaatggtataaacgccttgccattttcaaacgcacttcttatcttactcataaatattctcccctctgtatcttgctattgccgcgcagtccttgtcgcctctgcctgaaacagtaacaacgattatcttgtccttgtccattgtaggcgccagcttcatggcatatgccactgcatgtgaggactcgattgcagggatgattccctctgtctttgcgaggtattcaaaagcatttaccgcttcatcatctgttacaggtacatactgcgctctgccgatatcgtgcagatatgcatgctccggtccgactcccggatagtcaagtcctgcagaaattgaataaaccggagcgatctgtccgtatttatcctgacagaaatatgacttcatgccgtggaaaataccaagacggcctgtatttactgtagctgcagtctcaaaggtatctattcctcttcctgctgcctcgcagccgatgagctctacaccctcatcctctatgaagttgtaaaagcttccgatggcatttgagccgccgcccacacatgcgatgaccgcatcaggcagtctgtgctccttttcaagcatctgctccttgatttcctttgagatgaccgcctggaaatctcttacgatggtagggaacggatgtggtcccataactgagcccaggcagtaatgtgtgtccgaaattctcttggtccactctctcattgcctccgatacggcatcctttaatgtggctgtgcctgatgtaaccgggataacctctgctccgagcagacgcatgcggtatacattgagcgcctgacgctttgtgtcctcctcgcccatgaatacaacacattccatacccataagggctgcggccgttgcggttgccacgccgtgctgaccggctccggtctcagctatcaggcgggttttgcccattttctttgcaagaagtgcctgacctaatacgttgttgatcttgtgggctcctgtatggtttaaatcctctctcttaaggtatatttttgctccaccgagatcctttgtcatcttttctgcgtagtacagtctcgatggtcttcctgcataatcgttgagaagctctgtgagctctctgttaaattcaggatcgtttttgtaataattgtatgcttcttctaattctttaacggcattcatgagggtttcaggaatgtactggcctccgtgaataccaaatcttccgtttggatttgtcatgatgttttcccttctgatgtatatttgtaaatattttgttttctgtactgaatagttacagatattcttaaaaccatgaagatacctatatatctctattagcttaatcgcaattcatcaagcttagcctttttgtcgtccgctctcatcagcgtctctccgataagcactgcgtcagctccgatttcacgtattgccctgatatcgtctgtgctctttacaccactttctgatacaaatatgatgtcatcgggaatcaggtcgcgcagctttctgctgttagctgtatcaactgtaaaatccttcagattgcgattgttgacacctattattctggcaccggctcttaccgccatccctgcctctttttcattgtgtatctccacaagggcgcttatgccaaggctgtcacagatttttacgtattcaccaagctgcacctctgacagtatggagcagattaaaagcaccgcagcggcaccgagtgtctttgcctgatatatctgatattcatcaaccgtaaaatcctttcggatgcacggaatcgaaaccgtttttgcaatctccttaagatactcatccgagcctaaaaaccactttggctctgtcagtaccgagatgcaatccgcacctgccgcctcgtattcccttgcgatttcaagatatctgaaatccggctctataagcccctttgacggcgaagcctttttgcactcgcatatgaagctcaagccatcctttttgagtgctttttcaaatgcaaaatcacaaagcttttcgtttttcatctgaatcgcgatatttttcatttcctcaaggcttatttttttcttgtcctctgccacgcggagccttgaatattctgcaagctggtctaaaatattcatcgcttatcctttcctgttttgtgtgtctagctgttgcttacctcgatgagtttatcgagtgtttcaagtgcttttcctgaatcaatgatttttgctgcaagctcgataccctctttcatgctgtcggcctttcctcctatataaagtgatgcgcctgcattcatgagtactgcatttctcttatggcccttctgtccacctaagatatcacgtacgattttcgcattttcctcaggtgtaccgccttttaaatcctcctttgtacagcgctcaaagccgaaatcctccggtgagattactgtggttctgaaccatccgtcctttatctcgcatatcttggtcggtgcgctcatggaaatctcgtcgagcttatccatgccatatactaccattccgcgctttactccgaggcttacaagcacctgtgcaagcggctctacaaggtactcatcatacactcccagaagctgcatggccggtgaacccggatttgtgagcggtcctaaaatattgaatactgttctaaaaccaagctcttttctgataggtccgacatatttcattgatgtgtgatatttctgtgcaaagaagaagcacatgccgactttatttaaaagctctacacatttctcagggctctggtctatgttgacaccgagcgcctcaagacagtctgctgtaccgcataatgaagaggctgccctgtttccgtgctttgccaccttcatgccgcctgctgccgcaacaagtgcagaggttgttgaaatgttgaagctctgtgcattgtctccgcctgttcctacgatttcgaacacatccatacctgttttcacctgtaccgcatgctctctcatggccgctgcacagcctgcgatttcgtctgttgtctcagactttgcgctctttgttgaaagagctgcaagaaaagctgcattctgggtttgtgttgtctcaccgcccatgatctcattcatcactgcatatgcctcgtcatatgtgaggtcttctttgtttacgatttttactatggcttcttttatcatgattatgtcctcctgtattccggtaatatttcgtttataattttgtttatgattttgttctgctatttgttttcaattcaacaactaatatataaattcattaaacgctgcaattttcaattaagctttgataaaattactaagcatctgctttccatacggtgtcatgattgactccgggtgaaactgcacaccgtatatcggatattccttgtgctcaacagccatgatctcaccatcatctgtagtggctgtaatctttaggcaatcaggcatcgtgtccgcatctgcagcaagtgaatggtaacgtgctacatttgcttttttcgggcaacccttgaataaaaggctttctgtgtcaaacgacgcatccgattgctttccgtgcatgagctcctttgcatatgtgactgtcgcaccgtatgctgcgcatatcgcctgatggccgaggcacacgccaaggattgggatttcctttccaagctcctttgccacagctattatcacgcccgcatcctcaggccttcccggtcccggtgataaaatgatgcggtcaggctttaaagccctaatctcttcaactgtcatctcatcatttctgattactctgatatcaggctctatctcgccgattagctgatacagattgtaggaaaagctgtcgtagttatcaatcagtaaaatcattcttccacctcctgtgagacttccagtgccttaagagaagcctttgccttgtttatgcactcctgaaattccttctcaggatctgaatccgcaacgattcccgctccgcttctcacgaaaaccttgccgtttttcttgtaggcaatacggattgcaatacatgtatccatatttccggtaaaatctatatatccaatcgcgccaccgtaaatgcctcgcttgttgtcctcaagctctccgatgagctggcacgctctgatttttggcgctcctgaaagtgttcctgcaggaagcacggcctctattgcatcgagtgcgtcgtactcttctcttatctctccacgcactgtcgagcctatatgcatcacatgtgaatatctctctatggaatgaagcttttctacctgtacacttccgaatttacttacctttccgaggtcatttcttccaaggtccaccagcatattgtgctctgcgagctctttttcgtccttaagcagcccttcctcaagctttttgtcctcctctgctgtggcacctctcggcctcgtgcctgccagcgggaatgtgtgaagcacaccattttcaagcttcacaagtgtctccggagatgctcccgcaacctccacatcggttcccgaaaaataaaacatgtacggcgaaggatttatcgttcgaagcacgcggtaggtatcaaaaaggcttccctcaaacggtgcgctcaatctgttggataaaactatctggaaaatatccccctctttgatatggtgctttgccttctccaccatctcacaatactgctccttttcaaaaagcggtgtgacctcgcccagcagcttgccacccatattctgttttttctctccgtgcatcagaagctccctaagctgctttagctcaacaatcgctttgttgtagcctgtttccggagcatcaagtgacatatttgcgattagtattatcttctggcacagattgtcaaatgctattaccttatcaaaaagcatcagatcaacatccttgaaatcctctgtgtcccttgcttttcctctgatgcttttctccttgtagcccagataatcatacgaaaaataacctacaaggccacctgtaaacgaaggcagataatcaaatttcggactcttgtactctgaaagaatctgtctgatgtactctgaaggattttccgtctccaccgaaagctttccaagcttcatatgaccatctatgcagttaatctcaagctttggatcatatcccaaaaatgtatatcttccccaggcttcattggcttgtgctgattcaagcagataacaatgtgttgaaacattctgcagaatcctcatagcctctataggtgtgataaaatctgataatatctcacagcttacagggagaatgtcatacttcccggtttttgctatttctttaacttcggtcagtgtaggtgaaattttcatatgcttgcctccaaattttgtgtggtagtgaataagtgtccaatgttcaaccgtgaacaaatgcccaacatacagctcgaattcgccttttcaaggcttctccgcagcttgcgctgctacaattctcgctttatgttgtgcagtccaatgttcgttcgcaagcttgcatgcgagcatgcagacttgcaaactccattgtccctctttgttcactaaaaaacgcccttgacagaattttagtcctgtcaaggacgaataatcttaactatccgcggtgccaccttgaattcacgataaagctcgtgcgcttggcaggataccaacatatcccgggcaaatgacgtatgcccacacgtcgcagaatactctggatgaatgatgaatccatttgactgcgccctcagcggtccatttgacaacttgtttcacacctgattctcagcaccacaggctctctgtaaaggcatcattgccgttatctccgcttcaacggtttacaacttattaaattgtcgaaacagtttaaactgttttcacttctttaacgatttaatactttatcttgctaaatttgtttagagtttatcactcctttttgtgtttgtcaacatacattttacattaaaatatactccatctggcgttcctttgtcttaagccccatcttctcataaaatttctcagcagatgtgtttccactccatacattgagggtgacctcgtagcagccgagatgctttgcctcattcttgacatattcaaaaagctgctctccgatatgctgtcctctggtctttgcatctacacacagatcatctatgaaaagtgatgtaaacggcaccatattgttggaaaacggctgctgtcttatctgacagaatgcatatcccatgcatacatcgtcatcatctgccgcaacatatatcggctttgtatcgtcctttatcatttctgcaagctcttcatttgtatattttgtcgttcccggaataaaaatatccggtctgatatcggcatggatctgaagcacctgctctaataattcaataagtcttggtatgtctttttcgtgtgctcttctaatattcatttttgagaatcatccttcctgttgtggttaatgtatagtttttatatttcaaaataaatccagcatattatcgagataaatgtgctctctgacatgtacctgatactgtggcttcgtcatatagtaaagcagaaattccagtatcatggcacttccaagccctctgccctctattttaaaattgctaaagcccatcggcagataagtgttctttatatcgtctactcctataaatcccggattttccattgcctttgaaaagagatatccctgccctgcatcaggcgcagtgcaatagtgctccgggcaatcctcgcccagatttttgcggctaaccgtctcgtagcatttcttcctgtccgtgcagccaaaccagcagcactcattgcacaaaaattctactttatccttttgatgctgtgataatgctttcagtttatcaaatgatttgttcaacctgaaatccggtaccacatagcgaaattcctctctgtttagctcattttcaaattcacaaaaatccgtcagaacctttgtggttgaagacacaaaataaaagtcaggatagttttcttttatgtaatcaagcagaatatctgagtagatgattatgccgtttccaaagcccctgcttcgctcattatctctgcctatatcaaatatcctgcacagttcgttacattttttgtcaggaagatgctccttagtaatcaatgaattgctaaaggtaagtctcgcggatatcccatattcctgcatcagcttaagcacttccttcgaatcgtgctcaccaaaaccgacgcggcctcctccccatatgcagtctgccggtgcaccgtatattgagcctatgtcgcaccagtcatagaaatattcccggtgcttgcggtacagtgggagaaattctttgtataattcatgaaattcaaacaatcccggtagatgataatacgctttcattttgactccttattataatctgctgaacctgtgctcattttaataattttcaatcacatattcctcaaaaagcggtagcgtaaaatacacatatccccgtttctctcccgatacaattccctttcttataaggcgcttacggtacggattgaattcgtttgtctccatcccaattgcatccctgatttcttttatttttccgctttttatatctgcaatcccctttgcaaccatgcgatccttctgagaaagctccgaccagattttgtcatatacaaattcgctcagatactgttcatactcgcccaaaatgccattgtagtcaccatcattgttccacgtcagataccctaaaacctgaaatgcaaaaggatagcctttggtcagtcccgccatctgtgctgctttctccggagatatgttaaaaatagtcttatacttattgattattgccgcgttatttaatggtttgagctggattttaggtgctctgtacaaaaatgtaaggctcttctcattctgaagctcctctatattttcatacaatcctgttcctaatagaaatacaggcagctcctgtcttacaaatatctgaaaggctccggcaaaaaccttcatgtactcactatttgtcatctcatctatcgtaataagcagtctcttaccactctttttaagcctttccaaaatctttataatagctgtctctgcatctgtaatcggctgtgttccctctatagatactccaaaaccgaaaaatgatagatcgagctttgccgattttataagtcccgcacatatattatcactattcaattttgaaagcattgcaggcagcagctctgttgccggattgagttctataaccacccagtcatcattttctcttagcctatgcgaaatttctgtcatcattactgtttttcctgaacctcgcacaccggtaattataaacatctgctgatttattgtatccgctgtaaaattctcaattatctcattaatctgtaccggacggtctaccgactctagtggacttcttccaaatgtaagcgtgaatggattttgcatatcagcctcccatttttactgttgtttactgttttgaatttgttttactgtcttttactgttgtttactgttttggtttcattttactgttgtttactgtttatgtcaagattacagttaatgataattcgtatcatataaaccatttatgctgatttgcatttttgtagtaaccggttgccgttgtaaaatagttactggtcacactgtcaggcatgaacagtaacataaaataaaccccggagcgtattgtatgctttgatagcatatcaatatctcgctccggggtttctatttacgcctgatttagtttaagaaattctgtatgataacttcctctgcctcttcctctgtaagtccgagtgtacggagcttgagaagctgctcgtcgtttatcctgccaattgctgcctcatgtatgatagccgcatcgatattttttgccctgatttcagggattgaaccgacctctgcatgatccatgatgatagaatcacactggatatgagcctggcatttgctgttgccgatggcatttggatggaaggtctggaccgagtttccttttcctacggatctggaaacaatctgtgcagagctgtcctctccatttaactgcacctcgatattcgactcagccttctgctctccatctgtcatgagacgctctgtgacatagagctttgcgtcctttccaagctctacattggtctcacggactgtagaatcaacaccctttatctgtgctgtatcgagagtgaaaacagaattctcacccacaaatatatttgttacagggttgagcactctcgcacctgttccgtttccctcgccgtagtgcttttcctcatatctgacattcgcatttttgcccacatggaaggtatggatgccgtcgtgtctgctctcgttgcagccgctgttgtggattccgcagcctgccacaatccttacatctgcaccatcttccacatagaaatcgttgtatacaaggtctgtcatgcctgatttgctgagtactaccgggatatagactgcctctccgtccgtctttccatcaatataaatatcaatgccgggcttgtccgtctttttctttatcttgatgtgctcgctgtctccgtggcagattgatgtaccgttttcacgcagattaaaggcaccggtctgactgaatttattatcatttatgacgtccaatacgccctctgttacgttgtcaagctttaccatattatgctcttccctccagtctctctacacatttgtgacatttctgtacaccattgagataaggcagcacctcgtcctttgtgccgattttcttgatttctccgccatcaattatcatgatgcgatctgccatattgatgattttctcctgatgtgaaatcactatgaggctctgctttttctcagtatggatttcctcgaatttctgtatgagcattgaaaagctccacagatcgattcctgcctccggctcatcaaatatgcaaagcgaatgctccttggcaagcactgatgcaatctcaattcgcttcatctctccacctgagagtgtgccgtcaatctggcggtaaatgtaatcctttgcacagagtcctaccgcggtgagaaggtcgcagcactccttgtctgaaagctcatcctttgctgcaagcttaagcagcttcatgactgtcattcccttaaatctcggtggctgctggaatgcaaagcctattcccgcatttgccctgtgatttatgtcgagctctgtgatatcctgtccgtcaagtatgatctttccgctgtccggtgtctggatacctatcaaggtctttgccagagtggattttccacctccgtttggtccggtgatgacaagcatttctccgtcctctacctgaaatgatatattgttcagaaggcatttctttccgccctcatcatctacgtttaaagttaaattttctgctttaagcacgattttcacctcatttttatttatgatacagcataaaatccttctcctgctgttctaattactttttccgtttaccgttcatacatcagtatgcccggcaacgattacagtataacataatagtaaacgtttacaagggataaactctctggtactcgctaaaatacatatttggcacgcataccccactttggtttttataaattgcttgcttatctattaatttcccttatcattgaatactcattgcacaaagttccgtccttctgccttatagcattaaaatttatacctgtaatcctaaatcccattttctcataaagtgctctcgccctgctgttgccctcgataaaatccaattccatctgcaatatcttcggattgttttctgctatttttatcatttcttgaaacattcttgttccaattccctgattccagaattcgctcagcaagccgattgccacacttgccctgtgtccggttttcacacggttattccaccagaccatgcaatttccggcaagttttccacctacttcacaaactatcattgcctgtgcatctgacgaattgcagttattgatgaaatcaatctcctgctcgatggtctgtgtctcacattcttccggtgtcctaagtaagaaatccgtttcaccggttgactttttcatgtactctataaaagctttggcatccttttcatttgcacttcgcaaaatggcagttctgccatctttcaatttaaattcgatatcttttattgtcatattatttagtaccaacttcctattgtttttgtgttttatctgtgataaactatcgacaattaatggtagttacagcttagacagagcgagacgaaagtttccctctgtctatttttttgcgcttttacgtgcatgaagccttgtatacacttcaagcctttttcaattatcgcagctatcaagagtctattgtaactactcgttacagctatatttattttacataacaggaggatttaagaaaaatgccaaagaacagattacaggaaacagtttttaccatcatgatggtgcttgtcatggtttatgccatgatatgctacaatattgcccttgaaacaggcggtatgaagaactttgtttttaaggccgcattaggcgaatttcctatcatgattgttgccggttttattctcgatacattcattgccagaccacttgccaaaaaatgcgctttcaaaatagtcacaccgggaaaggacagacctattgctataatccttgcaatttccgtcttctcaatctggtttatgtgtcctatgatgagctttatcgctaccatccttttcaatggtggttttaattcacagatatttgcgacattctgtgagctcgtcgtaagaaactttccaatggccttcttctggcagctctttgttgccggaccacttgttagattcatctttggaaaaatcttccgggagaactaatttaaatgtaaaaatgtaaaaccgggcacgataccctgcccggtttacactatccataataactgttacgcatcacaccttgcatattcatacaaaagctcattgcaggtgtcttctcgcttcttagaaagcttcataaaacgctttgtcctagaaaactccgtctataaagcccttcatatcgtccttagacacaagaccaatctgctgaccggcaacctgaccgcccttgattgcaataactgccggaatattcattatacgatactctcttgccagatcaggattctcgtccacatcaatattgtaaaactccacatctgtgatttcatcagaaagctgctccattaccggcgcaagcatcttgcatggaccgcaccactctgccgaaaaatcaacaatgatagccttattatttttaacctgttcaaattcactgctattaatcttctttaccatagttgttctccttccatctgtcgaacgaattattttcgttgcacctatacagcaataaaaaataactgctatactatagtacaccaaataagaaataacaatgcatcagaaacttattattcgatgtactagcactactataatacataaatcagattatgtcacataaaaatattataaaccgtaaaatttatcatttatcacgattaattctttttgtgctctgccatgtaggcctctatatcctctgtggttctgatgatatcctccgacagacacactgcaccgtcctcggtgataagcacatcatcctcaatcctgataccgatttcccattcatctatatacagtcccggctcgtcactgatgattgctcccggacgaagcctgctgtttgagtcaactgtcacgtcatgcacatcaattcccagatggtgtgacacgccatgcatgtaatacttagaaatttctacagaattctttatcagtccaagtttcataagcccgtctgcaagcacatccttacatacttcatttaattcctttgtagtcattcccggctttgcaacctcgacaatctttcggtttgcggcaagcacgatatcatatacctgtttctggcgctcggtaaacctgccatttaccggatatgttctggtaatatccgaattgtagccatctattctggctccaaggtcaagaagcaccagtgttccatcctccatcgtctcacgatttgtgtcataatgaagcattgttccattaattccgcttccggcaattgtaggaaaagctgtccactctgccccaccgcgtcttatgatatattcaaagtctgcctgtgcctgatattctttcatgcccggctttaaattagccattacattgcaaagtccgtcctttgtgagagcgattgcctttttggtcagctcaatctcatcctcatccttctgcatacgctcctctgccacaagcgggaaaagaatcttcacagcaactcccggataatcactcttaaattcattggcttttaccacattgtaatccggcaaatccactttctgatgacgatacgtgtcgaaatatgctgtgtatacatcctcacgcgtcattatcctgtccagtgtgctctcaagctcataaatatattctacttcgtcaattcctgatatttcctcggcttcctccatagtcacctttctgccgtaccagcgctccatcgtagggtctgcctcctctatgaagagcattgtcttagcaggctctacacatttatccaggacaaggaccatgttgtcacgtctaagtccggtcagatagaagaaattgcggttagcctgtgctgtgaataaatcatactcatctgcactcacatggtgctcgatgcctgagtacaatattgctatagaattgtcctccatcttgtctaaaattctttgtcttctgctttcaaaatccattttgctgcctcttatttcatatattttttaaaaagtgaacatttcaacgtcag

SEQ ID NO: 1469 - DNA, 317 bp, Unknown
  gut microbiota DNA sequence
tgcatgctgcacccgtcgcaattagtactgctcctccaaccgtcctccagattccctgtgtctttctcttttcggcttcatcctttatcttctgttctgtctcatagatttcatcgtatgcttctttattcttctcatgcaggtctccaaatattttaatgcccgtgttcaaggtacctgcatctttacctgtgataaaactgcctgtttcatagctctcaatcgcaccctggctaaggcctatttttgaaagacatgactgcagattttccagaagcagctctactgaattttcaagccgtaccacattttccctc

SEQ ID NO: 1470 - DNA, 14252 bp, Unknown
  gut microbiota DNA sequence
ggctgcggtatcgcagcttcctctactgcaggctccggctcagctatcgcggcttcctctacgacaggttcaggtatcgcctccatggccggtgctgattgtggtgcatcggtcgtttgcttaggcatctcaacatttgctgtaaactgaataggatttgctgtgattgcctgactcagacggatttccatatcctttatgctgtcagacagaacctgctgcttttccataatgtccttgaggttatcataaatcacatttttctggttctcaataatgaaatcattgctctccttgagcttattctcaagatgttcaaacgtctccataagctgttcattggagttcataatcgcatcagcattttccttattcctgttgatgacaacctttgcaattcccttctgtgcattgatgatatcctcagtcggaatctttgactccttctgcagtatctcaatcttttcctctatctcatcaaagtacttcctgagcatgagataagatgccttttcagacttgaaaatactgtcatactgttcctccctcctgtcctcctttagagcactcagtgagaaaaatccgcttatcactccccacaggcaaatcataaagataactgtgattgctgcaatgagcatgtattcctttggataattaattatcgcataaaaatccgctaaaagaaccagcgtggaaataagaattagaaatataacctgtatttttgcctttttttgctttttatcctgcatataattccccttcccgggacctgacgctatctgcgacagccataccgtgcgatggctgtggataatacaagtcccagtacatttatcctaatgcatctattatagcgtttatttgctgtaatgtcgattgtttttaatgatttttcagacattttccaagtatccatgttttccgaatagcgtacgtatataccgatgttagtatatttttcattactccccgataattgtaaacctttattgcagttgtggttgacaattgacatcttttcatgttaatgtgttaaccgtacaaaaattactatgaaatttacaaaaaggagattttatcatgaaccagacagaaactatagactacaagcatgggaagacctatgccataacggtaacagctctcatgacagctgtcacatgtattcttgcaccattatccatcccgattggaccagtaccgatttcactgacaaacctggccatatatatttcattatatctgctcggatggaaacgcggaactataagctacctgatttacctgcttatcggacttgtcggaatccctgtattttcaggcttcaccggtggcccagctaagcttgccggccctacaggcggatacatcatcggttttattgccatggcaattattgcaggacttgtaatcgatcatttccaccagccttggctccagctcattggtatgattgtcggaactatcatatgctatgtgctcggtacagcatggttctgctttgaggcaaaaagcacagtcagcggcgcgctctcaatatgtgtgttcccatttatcccgggcgacctgataaaaatgataattgccatgcttatcggaccggctattaaaaaaagacttcgctaaatatcaactccaagttttttaagctcctgatacaggcgcgctaccggaagccctaccacattattgtaatcaccatgtattcccttaatgtggatggcaaagcgtccctgtatcccgtagcttcctgctttatccatcggatccccgcttgaaatatagcggtcaatttcctcttccgtcagtgtatacatgctgacatccgtcttctcataaaagcagtgttctccggttcttccggctttgtcaataaaaacaaacgttacccctgtatagacactgtgcgtttttcccgaaagcatcgaaagcatacgcctggcatcttcttcgtccttcggctttccaagaatctgattctcataagccactaccgtatctgctccgattacaagaatatcctgcggtgtcacaagctctgcatgctgttcattgtaggtaagcacacctgacgctacctcctctgccttttgacgggataactccatgacaaccgcagatggctcctcctctgtgattatctcttctccctttgcaggacagacaacaaactctgccccaatctgctctaataattcctttcgacgcggtgatgccgacgccaatattatctgactcatatttgttttaaccttttccttcactttggattttgtggctgtttcatctgaagaatacaattccttatgactgattacacgtttccacttgtattatacggtttcctctttcaccggcgctttccctgacataaatctgtaaaatacagcacaaaataccaacgcaaaaacgactccaaacacattctgaatcaccctgaggctgactgctccctttaacccatagctctctgcagctatagccagagcaccaaatgtattaaaaacagcctgccagccgtattgtgccgataatcccacgccgattccacctatgattcctatgtacgcatagattgatggtggaagcagaaaatataatgccgtgaagcatataacaccggcgatattaccgacaatcctttttttgaccctgtactgcatatcctccataaacggcaggatggcagacatggctgcaatacctgcccacattgcacgcggcatattgcaaagctgtgcaatacatagaactaacggtacgcatagtatctggcacagctgccattttgtacgtgatgaaaaaagatcaaactcctgaattacggctttcatatttcttttaaagactctgtttttatgatttctgtaaaataccaggcatgtaaggacagcgcctgcggccatccctgctattcgaagcatatagctttttcctgacacatcatatccatataacaataaatagccaagaaccagtgtggattgattaaacataaatggattatggcatccgaacaaaatcagcactgcaagagctgcaatgtttataagcagtgccggaagcggtgaaagctgatttgccagatgtgggcatactgtcataattacaaagaacaatgccaaaagccatgtagagtgtcgggtatggattcccagatcagcgttgcgaaataccataacgcataataaaaccactactcccacaatactgttatcctttcccaatatgatgcttgaggcagtgacaaaggcaaagcaaaaaaccattgtcacagctatcttcaccatatatacaaacgcatggtatagtttttctttcattgttttactgtttttcagcaggcttttagagccggcctgatttaactgcagttcctgataaaatgtcatgtaaattctcctatctttttatcttattattttattattgtaactatcatgttctaaatagctactcattataattctttattggcagttgtactacaaatctgcatcctccgtattcccggttttcagctttgattgttccaccggcgatgtctacaattcttttcacaagtgccagaccaagaccgtttccctcggctttatgagaaccatccacctgataaaacttatcaaatattctggcttttgcatcatccgcgattcccggtccctcatcttccagaataaactgcacagaatcattttcatgccttagaaacatggtgattgtcccattttcaggactaaacttgattgcattatccaaaagattcatccagatatgcataaaaagcccttcatttccaacatatctgacctcctccatctccacctgaaagccaattcctttttcagtccatttgtcttccaatgcaagaaatgcctgacggatttgttcatccagacgatatttgttttttttcattggaatattctgattttccagccttgataacaataaaatatttccaacaagacctgaaagcctttgagtattaaacaggattttttctacatacccctcctgctcctgtgacagctcatctccctggagcagcatcgtatagccttcaattgcattgattggagtcttgaactcatgggaaacattggatacaaaatccatttgcagcatctctgttgcacgaagctcttttgtcatgacattaaagctctgataggattctccaatctcggctatgcgactgtttgtttccagatgctgttcaaaatctccctgggaaactgctttcattgctttactgagcctggtaatcggctccagcagccttgcattgataaatgatgtaataagtcctgctatcaatgtattaaaaatcaaaagccagccaagtcccggtattttcccgggcaaatccaaaaaatgattcaaaaacgcaaacaacagggctgatatcagcatagaaaatgcaagtgccagccatattgcaccggtcagacatgagcggatacgcaattcttttttctttttatactccattattttttcaccaccttgtatcccagaccacgcattgttacaatttcgaaatccggattttccttaaaacgctccctgattcttcctatatgtacctctatcgtatgtgggtctgcctccgtctcatatccccatacctcatccattagctgctgcttcgtaaatgtcctgcccggtgaagctgccagcttgtataaaagcagaaattctttttttggcaggacaagcgcttcatcaccggtcacaactgtcattgcatcataatcaagctcggttgagccaatcacaattttgtgttcgttcagtatctgtgcacgacgaagcagtgcccctacccttaaaaccatttcattgacatttacaggttttaccatatagtcgtcacttcccgaaagaaagccctgacgcatatcatcgaagctgctttttgcagtaatcataagcaccggtatctgatatcccgccgaacgaagctccgacacaagttcatatccatccataaccggcatcattatatcggaaatgattaaatcaatatattctctgtccaatacctccagtgcctgtgctccatccgacgcacttttgacctgatatccgctcttttcaagcaccttttggaataacagacttaattccttatcatcttctacaattaatatcttaaacacgctttatgttctcctttaatcaaaacaaatcccttgcccatccaagcagatgctgtaccagaaacacctttcttttacgtttttctgttaattcaatcggctttacatgatacggatcataatatgttccgtcgtctaatacctgtctggacacgctctcatactccatcatgccatcctccagctgtttattaatctctttactgcgtattacaagcatcagctctgtatccagataagtacttctcatgtccatattgaatgaacctattactgacagatcatcgtcaatcagaatactttttccatgatacgaataaccgccttcatattcccagatatcaattcctgtttctaaaattctgtttctgtttttggcataatcagcagctccaaatggatttccgttatttgcaacagaatttgtcataatagaaaagtccggaaccttctgtgcaatttcctcccatgtattatacatcatatcattgcaaataatatatggtgtatgaatttttacgcgttcctttgcatttttcattaattctcccagctgataccataccaccggttccttagccccggtgtggattggatttgataacaatgtaatcttttctgtttcaaaggtttcatccgcataatctgtatcacaaattttttccttattaacttcaaaatattgctgataccctttctgtagctctaaaactgctttctttacagattgtctgtcagctaattttttactgttatgaaaataccgacagtcctcctgtttccatattgtttcaaaataatccaataactgattgaccgaattatctttctgtggctcatcgcagacaactaacacatcccggtcaaaatttttatgccccggaaaatcacccaaaaaataattatatgtgtttcttccgccaagaatatatattttaccatctgcaatcagatatttatcatgcattcttcccattgtcttccatggcttaagcggatttgctttattgtacagcttaatctcaacattctcatgcgaagataatccataaaaatatggattaccctccatatcaatccagctctccattccatctaccaatatgcggacatgtacgcctctgtctgccgcatcatacagtgctcctaaaatcaattttccgctttcgtctgatttaaatgcaaatgtagaaaggattatttcatcctttgcattttggattaatctaactctttctaaaagagcctgcgaattttttttaatgattactgctctttccgtattctctctccccgccacactcataatattttgtgtttcctttatagtagcatcagacaccgccggctgttttttatatgtgatgcagattcctattaactcataaaaagccacacataaaaaaactgccagtatagccaaaataattttacatattttatgccttctcattgtacatcacctgattccttgtattttatactcatacaatacaatgtcaatctcaattttacctcaacagaattgattttatgcaaaaagacaggaaaaagcagctgcctgcaatttcctgtccataaaaactcatataaaattattttactgcgatttacctatttttcctatataatttttaaagcacaattacagcagcatcaagtccatctacttttccgtcaaatgcgctatctgtcagcagattatatttctcggcatactcattaaattcctttacactgctgccgcaattgaaaagcattgcgattgtctcttcgccgttttttctgatcataacaatcgtatcatcatcgtcatttgtgattgtctcaatcatttcgtcctctacgatgcatgcatgtgcttttctaatctgcatgagcttcttataccaattatacatctccttgtcctggtattcctcatcccagtacatgcctcgtctgcagtccggatcatttgctcccggcattgcatactcatcaccatagtagaccataggcattccgggcagtagcagctgaaaggctgctgcgagatgctgctttttcttattatcatggcacagatgtaaaaatcttgctgtatcgtggctgtcaatcaggttccacatcagcggatagcactttttgtttaagcgccccttcagatatcccagattctgtacaaactggctgacattaatcttttcgtctgcaagcaggtctatcagattcaggtagaatggataattcatgacagtatcccactcatctccctcgaggaagtctcctgcgtagtgccatatctcaccaattatcagcatatccttctttactgccttgattgcttttctgaaattcttccagaagaaatgactgatttcatctcctacatccagtctccatccgtcaatatcacattccttaatccagtagcaggcaacatccgtgatgtatttttcaacctcaggatttttcaaattaagctttggcattccaccgtaataaccgaagcatttgaagtttggaatctctccccattcacccctaggtggcagctcgtcgataaaataccagtcgagatattttgacttttcgcccttttcaagtatatcctgaaatgcaaaaaattctcttcctgtgtgattgtataccgcatccagcactaccttcatgccacgctcgtgggatttttgtacgagctcctttaagtcctctgttgttccaaatgatgggtcaacctgataataatcaatagtatcatacttatggcatgaatttgatttaaagattggtgtcagatacaccacatcgattcccagatctttaatataatccagatgctctatgattcccctgagattgccatgcaaatcatccataggcgtaatcggcgccttataccacagctttttgtctaccggctgtgttgcggcaaagcgcgatgggaaaatctgatacactaccttgtttgctgcccactgtggcacctcaaacatctcttcctccctgaggttctgcgggcagtcaaacattctgtccctgtttgtaatgcactccttgtcgaactcataattgccgtaatataccttttcaccctgcatgtctgtaaattcaaaaaagtatctcagacatatcagattcatccgaagctgagcttcataataatcgtgaaactgtgaggttgctaccttcttcataggaagagtcattcgcgtatccttgcgctccataggtatatacttgtcctcatagtgaaggattacctccttcatatcatccttttttacctgcacgcgtatcacaaacaaatccttatctatcgcatagcagaatcttttatccatgtcatgaaaaattgctgaatattccataaaatgcccctttacttacgtatttcgttattttgtattttaacgcactttttaagacaattctatcattatatccatgacatttttacactatttctactttatgcatgattttagattaataacattttatttttttgactttattccctaaaacactgcgttcattatatcacgcattatatcactgcacactcagatagcttgtcacacagtaaagtgtctgtccattatattccacgcgtgaccagccaaactcctcattgattccggttctggtgactgtttccccattttttatagttgcgatgactgtagcatccggatttgttacacttggaagtgcgcgcagattaacctctatcttagcagtgacagtatcattacactccttgaactttgtcttcagtccgtctccgctgccacttccgtcctgcccgggaactacatagttcatatctgttgtgaggtagtttgaaatggcataatatgtctgtccattatattcgacacgtgaccatccactgtcactgacgcctgttcttgttgctgtatcaccgttattcagcgttaccttaattgtgctgtcattgccctgacttggaatatccctcagattgacgctctccttggcagttacggtctcatttacatccgaaaacttcatatttgcttccgggtcaactgttgcattgtcagccgcatcaccattttttgcagactctgtctcatcaaacccaaagtatgccacattcaaatctaccggcttatcaattcctgacacctttcccttattggtatactgccacatggcatgtgtgccctcatatgatgacttcggtgtttccgggtaagctgtatccggatattgtgacacccatattttgtacctgctctcaagtgttttagtatcccactggctgttttccgacaactcattcatggcagcgtaaaacataggcgtgtatccttttttatatatttcctgcaaaaatgcctcagctactttggtacgggcctctgatgacatgccatactgtctgcttgctgagtctgtgaagccctcgcagtcaaatgccaccggatatgtaatctgatattttgagatgtagtctgcaacccagtctgcctcttcaatggcttctgtttcatttactgctgatgagaaaaaatatactccaacctttatgccatttttctgtgcctcctgcatgttgtatctggcatttgtatcaacacacatctcgcctgttttctgggttctgtagcccacacgtatcatcgcaaaatcaattccgcctgcggcaaccttgtcccactttatagtgccctgatatttagatacatcaattccgaaggtcaggttactgttttccgcaacagagcttgcagacagtatctgtgtctcatccgcagaagccccatcatcagatgtcacactcattgagccggcattgtctcccgtatgctgcgggtcttccttgtctgaactatcctctgtggctgtttccgtcatctgtgacgagcccttagcctcgttttttgctgacttaatcacaaaaaatgtggcaactgcagccagcgcagctactatcgcaacaattataaatattgctattatctttcttttatcgttcatagattttcctcttcattatttatatatgtcaccatgtacaggcaatctgcttttatgcaacaaaatatatcatataatcctgtaattttcaaatatttgtcttttttcagaaaatattaaaaatccgctatactcacctatcgtatagcggattaatataacactatttaattttcagtcttttcaccgtttttgtccgtatccgcatttacaacgagatttactccatcaagtccggttacatttacgttgcgatttacctttgcgtcatatgaatcagcgttgataatctcagataaatcaatacctgttgcctctttcatactctcaaatacctttgccattacaaccggtacatttccggcaaccttgcctacaccattttcgccatcaccgccaccgataatagtaatcttgtcgatttgtccaagtggctctgcaaccttggctgcgatatcaggcagcaccttaatcatcatctctgcaacggctgccttattgtacttggcatatgcctctgcctttttctccatagcctcagcctctgcaataccctttgcctggatagctgatgcttctgcctctccgactgcacggataccggcagcttcctgctccttggcatatctcatggcttctgcctctgctttctgtgcctccgcctgacgctgtgcctcgaactgtcttgcctctgcttccttctgacgctggtagagctgtgcctctgcctgctgctgtgctgcgtatttattggcttcagcctttttcttgacctctgcctcaagagactgctctgttactgcaacctctttctgctttaactcaatctctcgctcctgctttgcgatatcagcgtttgctgtggcaacctcaatggtcttacgctgctcctccttctggatgtcgtaagccgcatccgccatagccttctttgtatcagcctccatctgaagctctgatttcttgatagcgagctcattctgtttcttggcaatctctgtctgtgctgcaaccgctgcatcatttgactctttgtcagccgaagcctgagctaccttgatgtctctctcactctctgcccttgcgatggcggcggcctttttaatctttacgatattgtcgataccaagattctctattacctcgttgccatccacaaaattctgcacattaaagctgatgatatcaagtcccattgccgcaagatcaggctctgcattctcttttaccagattggcaaacttctgacggtctgagaccatctcttcaagcttcatttttccaacaatctcacgtacattaccctcgagaacctctctggcaacaccagcgatatactctgtgtttttgttaaggaaattctcagccgcaaggcgtagcttttcaggattattactgatctttacgtttaccgtagcatcgacgttgatattgatataatctgctgtcggtactgcattgctcgtctttacatcgataggtatcagtctgagattcagcttatcaagacgctcaaaaaacggaatacgtatgctcgcctttccaataactacctttgactttttcttcacacctgaaatgatatacgccatatcaggcggtgccttcacgtatccgattgccataaacaacaggataacaagaacaacaactgcaacaataattccaatgatactaatgtcctgcataactttctcctctctttagtatgctttttattaataatttaacaatatcattttattataaatatattgttttgtcaccctaaatattaaaaaaataatataccactgtgcatttgttctgattatggtataagcgatgcaaacataaaatttagaaattacagatatcttcttaatcagcaggcattacttattcatcaattttattttgtaatcatcatcccttgtatttctcctgtatttttatcaaaacttatatttttcgctttcccataatcttccatttccagcttctatagaaaacgcatatattattgcgctcccattaaatggtcctgtaaatatacaaaaatttctttcatctattacgtatgtataccaatttccattttgttcaaaatatccacactgatttggcttttcgataaattctccaaaatggaaatctctatacttttccttcatgttctgcagcctcaataatttcattatcaaattgcatttgatattaccaaatatcaattctagatacttcaaactgcatacacatccgctttgacatatcttttggaatcttgtcttcatcaattatcacctattcaatttctattggctttctacattctcctactatacaatcaagcatttcatcaactgaaccacccaaaaataataatagcccatctgtaaaacaataaaacgattctgttaatgtcattagtactaataaattctttctacaagcttctccaattggatatactgtttcatttatatcatattcagctaaacactctttaaaatatgaaccatcaagattacatccaattgctttgattgcattaaacgaaacatcaaaatagcacttatctctaggatttatatttaacatgccatattcttttaagaatttatctacaacttctggatattctaatccaatttcatcatatttctttcggatcaaatcagtattaatttttcgttgttctttccaacctgaatcaatctattttttgtaatattattcatacacattaatttccctatttatttaatttaatattgtcaacaggaattaatatccctttacaaccacgatacttcccagtggtaaaaattcagttttctcattaatcactcttcacctcacattttattcccgatttaatatcgttttctttgttatttctttctacattacattatacactatggtggtcacacagcagtcacaccggaaaaatttctctacttttttcattttttgcgaaaaaaatccctcagagctgtttgtgccctgaggattggtttttgcttttgcttcaaagctttcgcaatattctgttgctaggagtgcgttacatcagcatattcattttgcaatatttgttcgtatacccagctcggcaaaatttcgctagtgtctattaattaacatcatggattcttaattgcttcgcaacagctatgatggataattaatagacatgcagaggctataggttgttgggagttccagagtataaccctaataatatgttttttaattcattaattggtcatacaaaaattgacacgcatcattttcagagtcaaaaatttcatttgttgtcttaatacctctttctaaataataaaccgaccacttatcctgaattttttccaagcataaacattcatcattttttccttgtcctgtcagattataaatataatctggaattccagctatttttaattttttttctaatacctctctagtcatttatttaatctcctttatatagtctaattcttttaattttttaatattattgggtaattcatactgtattccacccccaacttgttcaaatgcaggtgcaatctcagatattgtaacgttatcaattggttttaatacttcatatttatgatatgcatttgggttctcaatatatggaagtgccctttgttcatatggtactcctgctggtgatgtatattttccccattgacttccatatctgtcaataatagttcctgcaggaatagtttgattttccttgattgttcctggtactcgcccaccatttggtgcccacttttcccaatcaatattttcatctgcatctaaaaatttagtatctcttacaactaattcatcagtacctatagccttaccactcaacaaccttcccaacatcttccgctacatttccggttccctcggttactccatcaatcccttttggggctttcgccagcttgttcgcctctgcttcaattccattcagcccctttgcagttactccacttacaaacataccagcaaccattcctgctgtatcatttcctgtcacatctgtggttatcttctgcgcaccggctccggctcccattgagatgccttctttgg

SEQ ID NO: 1471 - DNA, 44098 bp, Unknown
  gut microbiota DNA sequence
tggtctacacaatggtcgagatggcaaaggccaatgagcttaacatttataaatacctgacatatcttttggagcatcgtccaagtgaagacatttcagatgaacagcttgagactttgactccgtggagcgaagaagttcaaaatgtttgcaaaaattaaaatgtagtaaaacgcttgcatctagcaaagatgatgcaagcgttaattaaaatctagcgttggaatattgagcgcttacgcaagaataattagtgttcgttgatagcttgccggttttatgcgtgttattttatggataagctgcacacaatatgtttcttcttattatctccttttcagacatattgagcaatatttctcccggatacatccagccttttccatcacaatctcaagctcataaagtccttcacccaaactgttcccttaatctcagctccatctcctgtattataaacttctgtatccctaactccttcaagccttcgctctatccatttcctgtaaatgtccaaatttttgctagtatacaccataccacctgtattgcttctgacctgacgcaatccatctgtgttctctatcctgcgcccctcgcccgaagcatgagaataaccgccagtataggctaaatcaacacccacgaaaataatttttcttgctccaaaacgcagagcaatgtccaatgccgttgtggtcacggaactacctgtctcaaaaagtgttgcaccaatctcttttgcttttatctctgcgtgaatatatccactttgatatgccacatagattggaccattataataatcaattactgatgatgaagcagttgaaagaagaatcataggaatattcttcaggttcactccatcaatttgtttatacataagcggctgtggatctgttatgataactgcatccggaataattccttcattgacaagctttcttgtgatatgacctgtagcaaatacggttattttatctctacatttttttattgaagtcaactgtaaatcaaccgatggacctgctcccactatcaccactgctttatctttgaatatatctttcaattcaccacactccggtaaattcaatttggaaatcacctcaaagttagaatcaagcaaaccaccttgttctctcatgctgctcgttgtaacaaagaaatcctcaagcaactgtctggtttgtgcgtcttcaatcattttgatagcaggataatgtactaataactccgcatttttcatttctgcaaaccgcccgctaagctcgctgacaagctgcttcaggtcatcgttataaaccactctcatcctgccgtttgcaatatacgttgtccagtcaatatatgtaaatgccatatgaagcaaatagatattgctctcaaatacatgcacccttgccgactgatgtctgttcaaaagctccatcacatggtatccaagctccattccaaaaaccatataatcctctgcctgctttaaactatctgccaaaagacttgcttccctctcaggattaacagagctgtggagataaaacgactgtccatttacaaaagtctgagctgtaggctgtccgttaattgccagactcaatgtaaacttatcagacaacagagagttcttttcctcaatcaaattttctttattcaacagcttatataaaccaaagtcatattctttcagagagctcatattttgctcaaaaaaatcaggaacctgaaccaagtcacgttcctgaaaagcaatctgaagcttctgcaataaatgcagtaaatcgccttctataatatccgcctgtaaaacataatcacaattatcctgtgcgtcaagtaatgccggtaaaataagctgtagctcatctgccaatgacttataatcttcctgtgaaaatatatatccggcaacagtatctaaatttcctagcagttttgtcagctcgcttgttgcaatgtagaaattctgttttctgaagctctcgactatctcataagaaagcttaatactctgctgattattatagaacaactttatatccatcattctactcctcacacaaactcttcaaggtatcaataacataatcctgctgctcagatgtcaatcccggatacaaaggcagactaataatatgagaataaatctcctccgcattcgcacaatgcacattctcatatccatgctcctgataatacggatgcatataaacaggaatataatgtacattcactccaattcccttttcacgcatagcctcaaaaacctgtcttctatcacaatttttcacctgaactatgtacagatgccaaccactttccgtatccgaaagctgataaggtgtgataatattgtcacaatccgcaaaggcctcattataacgtgcaacaatttcctttcggcgtgctaaaaatctgtccagcttcttcatctgactacagcctaaggcacactggatatcagttatcctgtaattgtagcccaaatcaaactgctgataaaaccacggtccatcattccttgtcatcatagaatcatctcttgtaatgccatgactgcggaaaagaaccatctttttataaaagttctccttgtcagtgactatcataccaccctcgcctgtggtaatcggcttcaccggatggaagctgaatgtagtcatatcagacatactacctaccttcttgcccttgtaaacagagccaagtgcatgcgctccgtcctcgattacaataagcccatgctcacgcgcaatgctgtgtatagcatccatatcacaaggctgaccagctaaatgaacagctatgattgcctttgtcctgtcagtaatctttcttcgaatatcctccggatctatattgtaggtcttcggatcaacatcagcaaatacaggcgtaccgccacaatacagtacacagtttgcagatgctgcaaacgtaagcggtgtggtaataacctcatctcccggtccaatccctgccgcaaagcaagctgcatggagagcagatgtgccgtttgaaatggcaactgcatatttcgctccaacataatcagccaccgtctgctcaaattctgcaatcttcggtcctgttgtaaggaaatctgattggaggacatctacaactgcctgaatgtcatcttgttctattgtttgttttccgtatggtatcatatatctacactccctataaaaaataagctaaagatattatagcctatccctggcttattgaaaagattcttataatatttatttctccaatatgatgcaactaattcggattattaactcaaacttcgcacataaattttagctatgcaccttgaaaattcaatatctggcagttattcagttgtcaatgttcatactttatgtagcttgcagtcgtattttcaacataactggaagtgtattcataaatgcactctccaatttgttgattttttcgtctgaaagttcaatgttatctgaaagtattgttgtgaaacggatccagttgatctgaatcatcttcataaaacgatacaccatatcctttgcaaaagcaagagtgttccgttctgtgatcagattcatatacatgcttctgttagaaaagatcagaaggaacagatactggaagatttccattataggaacacctttctttttgtaggcatatgaggctttcaaagctgaggaaacatggaatctcgtgaaatttttttgatagaatttgaaatctgcttatcattttgagtcgcttgtgttatacttttattcatagcatgagcctttggaagtatgattgtttctgaacaactcaattataccaaaacctgatggtttcatgctatttttttgccagttattattgaattttcaaggtgcgtaggcacttattcaagtgcgaggtttgaattattaatctataattcccgacatactttccgaaccgcgccattattttctgactacaaacttgccttaagcctttgattttgctatatttgtagcctgattttattactttttaaaattaaatgttagatatggtagaagctatttctagccacaaaaggcatttaaatgtatatagcatatgatgtaagaaatagtgtagaatatgccaaacttgtcaaatcaaaacgcaacggaaaacgcattgaaaagaaatatacaaaccttggtagagaccttgataaagagcttacttatatcaatgactcatttcgtgtataacaggtaaggacgagttctgcacgtttgaaactggaaagatttaatgaaactctattccttaaaaaacaacttaacttcacagattaaggataaaattaaatttatatcgtgctagacgaatccagtaactattctacaataatctcaatttcactaattgctttatttgcaactttttcaacttcatctgctgtgtctccaactataattatatgtcccaatctgtcattactactatgagccttacaaaccctttcaccaatatttttataaatttctatctctacaacaccatctatgtcctttactttttctattccatttatttgctttaatattccgtctttcccttgaataaaacgaatagctgaacttttttggaactttttctctagaggtactctttctcctaataaagaagcaaaataacattcaatcatatccaccccagtagataatggcacaagcttagatgttataaaatcaccgccaagtcgtgcagcaatttccacaagcttcgctccgttaggcgtaactttgatttccgtgtgagtgggaccatttaacatgcctatagcattaatagcagcggtcgctactttcttaatatcctcttgtgcaacttgtggcaatttgcatggttctgtgtgccctaattcaacaaaataaggtacatccgtaaccattttatccgtaattgttatgatatgaggaactccatctatcgaatatgactcgacgctgacctctggaccagtcataaattcctcaacaagtatcgaaccactacgtgaataatgctcacaatatagatataattcctcataatcaggtttatcatttttattaactaaaatcactcccctacttgctgcattgtccgctggcttcaatataaacatatcctccattttcggtatgacattcaaaaattcttcatagctacgaatctcataaaaagaaggaatgggaacgcctttctctttcatcagtttgcgcattgcaactttgtttgttgcgcaaatagcgccatcatacgaaatatctgtcgcttttccaagcttttcattaacccaaactactgttctaacaggcatatcgcttgttgatgtaataatgtaatctggctcatattctagagcagctttgtatactgcctctttatctattgtacttatttctaaaaatttatctgcaagggaaatgccaaccgcatttgaatcatagtccaaagcgtagacatacattcccttttctttcgctttttttattgccggaacttgtagcctactagctccaagaataaatattgacttcatacgctatatctccttatatatttcgcagctttatctttatttttcaactcagattattcgccgcaagaaaacctccagaaataggaatttcccctctaacatcttatatgaagtattaaagattattaataaacattaaaaagtctagtgtaaagccccctttcaagttcacatttataatcttccatcatatctacaatgtttgaataatgcggttcgaacccaatatccttcttgagtttagttatatccattaaaggaaaacttccattattaggaatatctggacgctgtataacagttgaaatgttattgtcgtttgaaaagacctcaataattgcttttactatatctatcaaacggaaattctgttcatatcctatattataaaagcctttagatgttggaatctttaatgcgtttaaaacaccgatatttaaatcttttacataaagtaaatcttttgtagtatccgtgcttccatatacctctattggttcacctgctgccgctttatctataaaaatttgtatgccagattttctataaattccatccttataaaaactcccatgtggtccaaccccaaaaattgttggtattctaaagtatatattgttcatctcatatttttcattgtagtatctcatgacatcccattttgcgttatttgacatcacaaatgcagcatgatcatcggttaacgaataatttagcggtgtttcctctgtaattaccgtattagaatcatagagtctgcagtcgaaacgcgtaccgaatgaaatcaatttatttatgcctcgagtcctacaatattctagtgcatttaatgtccccagtacattaactttatagtattctgctgtatcatccgaatcatcatctttaggaatgtttgaaggcatcattgtagcgaataaaacggcagcatcaaaatcatactgatctaaaaccttaaaagaatcataatcacatacatcaatattataataaggcacaccgatactttcataataatccctaaatcgaggatttctccccgttccgactactccccccacaaaatcaggtgtattaatcaattgttcaacttgataagcaccaatgaaacttgatgcccctataattaaaatattcattagcttcttctcctttataagaataagttttctaaaataattcatcaataatcttttggcatccgttgccatcaattaagttgtgtgcattttgcgcaagtcttatccgattatcataattttcaatataatataaagccttatctataatagctttgacgcatttatttacatctgtatatgaagtaccacaataatcaataaccctaagtgcatcaagaccttctgcgcttttaacctgttcttctaccatagcaaaagatattgtaggtatagccattgcggataattcataaattgtcgtaccattagccgatatggctaggtcacaatttctcatgattgttgacatcgacgatacattttcatatagtttaacattagaattatcatcatactttacatgaagaagttctttgttattaaacatcctgcctataataacattcgcaattatatttttttctttcaaaagatatcttaatctatctagtaataatccaaccattccatcattatctgtatttccagtagttataagtatatttcttacttgctctctataatgaggttcttgattttgaaattcatccctcaacggtgcataagatatgccgagtaaaagttttgttccattaaaatagttatttttgtaataattgtagtcaatgtaagaactataatttatcaaaaaatccaaattgcctaaatattcggatttactcccaagatagccgactttcgcataggcttttaaaccttcaacatattccttagtaatacaatacgtatctataagaagataagggtcattttcctgtgaaagaacttttattgtctgctccaaatcagacataagatcttgccagtctgaattcaaaataacatatgatactctattttgttttaatacttctacaggattatcatcggcaataaggaaagttacatctttgccatttataatcaatgctttggctatggctagacatcgcataatatgtccaccagatatggtttgattactgtcaactcttataaaaaacatatcctattccttcattatttttttacatatttccatgccattgcagttcctttcttgatatcaaccatagcttttttccctattatttcatcataataccaagtactaagaccacaccctgggcgaatggatttcacattatcttttgtaaaagtctctcctgctttaatatcactaactacataaagagatctagcatgtttcttgccatttttttgaacttcagttaaattataagttaccacacctaaagcattttctacattatggatatcttcaaccatagcagcaaattcttcaggttccattgaaaaagcaccatcaggtccaccatccgaacgtcgtagggtcatatgtttttcaattatatgagcccctattgaaacagcacagacatcaactgcagaccccattgaatgatcagaaagtcccgtaatgcagtcgaatgtctctgccatatgtggtattgtcctaaggttcaaatccttatatggagctggatattgcgatacacatttcaaaatcgcaatgtcattatttccaacagatttacatgcttcaaccgccctctctatatctgctaatgttgcaatgccagtagaaagtattataggttttccaaggctagcacagcgtttgataagagggatatccaaaatttcgtatgatgcaatcttataaaccggcacatctagactttcgagtaaatcaacagctgtaaaatcaaatggggatgaaaaaatttcaattcctattttccttgcatatttaaagagtccctcatgccactcccatggcatatatgctttttcatatagctgataaagattttgtccttcccaaagacttcccttggttgccatgaattcttccccctgacaatctatagtaattgtatcaggacgatatgattggagttttattgcatcagctcctgctttcttagccgccgaaataattttcttagctctttcataatcctgtaaatgatttgcagacatctcagcaataatataggcgggatacccctcacctatccttctcccatttacctctatatattttgacattttgtttcccctttcatgagcttatacttcatttccgctataatccagtcttgctcattatcaatatcctgaacctctaattcaggtaattcaatcggcacaattttatcagtaatcactccattacaagccaaataatcctttatgttataacaataaaactgaccagcatcatgaaaaaagggttctaaatcctgggatctagaatttctatattcttcccatttaaatttcataaaaccatcctttagaacataagccctttgcggaggatacgaaaatctcacgactggtataactaaggatgcatgtttcttcttcattgataccaatacccttctcaatttttcagccgtaataaatggagctgttggatataggcacaccatattatcgaaacacttacccatcttattatattcggataacacttctaacaacacatctcttgtagttgcaaaatcatttgatgtttcagcactacgcaaaaacggtacttttgctccatattttttggctatctctgctatctcttcactgtctgttgacaccatcacttcatcaaaacatttgctcttcaaagcagcctcaatactatatgcaataattggtctaccacaaaattcttttatattttttttagggattcgttttgaaccacctctagctgttataattgcaatattactcatattactcatactactccctccgttattgctgacatggagacatatttatctgattatggaattcccgccttatcatttcagtccataaaaaattggttaaaataaaatttcttagcatctaaccaaagcttcagtatacctattacattttgcccgtttttaacagtgttttaatctcatcaacactgagccactgggtatttgtccccgaactatattcaaatccctgctctacttttttccctccaacctgtatcttattagtatcccaccaatcaaaatgtggatatacgatgaagtgcttatcatattcatatgtgagcattgagtcttctcttgtaaccattatttcatgaagtttctctccttcacgtataccaacctccggcatctcgcatcccggtaatatagcttgtgccaaatctgttatcttaaatgaaggaatctttgagataaaagtctctcctccttttgcctctgacaatgccttaatcacaagttctactccctgctcaaggcttatccagaatcttgtcatcctatagtctgttattggaagagaagtaccaccattagcaactatatttctgaaaaatggaataactgagcctctgcttcctgctacattaccatatctgacgattgaaaaattgacgtccttttctcctgcataggcatttgccgcaataaacagcttatctgaaaccagcttagtgcctccataaagattaattggattaactgccttgtctgtcgaaagagcaacaacacgctttaccccacaatctaatgctgcatccactatattcattgcaccattgatatttgtctttacagcctccatgggattatattcacatgatggaacctgctttaatgctgctgcatgtaccacataatccacaccatcgaacgctctgtaaagtctttctttatcccttacatctcctataaaaaaacgtagtttatctgcctgtggatgtttcttatattcattctgcatcacaaactgcttatactcatctctagagtatataattatttttttaggctcataatgctccaacacataactcacaaactgatgtccaaacgaacctgttccccctgttaccaaaatcgactttccatttaacacgaaatatttcctccctgatattttctatcagtgcttggaataccttcataaataaaaagccacccgaacgtacatagtccgagtggcataatactttatttgatatatatttatgcctccatgcaccattctgattcctcatgaatctcttacattattatatatcgacattatgctataaaagttaatattttaatttaactttgttaaatcaatgtatttattataatcaatctgcatattttcaattgcctgtaagtatcctttatatgacatttcacacatttttactatatcatccacatcacttttgatatcttctttaactctatatgcagacattgctactgtatatccagtttcagcattatacattcccaatatttttgcttcaagactatcctgtagcacagagttaatttccattatctcctgaatactttttttaatctcgtcattttctagctctcccttattattccttatcctttctatcgtttccattccatcatccaacatttctttcaaatattctaagttctgtggcatctttccaagtatttcaattgcctgttttctttgttctttattcattagctttggacagtcatttacaattttaatccagttcttttctgataacttattacagcactcattaatcgcactgctaagtgtcattatttctgtcccctttattttcgcaccaccttctgtggcatcaataaatcttatactaggatttcttgatatagttgcttcaaaccatttcctatatgcattcatgtttccttctgtgtaaacatgatttccatatatatcttctactttaaagtacttaccactttctatatcaatattactctcgctatcataagaagctgaagaatgcccttttttattaggataagccaaatcctgccctatcaaaacaatagtttcaaattttgacattatagcaagtgaaaacaaattacaagctacagatcccccgctttcaatcactccaaggtcaatacccattttctccaaaaactctttcacaaatggttcaccactccatgtataaaatctcttaccattatgtagcaaatcaatcttcgaattataatttatgtcaaccagcataggaaggttttctgttcctctatattgaaacaattccagaggtttatgtggatcaacagaagcaacaatatcaggtactatacctttttttaataatggctttattgctgtatcaactgccattatcattcctcttcctttgaccgcctttaacatatctatatttttatcaagtgatggtccagcagatactataaatgccggatatccctctttattttcgttttctatattttttattaaatcttttacaccatattgatcaattaaatctaatatattgtgccagaaattctcgatatgctctccattaaatgcaatatccgtatttttctgcatgataatctgttcaattcttgcgtaaaaatcattcaagaaaagaagataatcgtcaatcataagatttctatattgtggcatacaaattacatctgtaatgtaaaaattattaatatctaccatctcatgcaatacttctattctggctcctcttgttttttcacctacagttataaccacatgctcatctataataaaatctatgtcttctacggtttccataaatttatggaaaattttttcagatggttcatgaacataaatgtaattatcaggaaatctttctctaatcttgcgaaccaacattccatttcccaacccaaaaattataaaaactgcaaatggatttttttctgccttacttgacctaagtatatgctcacactcattatccacgctatacttgctatcaagatagtatgtatgaccatttttcactatcccatatattattttttcatccagcgattttgctgtgcagacatcgctttcatcacaatctgaaactatttcttttaagtatggatagttgtatatcaatttattatattttaattctagattattctccatatttatacaccagttctttatataccacaaagctttcttttatttcatattcaagcgtatcaacaatttgtattggatctttcaaatcaattgcatttaataaattttctaactgtaacagaattacatctgtctgtatattttctccaagttgattgtaatatccaattttattcaggaactctaccatcatttcctgtatttctttaactatttcaggaagcttttttatcccatcaccatagtctttatacatcgtatctatataatcatcaattatatttatagttttctgtattctattcaacatattagtatcctcgtataaataataaagccactcaaagtgagtggctttataaatattggtatacattattccatcaattactggatgagtgaaagtacaccctgtgtctggctattagcctgagcaagcattgactgaccagcctgctggatgatagaagtagcagagtactgtaccatctctgaagccatatctgtatcacggatacgagactcagcagtctgagtattctcagaaatgttatcaagattatttactgtatgctcaagacgattctgcagtgctccgagatctgatctctgtccagaaacttttgagattgctttctggattaatgtcatagcagatccagctttagtaaatgatttaacatttaacgaatcaacaccaagtgcttttgcattcatagttccgatactgattgtaatcttctgattctctaatgccccaacctgaaggttcttgccagtaaatgttccatcaagaagattctgagtattgaactgtgatgtagaagcaatacgtgaaagttcatttgttaatgcattaacttcactctggactgcagttctatcagctgttgtatttgtatcatttgcagactgtgttgcaagctcgttcattctctgaagaattgagtgagcttcatttaaagcaccctcagctgtctggatagctgaaataccatcctgagcatttgaagaagctttgttaagacctctgatctggcttctcatcttctctgaaattgagagacctgctgcatcatctgctgcacggttgattctataaccagaagataacttctctgttgatttgctaagtgtgtttgtgctgattcctaactgtctgtttgcgtttgacgcagccatattgtgctgtactaccatatttgtttcctccttgaattaagtgaagcgtccatgcttcaatctgttttatcattgtagtttgccgcccgaccgtacgcttcgtttggcttgctaccaagtaatactttgcttacttgttatatatatcggacgagagtttcgatactttatacctcttttgaaaatttttcaaattttctttttcacggcttcactttttattatccatgaactgcggatctacatatccggtctttgtcattgactgataatatttgcttgccacatttgtgccctttcgtacttgtctggcttgtttttttattccgttgaatttgtttgtcataagggctttgtttctggcttcctggcttttgattttcacgctcttgtctgtgatgttgcggatatgatcctgcatgatgcggatttcttctttgtgcgcctctttgttgccctcaagctcttcttttacgcgctcgaagagcttttcaaagccactgtccaggttgtcaagctgctctatgagctttgatttctgctctacaacgtcatcaaaatcgtccggtgtaaggtttgggtcttcaagctggtttttctgtaccgtatcaagctctattattttgtcaagtacctgttcttttttctccaggctttgtatcattattgcgatgtatgtctgttccatggtgttctcctttcaaaaaggctattgcccagctccataactttgcaatagcctttttgtcttttatcgttattattttttattttacgacacgcctaccttgcttccgttgcaagtgacacgcatgacctctttccacgcatctctcatggtacgcaggtgctcaagcacttcatcgagtatctttgtatctttcttgatattggcctcaaccagtctctgcatgaggtatgtatataccttgtcgaaatcctttgccaccgggtatttgtgattcagggtagcctgaaattcttcgatgattgcctctacctttttgatattatcgtgcgctttctgtatgtcttttttctctatagccatctctgctatgttgcagaacttgatggctgcctcatagagcatgagtgtcagctccgctggcgatgctgtctgaaccttgctgtttgcatatactgcgtaacctttgctttgtaacatttgttacctccctgatttcgtacatttactgcttgttgaaatgtacattttcaatatatttcacacattctgactcatgtatggttattctttatgagaaatagctgcttagtgagctctgtgtactgttgagcttggcgagcgagctctccattgcggagaactttttatagtaatagtcttccttgtctgatatctttgtctcccactccttgataagctttgtgtaattactgtactctgtgctcatctgcttgtcgttgtatatggtaaacgctgagctcagtgatgttgatgacatcttatctccaattgccttgtagaggttgttggagatttgctgcataaatgtcatgacattgtcagggtcattattgattgccgccatgagcttatctgtgttgcctgaggtgttggtgtcatcctcatctccgtcgatatggtatgcgttctgctcattgtctgcagcattgaggtagccaagcgtatggattccgaagcttgagaatgagtatttcttgccgtttatctccactgctgatgacatggctgactgcatggctgtcattacgccgctgagagttgtatcgtttttgagcagggaatccttgattttctgctcccacttctcaatctctttgtcggacattttttccttttcatcatctgtcagcggctcatagctgcctgctgatgctgcgttgtagagcttggtcatctcgtttatgacgttattgtactctgtcaggaagtcctttatcttgtcataaatgccctgtgtatccgtggctgtggtgatgctgatttcatcattgccggatgtctttgagagtgctgtaatgttcagtccattgatgttgaagctgttgctggctccggtgtatttcacgccatttaactcaatttcggcgtcttttccgtctatcttgctggcatcggtattgtactgtgcgcttgatgacaggtcatacgctgcatccacttcatctaccagctttgaaagggctgctttgtactcctctgaatttgtgtcctttattgctgcaagatcctttacgatgctgtttttgtctacggtctcctgtgctgtctgtgctgctgttgtgagcgctgacactctgcccgcgtagctgttatctactgcatcactgcctgatgcatatgcgccggttcctgatataagtgcctgcactccggtttttccgccgttgtccgcatacgcactatggacagcctctgtgagcttgcttatggtgtaatcatcatcctttttcagcactgtatcctctgatgattcaaaggctgtgactgttgacaggtttgctgtgtatgtgttcagatcagcctctgatataccatttgtgagagctgtataggctgtgtttgcagcctccgcatttataagcgactctctcttggatgtgtaatctgcctttgatttgattgttatgccgttttttgaatcatccggttcaccgtctgcataatatttgccgtctgcacgcttggtatatacttttccgtctgcatcctgaagcttttcatcagtgtctccgacctttgtgtatgacacttccttggcgtcatcgccctcgccggttgtggatgtgtatgatattttttctgtaacctcatgatatgccacgtttttggtcagctttgctgtatctccgctgtatttatctgtttcatcagctacgttgatataattgccgccggaatccttcttgtatgttttgccgtcggccgtatatgtctcttctgctgagatgtacttgccgtctgctgatttgtataccgcattgccctttgcgtcttttgcagttgtcagactgtatgtggtgtagctgtcatcactgtttttcattatgacggctgagtctcttcctgaaccaagctttgcaagtgtttcaagctttgtcttgtctgcactgctgtgtgctgcataaaagtcctgaacatccgcataagcattaccatatgttatggcattgagcaggttgctgctctgcgcattgtactttgcaacattgtctgctgctgtgacatatgcgtttctggcgtcttctatattctgctgtgtggtttttgtgcttccgttgtttttaccggacaggcctgcgtactctccatatgggtttggtctagttccgtctgctgatgctcccactgcaattccaagcttatagagtgcgctcgctcctgcggcatttgctcctgtgagtgtgaagtcattctctacacctgtgtcctttgagcttatgtaaaaacgcttgtagttgctgtcatagctggcattaagtcctgcctccttgagctgcttctccacgtctgacattgtggatgtcgcgctcagcgtgatagtctttgtggtgccgcctgtatttacatttatctgtgcatctccacctgtatagccaagctgagccagtgtggtcgttgagcttgaggcatttatctgtgctcctgtgagcgagcctgcctttgcggtctcctttattttaagcgactgcgtgccatttggagctgttgatgatgctgtaactgtggcctttgtcgtgtctgaaaccgatgtctttttaaggttgtaggcacttgaaaatcgcaggtttgatatattactgtacatgctgtacaccttggtattaagtgacttccaggattcctgcttccagccaagctttgtctgtgctttttcatatttttctttcttggttgtatagcctgatacaagtgctttgacaattgcatccgtatcgaggcccgaattcattcccgataatctgattgccatgatgtcctcctatctcttctcatctaccatgagtcctgccatctcccagaccttcgctatcatgtcgagtgtcttctccggcgggaactctttgatgacttcttttgtctttttgtctattatctttattgtcacgcggttagtcttctcatggatgccgaacactgcctccgactggtcagccaacgcgctcttgttgatatcatccacagcctttttaagctgcatattcttctcattctgcttttgtgcggcaagctgtgcctgtccctgcgctccggcatcaccggctgaatcaccgcttgtttccttagtattcatcgcctgaatattccttgcgatgctgtcagacacgacctgattgtccgcactggacacctctgtccttccctgtgcctgttcctttatctgtgcagttgatgtacttccctgatagaccattcctgcacccttgattgcctctattgccatctctaacacctccgtgtgaaaatatgttgcaattgactgttgttcttaccctattctaaggaatatatcggatgaattgcgggaaagtttatagctttcttctctttttaagtataaagagattttgaaaaatcccggcccacatcaggatacttaactttatcctatgacgtgagccgggatggattgtctctttattctttttgtgttttagtcttaatgctccagattcgcaaacttcgtgtactcaggcagccatgcaaggtttacggtgccgattggaccattacgctgtttagcgatgatgatctctgagatacccttgagctcggtgtccttgttgtagtaatcgtcacgatagatgaacatgacgacatcggcatcctgctcgatagctcctgactctcgaagatcagaaagcataggcctgtggtccggacgctgctctacagctcgtgatagctgggagagtgccactacaggaactgaaagctctctggcaagtgccttaagcgaacgtgatatgtctgagatttcctgctgacgcgattctgagcctcgtcctgagcctgtcatgagctgcaggtaatcgatgatgatgagctttaagtcgtgttcgagcttgtatttacggcacttgcttcgaagctctgatatgctgatacccggagtgtcgtctatgatgagctcggagtctccgatgattccggctccctcgaccagcttttcccagtcggcatcagacagatttcctgtacgcagtgcctgcgcatctacctttgattcgagtgagaacagacggtttacgagctgctccttcgacatctcgagtgagaatatggctgtacacagatgtgcatgaaatgccacatgctgtgctatgttgagcacgaaggctgtctttcccattgacggacgggctgccacaagcacgagatctgacggctgaagtcccgctgtcctgtagtcaaggtctatgaagcctgtcgggattcctgttactgtgccctcctgctgtgctgctttttcgattttctcgagggcattcatgactacagtacggattggcacgtagtcacctgtctgccttgtggaaagcagttcaaatacatcgtgctctgtcttgtcgagcacgctctcgagagattctttgccggcgtagcactcgttctctatgtcctcagtcacatggatgagctttcgctttatggcattttcctttacgatattggcataatacttgatgttggcagaggtcggcacactggtgacgagagttctcacaaagtcaaggctttgtatttcctgcggcacatccttttcctttaaacggttctggagtgtgacgagatctacaggctgaccctctgtaaagagctcaaccatggtctcaaatatgatgccgtactgctgatgataaaaatcctccttaaggagcatctcgctggcggtcactatggcatccttgctcataatcatggagccgaccacggactgctctgcctcaaggctgtttggcattattcgtttgattaatgcttcttccaaggggattcctcctatccttcaactactgatactgtgaggtttgctgttacctttggatgaagcttgacaggcacctcatagtttccgagtgccttgattgactcgttaagctgcatctttttcttatcgagctctaagccatgctgctcctttgctgcagccgagatctccttggtggatatggagccgaaggtcctgccgccctctcctgagcgcagctttactactacctttgtgttctctactacctttgcgagtgcaagtgcactctcgtagttttcctgtgccaccttgtcagcgtgctgattctgaagctttaagtcatttaggttctttggagtagcctctactccgagctttttaggtatgatattgtttctggcgtagccgtcacttacgtttactatctcgccttttttgcctaatggttttacgtcctgtaataagattactttcattcttctatgtctccttcttttagcatttcgtccagtgtatcctgtatcatgcgcttcgcctgcacgatagtgacgcctgtcagctgcgcgcctgccacatttaagtgtccgccaccgcccagcttctccatgattatctggacatttatctcgtcgattgaacgagagctgatataaatcttgtcattgtactccgtgagcacaaatgatgccttgattcctatgatattgagcagctcatttgctgcctgtgcaccaacgattgtcgggctctccacattctcgctagggcataccgatatggcaaacgagcccctgtatacctctgcatggcgtactgcctcggctcttgccttgtagcatgccatgtcatttctaagcatctttctgacgcgtgttacctctgcgcctgagcgcttcaaaaaggctgccgcctcaaatgtacgcacgcctgtctttgtcataaagttgttggtatcgatgaggatgcctgcgtagatgcagtcggcctctgtcgcattgatcttgactccgtcgttgaagtactgcaatacctctgcaaccatctcacacgcacttgatgcatacggctcgatatatgagagtataggattctctattatctcgctgctttgtctgtggtggtcaaatacgactatctttcctgtctttctgaggagctcaggacactctgtgtagcttggcctgttggtgtccaccaccatgacaagcgtatccttgctcaccatctcaagagcttcttcgctgtttataaacatatccgccgggtagccctttgcctctgaaaatgtctccataagaggtcttactgagcttgtcggatcatttatgactatctgtgcctttttgtcgagattcttggctgcacagtatatacctatgcctgctccaagcgagtctacatctgtgatgctgtggcccatgataagcacgttctcacaggtctcaatgatttcctgaagcgcctgtgccttgactctcgcctttacccttgtcttgctctccacctgctttgacttgccgccaaaatacaggatatcgtcgtgatcctttataactacctgatcaccgcctcgtccgagggctaagtctatggcatttcgcgcatatacgtagttttcattatacttatcgctctttataccgattccgatactgagtgtgaccgccatctcgttgccgacctttatagccttgacctcgtcgagcaccttgaacttgtcctccttcatgctgtcaaggtacttgtacttgaacaccacgaagtatttgtcgttttctatctttctgacaagtccgtcatacttggcaaaatactggtttacacgcctgtcgataagtgcaacgagcagcgacctctttacgtcctctatgctgtcgagcgcctcatcatagttgtcaatatatacaagcgctgagacctgcttctgctctgtgatttccttcttgcagtgataaagctccgactcatcaaatacgtacagcgccgtcaaaaactggtctgcttcatttgtgtcgattatctcattttcctctgcgatagagttgaaatatattcgcttgacggacagacggactatgctgtcctcctcctcatttactatcttgaagtctgtcggcgcatcactcttggtgagaagctctctggtcactgtcggaaaaagtgtcgtgatggatttgtgatattttttatccacacccattagctctgcgaatttgtcatttacccatagtatcttgccggagtattcaagcagggcatacggcacctcaaactcattaagcagcctcttctgcaccgatgaatactgtgttgcaaagcttatcagctcatttgcaacgaccgacttgcttctgacatacaaaaacagcacgagcgcaaagtaaaacactgtaaagcctaccatgccatagccaagccttctgtcatagcgcagtgctattccgtcagcacatatccacacaaacgtcagatatagcggccagcacatgtagcttttcagcctgcccttgaattttatttttttcttcattttactctccttatccccggtgcgttgcgctgatgctgccagtgcaacggttgcggtttcgagaatgtactacaaatttataagttaccgatcacacctttgtgcaacccgtatcgattgatatacctactagagagtataccactttgtggggattattcctagtactatatttatcagtttggaattacaggagttcaggacaatcctgtgtaatctaagcacaattctatgcaatctaaaaagcaccgcatatatctgatattaatatgatacatgcgatgctttttgtgtgctctcatcttccggtattcattttaattaactataattacttctcagtcttatccgcagctatttctgcaattgactttgtaagacctgcaatcccctgaatctctgatgggatgataatctttgtagccttgccgtctgctgccttggcaaatgcctctaagctctttatctggagcactgcgttatccggatttgcctcctttaacatgcgaagtccgtctgcattggcctgctgtatcttgaggatagcctctgcctgacctgctgcctcctggattgttgcctccttctttgcctctgcgcgaaggatggctgcctgcttttcagcctcggcatcgaggatgactgactctttatttccctctgcaacaaggattgttgattttttctcaccctctgcacgaagaatggcctctcttctctcacgctctgccttcatctgcttctccatggcatcctggatggcctttggaggtatgatgttcttgagctcgacacggtttaccttgatgccccatggatctgttgccacatcgagtgttgcgcgcatcttggtgttgattgtctcacggctggtaagtgtctcatcaagctctaagtctccgatgatgttacgaagtgttgtggctgtgaggttctcaattgccatgattggattctctactccgtatgcgtaaagctttggatctgtaatctggaaatatactacagtgtctatctgcattgttacattatcctttgtgattacaggctgtggcgggaaatctaccacctgctcctttaagatgactttctttgctattctgtcgataaatggcaccttgaggtgaagtcctacgctccatgtggtgagatatcctcccaaacgctcaattaccattgcatgtgcctgtggcacgattttgatgcagtttaccagtactataagtacgattacgagtaacactgcaagtgctattaatccttccatttccggttaagcctcctttaccctttttacaattagttttactccgcttatctttactacctcgataagctcgccttttcttatgacctgggtctcgtcctgcggtctgactgtccactcctgaccgtttacaacggcttttcctgtctgcttcatgctgtcagcatcctcggtgagcacagctctttctccgaccagactgtccacgtttgtcttcactgtcctggaattgatgtacttcccggcccatggctttgtgagagctaaaagcacgaccgaaacgagtataaatgcaattccctgaaccacgacattgccgccaagcagtgcgattataaacgctacaaatgagcctgccgcaaaccatatggatgtgagcccgactgtcataagctcaactaaaacaaaaactacggtggctgccaaccagaaaacaatgtatgtatccatttgaaccctccctttttattagtatttgttttatatccattttatactatgtaatttgattatgcaacaaatattaattttttaaacataaaacatttttaacctaaaaaatcccgaccaccatccggtagtcgggatttatcatacatttatcttattcgcaaacgtatggcataagagcaagatgacgtgctctcttgattgctactgtaagagctctctggtgctttgcacagtttcctgtgatacggcgtggaaggatttttcctctctcagagatgtatctctttaatttgtttgtatctttgtaatcaatgacattgtcttttccacagaatacgcagactttttttcttctacgcattggtcttctcttcattgatgaaccatcagctgatttattgtaagccatttttgttacctccttgaatatttgtcctcgtggacactactaattgaatggaagctcctcgtcgattccgtccggaatgttcatgaagccatccccagcagcctggctaggtgcaggtctgtctgccggtgcaaatccgcctgcatttcctgatgcggctgatttagactctgcaaactctgcattctcaaccacgacgtcagtggtgtataccttctgtccgtccttgtttgtatagctgccggtctggattcggccctcaacaacaaattttgttcctttacggccaaatctctcaaaaaattctgctatctttccaaaagctacgcagttgatgaaatccgttgactgctcctctgcattcttgctgtatcgtctgtctaccgcaagtgaaaatcttgctattgcaagtgagttatccccctgagcatagcggatttctgcgtctctggttaatctacccataagtattactttgttcataatacaatctcctattttcttatactatgcctcgtcttttctaacgcataagaaacgaagaacattgtccatgatacgaacgtcctgctcgatttctgctgggactgttccctcagcatcgaactggatgaagtaataaaaggcctcagtcatgtgctgaatctcgtaagctaatctcttcttaccagcctcctcaacttctgtaacagtaccgccggcacgtgtgatgtactcttttgccttctcgactactgctgttctcgcatcatcctcgatctttgcactaacgacgagtgctaattcatatttgttcatgcgaatgttacctccttttggtctctggctcataaatctgattatgagcaaggaattttatatcacgagtctagataataacatgaatcgtggtacttttcaaggggtttttgcaatttttctttaatttttattaggtcgggacatgcgctgtttctatctaactaagcctgcttcttggtgagaccgcggtcatttttctcgaccagcttccttggcaccataacctggtgtccgcagcccatgcatttcaggcggaagtctgcgccgacacgcatgatttcccactcgctgctgccgcacggatgcggttttttcagttttacgatatctcctactgcgtatttatccattctatattccttctctacctatatctgccatattatatactatgatatgagggtcaaaaggtattttgcccctcatactacacctctatctgctcaaatacagagcccagtccctgctgtatcagaaggtctgctcttgcgtccatcggtgtggtggacttgttgataagcacaagcttatttccgttgtaatagtctatgaggcctgccgccggatataccgcaagtgatgtaccgcctactatgagcacatcggcatgactgatgcagtagattgcatcctcaagcgttttctgatttaagccctcctcgtacaatacgacatccggctttaccggaccgccgcactttggacattttggcacgtctgttgagtggaggatttcctctgcgcttacaaactgcaagcacctctcacagtagtttctcagcacgctgccatgcagctccattacatttttgctgccggccttctgatgcagtccatctatgttctgcgtcacaacgcccttaagctttcctgctttttcaagctctgcaagcttgtaatgcgtgatgttcggctctgcatcaagacagagcatcttgtcacggtagaatcggtaaaactcctgcggatgcttcctgtaaaatgtatggctcaggatggtctctggcgggtagtcatacttctgattgtaaagtccgtccacgcttctgaaatcaggtatgccgctctcggttgatacacctgctccgccgaaaaatacaatattgtccgaagcctttatccactgcaaaaatgtttctacactgctgtcattgttacccatatgtatccatcctttcttcttttcttctttaaattgctgcctattattttttgagccacacttttatagcttgcgcaccagcttgtccacatctgcattcagtccaagcaccatcactgcatcgtctgccttgaacacgtagtccggcagcggaagcacgcgattctttccggcttcctttactgtaacgatatttacattgtatttctggcgcacattattttccttgatgctctttcctacccagccttcaggtggatttatctcgtagattgagtaatcatcgtttaatgccacataatcaagcacatggttggcgctgtatttctttgccactctctctgccatgtcgcggtcagggtagataacctcatccgcaccgtttcgaagcaggaacttggcatgcacatccctgtttgccttgctgatgacgtattttccgcccatctccttcacgagacttgttatctcaagcgagctctggaaattggtgccgatgcatacaaaaatcaaatcgaaattgttgattccgagtgcttttactacctgtgggtctgtacagtcacctatctgcaccttggtcacgtcatagattaaatccctgaccttggcctcgtccttgtccatcaccataatgtcatttccattttttatcaaatccgcacacagatggtgtccgaatttacccattccaataattaaaattgatttcattgcgtttctccttatccttatccaatgataactttttcctccggaagctctatattggctttatccggtctatgcacaaacgaaagcacaaaggtcatgcttccgattcttccacaatacatcataattatgataattatgcgtcctactgtatttaaatctcttgtgatgcctgttgtcatgccgaccgtactgattgcagagtatacctcaaacagtacatcgtccatcttcatattggatgtggcaagtatagctatcaccgctgtaagtccaagcaccagattgatgataagcaccattccggcctttttgattacctcactgcttattttcctgccaaacacattacagccgttgcttcctctcagatacgaaacaatatagattatcatgaccgccatggttgtggttttgattccgccggctgtcgagcccgggcttcctccgatgaacatgagcactatggtcaaaagcttgcccgcctgtgtcagcgctgctgtgtctactgtattaaaacctgccgttctcgccgtaactgaaccgaataacgatgcaaatatggcacccggtgtatccatgcctgctatggtattgtttttttcaaaaatatacataaacagtccgccgccaaagacaagtatcagtgtggttgatattactatcttggcgtggagcgagtatcttctaagcttaagctttttggttctgacctcattccatatggtaaaaccgataccacctatgatgataagcagcatgattgtgatatttaccaatgggtctgcggcatattttgtaaacgatgagtactcctcgtttatgcccatcaaatcaaagcctgcattacaaaatgcagatatggagtggaacaccgagaaatatatgcctcttaatatgccaaaatccggtataaagcggatagctaaaagcaccgctcctatgccctctataaggaaggttccccttattattatcctgaaaagccttactattccaccaatctcgagtgcattaatgctctcctgcatcagatccctctgtctgagtccgatttttttgtgcaggagcatggaaaatgccacaccgattgagatgaagcccatgcctcctatctgaatcagcaccagaattacaagctgccctatgatactccagtgtctgaaggtgtcaaacacaacaagacctgtcacacaggttgcgcttgttgccgtaaaaagtgagtccagaaaattagtccattgtccatctcttgaagaaaacggaaggctcagcattattgcccctgataatattgtcagaaaaaagccaactgcgatgtatctgaactctgtcaggttcttatgtcgtttttttatgtcatgttttatatcgttcatatccaatcctaactatttgctacagaatgtattattgtcagcttacagaagctgtttgtatatatccctcttgctgacacctctgtcctttgccacgagcttcatggcttccttcctgtcgatgccctgtgactcatagtgtgccatatgcgcttcaagcggcatggcttcccagctttcctgctgctcctttgctatttcagccacgtttctgccacagattacaagcacatactcgcctcttggctcctgtgtccttgaacgctccaaaagctccgaaaatgtagtctgcaccttttcctcgtgctttttcgtaagctccctgcacacggtgagttccctgtccccgagcgcattgtaaagctctgtgactgtctttacaagatgatggggtgcctcgtagatgatgattgtccgagtctcatttttgagttcctctatgacgcgcgcgcgttcctttttatccctcggcaaaaatgcctcaaacgcaaacctcctggtcggcctgcccgacatggtgagcgctgtaatgcacgctgctgccccgggaagcgaggtaacaggcacgccctcctcgtagcagatgcgcacgatgtcctcacccgggtcagaaatgccgggtgttcctgcatcggtgatgagggctatatttttgccctccttaagctttgccacaagctggtaggctttatctatcttgttaaactcatgatagctcgtcatgggtgtctttatctcaaaatgattgagcagctttatggagtttctcgtatcctccgctgcgatgaggtctacctccttaagtgtgcgcagcacacggaatgtgatgtcctccagatttcctatcggagttgcgcacagatacagtgttcctgtcatatgattctcctgttattttccgttattccggggcttatcgccgtatatctcatatatctcatccgtgtatacattaggtttcttgtatacaactaacggtttttcgatggtgatacggcttttgccgccctttaacccctctatgagcaccatgtttggctccctgtccgcgtagggatgtacaaggcgcatgcgctttggctcgatatgatatttcatcatagtgctaaaaatctctgccagcctgaatggtctgtgaaccatgtaaaaacgcccattgaatttgagcatttttgcgctctccctgactatatcatcaagtgtgcacctgacctcgtggcgtgctattgtcatggcatcgtctgcatttttgataccgtgctgacctatcatatacggcggatttaccgtcaccacctccacggactcgcgaccgaaaagctctgaggcattgcacacatcgccctcttctatggtcactttgtcctcaagatggttatatttcacacttcttctcgccaggtctgcacactgaggctgaagctcaagcccgctgtaatgctctccgttattctttgcctcaagaagtatcggaatcacaccgtttccggtgcacaaatccacagctctctcgccgcgctttacctttgcatagtcagataaaagcacggcgtctatgccgaagcagaacagctttggatcctgtatgagcctatagcccttgcggcacaaatcgtccaggcgctcattactgtgtatcagtgcttccattgtctttgtccctgttgtaatctttactatactctttgttatagtttttgttcttgtaatccttgttgcggttgtatttctgcttgtttggtctgtttttgccgcccttgtacggctttttgtaaccgtccttattttctctgccggcatttgcagcatttacttcatttgtctcatttgcagaagcttccgctgcctctatgtccgccctgtacggacgtctttctctgttgtcacgcttatcacggcgctcgcgatattcatttttgttgtcacggtgtccacggtttctctgcggtttctcctgtgacttgtcctccatcgtctcgtcgccgctatcctcgagatccttgagctcgcgaagctcttcctcggtgagctttacatcctttttctggcgaggctttaagcgcagatcatctacagtgtactcacgaagctccttctcctcgccgttgtcaatgacaacacgcacgagctgcctgagcacgctgactgacttgacctctccgatgattccctcaggtgtcttgaccttttctcctatcgacggcattctgctgttcaaatactcatatgtatcctgctcatacttgagacagcacataagccttccacacacaccggatatcttggtcggattgagcgagagattctgctcctttgccatcttgatggaaaccggcacaaaatctgccatataagaatgacagcaaagtggtctgccgcatattccaatgccgcccatcatcttggtctcatccctgacaccgatctgacgaagctcgattctcgtgcggaataccgctgccagatcctttacgagctccctgaagtcaattctgccgtccgctgtaaagtaaaacagcaacttgtttccgtcaaaggtatactctgcatccaccagcttcatctcaagtccgtgcttgatgattttctccttgcagatggcaaatgcctctttttccttttccttatttctctcaaccgttttctcatcctcgtcggttgccactctgatgacaggcttaagcggtgaaaccaccttatcatcatccacctccttcggcggaatgaggacagttcccatctctatgcctctagctgtctccacgataacatgcattgccatgtcgaggtcgaaatcagccgggtcaaagtaatatattttgcctgctgtcctgaatctgataccaactatttttgtcatgtgattagttctcctttatggtcataagcagcagctcaattaccaggtcaaaattgacgtttgcgttaattcttatcttcgccttctcaagtgcctcaagtattgcctcgattccctgataggaatgctttgctgcctgtttctttatatcatagacctcatccttgaatatgagtccgttaacatcgtttgtcgccttcatatacagcacatctctgtaccataccataatcaggtcaaaataatcctgcaccttaagcttgtactcagctatctgctttaccgctgcgcccagctcgtacaaatctatgtcatcgaggcgctttataagtgacagtgctgactcctttagctcgttgaactcgtctgatgaggcgagcttaacagcctttccgacgatgccctgtgcaaatgcagcactgatatctgcctgataatccggaatatgcttttcgttcatcaggtatgcctttatcacctcgtcctttaccgacttcatattgagtgtgatgcagcgcgacctgatggtctgcagaaagctgtctgcgttggtggtgagaagcatgatgaccgcatatgccggtggctcctcaatggtctttaaaagcgcgttctgcgcctgctggttcattttttcagcctcatccactatgtaaatcttgtatttactgctgtatggctttatcactatatcgttgttgagctgtgttctgatgtcgtcaaccgatatgttgttgggcttttcatgactgacatatatgatatcaggatgattgtggtcatctgcctgatggcacgatttgcactctccacaaccgtctgtgccctccttctcacactgcagtgccctggcaaatgcctcggctatcatcattttgccggacagctgtggtccgtttattatatatgcatgtgagacctttcccattgatatggcattttgcagatgctctattatctgctcatttcctactatatccttaaatcctgccatagctgctgcctccgttttagtctgcctgtgtctgttatagcttttatctcctacgtgagtatatcaagcaacagtccgcgtatctctccgattcttgccagtatggacagatgatccttctcatcctccaccagctctgatgccagctcatccagattgctgtctatcagtcttattataccataaactctgtgccttcctctcctgtcgaggaaattttctctggaaaatttatgggatctgtagaccacctcatttaaaaaatcctttatgagcccgcgatatcgcttcatatccctgatatccatatgctcggctattctgttgccctgtgctgtgatatcctgcatcagcgcatctacctttgcctggagatcagcgtctgttatggcgctggccagtgtgaatttgaacgagccgtcaccggcctgtgttttttgtgcatcaggaacctgtgtcacctgatttacttcatttactctgactgccataaggctgcctccttattcgtttcctgttacacttatgtgcaagccgtaaccattttcctgctctgcaattagaaactctgtcgtatgtatgctgaaatctcggcaagcacagtatccatatcatcatttatgaagcgacgtgtaatccccgcctcatgcagcttctcctcagagaaatctgatgcgtctgccagaaaacggcggcacatctcctcatatttaggcacctgctgccccttttcccggtgaatggcgcgtatcagacggtcgccgtcctccacctccacatagattggcagtaccttgtcactgccaaaataatcgcgtatctttgtaaaagactcgagtgttccgactgtcagatagcttttgcagcgaagatctatatcatcatcgtttaccgtgaaatacttccacacgccgtacactgtattgtactcgcgaagctctatgatgcgcccctgtgcactgagcctttttacatcctcttcattgcagaaatgataatccttatcctgtgtctctccgtcccttatcgggcgcgtggtatacgggataatcctgctaagcatgagtgaatcatcctgcagtattttgttgtatatagtgtccttgcctgatgcgctttttcccatcacgcagaaaatcttacccatctgtaaacctcttatattttaattaatgtaagcatgacacatcagcttttttctcagtagttctgaatagttactatttagtataaatatgattgtttgctatgtcaaactgttgcttacagcaccgcaacaaacttccacatattggcatccggatcaaaatacaggccatccacttcaagacctgaatttacagcctttattacatcatctatgagcttgtcgttcattatctctcccggcaccacaagcggtatccccggcggatatatatttataaaggcaccgctcaccttcccgcttgccttaaaggcatagaccgcctgatggtctgcatcatatgcatcatacatttccattacggcaggcagcttttggtatatagttgtatccattttgacaggaaagtaaaattgatgtaccacaccctcctgttttaatatatcataaaactcttcaaaatcagacttatatttttcgagctggctgtctatttcaatcaaagcatccgcaagcctgtcaaagccctcatccgtatccatgacagatgccagcgccagtacataattgcccgccgccatctcaagctgcagctcatattttttgagcagaagctcaagcagcgtatgtccattcatagcctctttcgtaaatataataatctttgattcgtcaaaatcatatgcctcatcagcagaaaaatcactttttctgaccacgttcagatgcgaaagtccgctaaccttctgataaaatctgtcaagtttgctcctaagctgtgcaaaggcagtctctttattatcgcgcacatagtgtatgcagcgctctatgcctgtcataagcacatatgacggtgagcttgtctcataaatgccgagaaacttctccactgcagcttcacgcatcccaccaagcagcaaaagcgctgtctgtgtaaatgccggaagcgtcttgtgcaggctcactatgaccgcatctgccccgagcgctatggcattttgagggaagccgcctccaaagccaaagtgcgcaccgtgtgcctcgtcaactatgagtaaagctccatgttcatgtgccacagatgcgattgccgccacatcagaaaccacaccatcgtatgtaggcgaggttatcacaaccgcttttatatcgggattttcatcaaatgccgcccttatctgtgcctcggttatctgcccctgcagccctgtccgtgtaatttcagggtatgtaaacaccgggtgaagctgccttaagtaaagcgcatgatacaccgccttgtgacagttccttgctacaagcaccttgtctcccctttttgtggccgcagatattgctgccagtatgccgcaggtgcttccgtttatgagaaaatatgcacgctttgcaccgtaaagtgccgctgcctcagcctgcgccacctttataatgccctcagcgtggtgcagattgtcaaaattgtctatctctgttatatcaatagcatacgggtccagccctgcacctatatcattgccacggcgcttatgccccggcatgtggaatggataaatatttgattgtgaattatttatcagttctttttccatttaagtacctatatatcctttttagcccagaaatcttccaagctccggcatccagtcatcataaaatatttcatcgttgcagaacgcgctccagaccggtgtgatgaaatcaagtatcaaatcaagtgtctcctcccagcctgcattcgcatatgccctctgctgtcgtgtcagcctcttacaatacctctcccagcgccttctcatataagcatagctgcgatagccatacacctgctcaagccggtgcatgctcactgtcttcggcttatttttcgctctgaccttaaaaatatcaattatctgccttccgctgaccgaatatctcttaagtatctcatatgcatcaccatatggtttcatatcgctaaccagctcaagcttatccattatctcaaacagctgttctccgagcctggattcaggcgaaaaaatacaaacatctgcgtctccataaaagctgttcataaaaacaatatttttagtcatgggaactcctgcatccgcttcattaaggcgctcaagcctcactgcaaacggtacttccccgccatcacacatagcgcttagattccacgtgtgtatcagcggctgcatatcactgccgtccggttcattatctgatacctttgccgtctgcttagataattctgcattagtccataccacatcactgtgactgttaagtcctgcattgcctataatgatattgcgcagtacatcgaacggcgtaccattatcctctgccctgccaccggggctgccatatacataataaaacgccagcttttctcctgttacaaaatacggcttttgaagccacagcacttttcccagaccggcattatttatgcgccagagaaaatcctgcttcacgtactgccataacacatcgctgtacgataattttttctcatcgcttatatgtcttaaatctaccctcactacaaccatactcctatgaagctttgcaccttctttaccacgcgcctcgcccttgcgtaatccatgagcacggaaatatccttgtccgtatccgctatgtacgactgtacagctgccttgaaatcattgcggtccagtctcgactcatacttcaggcagtcgcatatcacacgttctttatcatagattccaaaggtattgcctccaagctcaatggttgtggctccaagcgtaagtgctgtgggctcagtataaaacggaatgattctgggatagtccatcttaaaacgcgattttgatgtgtttttgtccacggcaagcgtccatccgtatggcttctcctttatatagccataggcgtaaagtgcactttccatgcaaagcattgcatccggaaagagtgccgcgacaagtgcatcctcagaaaaatcatccacgcggtcggtgtaatagccgtttctgatgcggacaagcttcccctccctgacaagcgtgtcaattcgcctgtagtctataccaagccttgtaagctcttcttttttcactattccgttgtgcttttccatggcatcagctatgatcgtctgtacctgttgtatattcattactgcttctccatcccttgcttatctgccaaaagcctctcagcatcacgtaatccaagctgatacaggctctcaagcttattaggatccttttctatcttgcttattttaatgtgctccgacggccttaacaccttagcaatgccctgcttttcaagctccttaagatgctcaagctgataattgtacatgatatgcctgtttgaaaatgcctcgtaaaacctcggaaaacgctttttgtatactgatgtaaataaccttggcataggtttttttatatagtctgccggctttgtcagcacgacaaccactctgtcatagcccatatcaagcatatgctcatatgggatgctgtccgtcaccgcgccatccagataccactcattccccagcttcacaggctttgacactacaggcatggagcccgatgccctgagcacatccatctggtcaaagacactctttatctgcacatattcaggcttacccgtcctgatattcgtcacaaccgcataaaatgggatatccgacttcttatattcctcatcatcaaacgggtcaagctctcttggtacggtatcataggcatatttcgtgctcactatgtttttctcccgaagaagcggcctgatacccatataatttttgtcactgttaaacctcttattgtatcgtataaccctgccacgctgctttgacagcagattcactccaaaaagtgctcccgccgaaacaccgataacagcatcaaagctaatatcatggtccataaaacagtcgagtactccggctgtatacatacctctcattgctccaccctcaagcacgagggcgcatctttcatcactcatttctgcctccatctataatgtcataataaaaaatgtattaatatttatgtcgaccgctgaacttcagattgtctctccttctgcgctgttttctctcaagtttgtgctccctgaagcgctcacgctgctccttcttaatgctccatttgtgtttcaacacatatatattgtctgatattcttctaagcataaaaatgctcagaagaatcactgagataagtatgagcacccagagaaaatataccggctttatccttattatatcactttccacgttctgtctgctgttctcatcaaagtacgacagatcgacctttgctcctgatttcagcagatccacacagcctaccacatgatcaccatacttgtatctgaccgtagcaagagcatccttgttgtcggacttcatgtcagcagcttcccttttaacgcttgaaaaatccgcgttgttcggcaaaacaacatagttttccgacacctttgcatacatgccgtgttcattcatcacgcccagatccgtcgtattgtcagtagctgcgctgttttcattttcagctatgcttagtgccttgaagttactgaaatagtaattgagcagcgtgtttgtgtctgcatactggtcaggcgactgcgcattcataataaccacgcacagcgtcaagccatccttctccgcataagtgacaagcgtgctgttagccactgaagtgtagccggtcttgccgccggtacaatcctgatttacaaactgtgaatacgacttaaatggatgcagcatcgcatgatgattgtacagcggggtatcctcggtatgcttgtttgtaggtggtatgatataggtctttgtgcctgtaatctttcgaaactcgtcattcctgtatgctgcacacgagataagccccatatcgtatgcgcttgtccagtgattttcatcgggcagaccatttgcattgttgaaatgtgtatctgtacagcctaattctttggcttccttgttcatcagatcaataaatgtgctgtaatctcccccaagctttttgcctgtatgctctgctgcagcatatgcgcactcgtttgccgactcaagcataactccatatagtgtctgctccatggtcatctcctcgcccacatccctcttgatgctcgacgaaccatcactgctctccttcaccgcctcttttgagaatgtaaccttctcatccatcttgcagttgagtatagtcagatatgtggtgagaatctttgtgatacttgcaggataatgcttttcgtgtgaatttttctcatagagcaccgtacctgtattgacctccatcaccacggcgcacggtgaatttatctgcggtccctccggccagtacgtgtcatcaccatccgcaaatgccataagcggtctcgcacaaagcgtcgtgaccatagcaaacactgccattattagtattcctgatttttttaaatttataattttatgcttcatatctgttcctattaattctaaaattgggtagctgttcagtactataaccaaaaatgtactatttctaattataatgtatgaaaaacatgttatcaagggcatgtgcatcgtatttttccattttattttgacacccacacaattgtagggtattatctatatgaaattttacgtttttataaggagatttacatgagacttagaaatatcccgggcgccggtgaagtcatcgacaacagcccttattgcataaaggagcctgttgaattaaaaggaaaatggcatgattttttaggaaacaataatccgattcatatagaggttggtatgggaaagggcagatttctgatggatctggcacggcttcatcccgagattaactatataggtatcgaacgatataccagtgtgcttcttcgtgccgtacaaaaaatgcaggaggacgagctgccaaatgtgcactttttgtgcattgatgccgcaactcttccggatatttttgaccgtaatgaggttgaccgcatttacctgaacttttccgatccatggccgaaggacaggcacgcaagaaggcgcctcacctcaagcgaatttcttgccagatatgatttgtttctcgcacctgacggacgcatagaattcaagactgacaaccaggacctcttcaccttctctctggaagagattgaaagctctgataaatggcacctcgacgccagtacacgcgacctgcatcatgatgccgcaatgaatgagggtaacatcatgaccgagtacgaggagaaattctctgctgtcggaaaccctatctgcaagctgattgcttcaagataatgcgacatatctgtcgttaatcgcatgatttatatagtcaaacatgacccagcttttatgacattcttcagatttttctgaggaactgtcatattcgtctctggcatcgttgaaatatctctgcgcttccttatctcttcccatcttgctatagcttgaaccgatattgctgtaaaccatagccttaagatctctcgagcggataatttctgccgtggcaaggctctccagataacattcaaaggcttttgactcatcgttctcaagctcatataccaatcccaggatattgagatactctgcatatttttccacgtgaccggtgctcttcaagcgcgcaagcgctttctttatacgtacaaccgcactgtcatagtccttctttaccacgtcatctactgcaattatcatttcgttatccgctatattgtctgttgaatatttgtctaccccattcatcatattttactccgaccaaagcatctttccaaatgttacttttttcctattcaacagtataaacttattatttcaaaatttcaatattaatttcactttttatgggactatcagactacccaaaaattatgcaataaaaaagcaccaaccctatggctcatacgtccataaaaccggtacctttgagtgcgcctccaggggctcgaaccctgcacaccctgattaagagtcaggtgctctaccaaatgagctagaagcgcgtttattaatttgtttgcgttttccttaacgcgaaatttattatatagtatagtttatagaaatgcaacacttttttttaatttttttaaatttttttagattttttgtaaaacagttgattttacaccgttttaagctatattattttctatatacagagactttttattccagatttcccatccaaagtctctcagaaaggatttactgataatgaaagtagaagaaagattattaaaatatgtgggctatcacaccacatctgatgaagcaagtgataaaataccaagcagtgacagggaatttgcactcgcaagagagcttgagtcagagcttaaggagcttggcttatccaaggttgtgctcactgaccattgttacgtgtatggtctgctgcctgccactgccggcatggagcacaaaaaagcggtcggatttattgcacatatggatactgcacctgatttttccggggaaaatgtcaagccacagctgctgcatcactatgacggaagcgatgtgctgcttagaggcagtggcgaatacctgagagtaagcgattttcctgagcttaaaaccctcaccggacgcactctcattaccacagatggcactaccctgcttggtgccgatgacaaggccggtgtggctgagattatgactgccttagagcagattatcgcagagggtactcctcacggcgatatctgggttggatttacccccgatgaggaggtcggaaagggtgcggatttgtttgatctggactatttcgaggcagattttgcctacaccgtggatggtgattacgagggcgaggtggcctatgaaaactttaatgccgcaagcgccgaatttaccataaagggcgtcaacgttcatccgggcgaagcaaaggacattatggtcaatgctgctttggttggctgcgagattgccgcagcgctgcctgcaaacgagactcctgccacaactgagggcagagagggcttttaccatctgtgtgatatgagcggtgatgtagcttcagcccatctgtcatatattgtgcgagaccatgacaaggctctttttgctaaaagacttgatactctccgctctcttgagatagagatgaacaaaaaatatggtgagggcactgtttctttgactatcacccactcctacgagaatatgctttcaatcataatggacaacatgtacattatcgacctggctaaggctgctatagaggaaaacggccttaagccgctatcacgcccggttcgcggcggtacagacggtgcacgtttatcattcatgggacttccttgtccaaacctcggtaccggcggctacggcttccacggcccgtttgagcacatatcagtggagggtatggagactgcggttaatataatcaaatcaattgtgaagcatgtgctgatgctggctgacgcgtaattttgacacatgtttcagaagggagaccatatggtagtacttgcagcacttatcatttttgcggttgttggtggaatatttgtaaattatcttcgcagaaatcaaaatgatatcggcggaggaatgggaaaagattacatgaaagagcattggggaatcgatgacgacaagtaatcaaaataccgggcaacacattttgtgtcccggtatttttttatacaaccatcgtaactattcagaaccactgagaacaagaaaagctgatgcgtcatcagaaaagcctgactttgctatcgtgaatttgcaggctccatgttcacagagcggccctttatctttgcattcttcatggcattgagcacttccttgccatactcagccggcacctcaacaaatgtatacttgtcgtacatgtcgattgcaccgacaagcctgccaggcatgcctgactcgcctgcaatggcacctaaaatatcgcccggctttatcttgtccttctttccgacgttgataaacaggcggaccatgccatcctcagctcctgtattgtggaaatcataattgtcctttgattccgttgtggatatttcagatgcgcccatagcctggtataaaaatgccgctgctatatccattgcagtgtaatctgactcatttatctgattctctataatatcaatgaaacttgtgagattttcctcatctataatggtggaaatctggtccatgatcttttctgccctgattttggcaacatcatcagatgaaggaattggctgtgcatagatttttgtcttgcagtagcgctgtatgtccttgagcttataaacctccttgccctttacaaaggagaatgcctttccacagcggcctgctctacctgtacggccgattctatgtacataatactcgtcatcctgaggcagatcataattgaaaacagcctccacatcatccacatcaattccgcgcgctgcgacatccgtggcaataagaatatctgtctttccgtttctgaagttcttcatgacacgatctctctgcacctgcttcatatcgccatgaagtccttctgcactgtagccgcgtccgcaaagctcatatgccagctcgtcgaccatcttcttggtgttgcagaatacaagtgagagctttggattatagtaatccaacagtcttgtgagtacatctatcttgtccttgcgcttcacatcatagtaatactggtcgatatttgcgactgtcagctcttttttcacaatcttgatattgatagcatcatgctgatattttcttgtaatttccaaaataggctttggcattgttgccgagaagagtactgtctgatgctcctgtggcaggtattcgagcactgtctcgatgtcctccctaaagcccatgttaagcatctcgtctgcctcgtcgagcactattgtctttacatggtcaggcctgattgtctttctcctgagatgatccataagacgccccggggttccgataataatctgcacaccgcccttaagtgccttaatctggcggctgatatcctgtcctccgtataccggaagtaccttcacaccatgcatatattttgcaagcttcctgatttcatctgccacctggatggcaagctcccttgtaggagagaggatgataacctgtgtcttgtgacttgatgcatcaacgctctcaagcaccggaataccaaaggctgctgtctttcctgttccggtctgcgcctgtccgattacatccctgcccgaaagcactgccggaattccctgagcctgtattggagttgcctcctcaaagcccatatccttgatgcctcgcaaaatcttagggtttagttctaattcgtcaaatctgattgtttccatatattttttatatttcctttcaaaaaaataaagtgtgcatatttttataacatgcacactttaacatatttgtgagataattacaaaatattatttctacatgctgctaaataaagcggctatctcatccggtgtcagattacgatttgtgttattcaaatctacaaccggagacttggcctcttcacttgcccgggtctcggccggttctgtaa

SEQ ID NO: 1472 - DNA, 937 bp, Unknown
  gut microbiota DNA sequence
gagccagtagtttaccattggaaatataaaatggatgaaatagaaaagaaaaagtgctgtacagagctttggatgccttttagtgctcattaaaaagtgtctggaagctgtgcacagcacatgaaaaacatggctgagaacgggaaataaagttctctgttttgcacaaaaatatcagaatcaggtagaagtgtcaggtgttatatcatggatgacaggttcaatggcaaatccctgcatcagccagtggaactgctctgcggataaagacctgagatcgttggaggaacgtggccatgtgaaatgaccagattccacgcgcttgtaaaggagcagaaaaccatcaccttcccagagtaatcccttgatcttggtggaagacctgccacagaaaagaaaccgggtattaggcacaaacagattcatatgaaatctgcgttcgatgatggcagccagcgaatcaatcccgaagcgcaagtctgtgtaaccgcagacgatgtagacaccggcaaagtaactatgattagcatctttaagcatggcacaccgccttgataagtttaccgaggaactcttcggaaaccgctgtatctatttcgatagaaacaccatttatcaacatttttacattagagttatttgagcgatttgcacgaatggaaggaaatgcaggtgctgttgtttctaacgaagagccggagtctgagcaaacaggaagtgagagtggaacaatatctggcagggcctggtcaacaacttcttctttgagaagatgcttccagtagttataggtgtggaatgaaagatgattctgttcacatcattgtcggacagtaagcccgctggctttctgatctgcaaataggatggcccattcctgaagatggacctgatgaagtttttgtcttgcattcatgagatgatcctcctgaataaa

SEQ ID NO: 1473 - DNA, 741 bp, Unknown
  gut microbiota DNA sequence
acattttataaaaccaaaaccacatatgctctgttaacgtatcataactgtatatttttttagcttccttagggaggcttatttctggtgtcataatacaggactgaattataaattctatgtgtttctatgtgtacatgctatcctattataaatagagtgtcagaattaaaagtccatatagagttgacgcgctttgttcaaccagaaaaaatcgaaattgatgcaaacgaaagggcagttaatgaaaagtctcaatactgctttttcgtttgcaccaccttcgattcttttcttaacgatttgttagattcataaaacactattttccataattgtatcataatcacataatccggaaaagtaattatttttttctttgccaatccttttactatcttatcaaaatatgcctgcatggacacaataatcgagaatccccttgatattctcctcagtattttggtgctttctttatagattccgtccctgatactgtattgttactacataaacgattttgcgtggttcgtcaatgcgattcattcttgcaaatttatcatacagttcactgctcattgcaaccaagtcgctatatccgtttttggtgataaaaataggctcctgttccttatgtgcaatattggaaatctcggttgtattgcgtaaatccttaataggcataataagtggcatgatacttcactcctcctaatatataagtgtagggtttagataccc

SEQ ID NO: 1474 - DNA, 300 bp, Unknown
  gut microbiota DNA sequence
tggcacacaaagcaggcattatcagataaagcagcaacggctgcacacttgcattatccgcacctatccatttctcatatgcagacaatggatacgtgtcgtagtaaacatacatcctccatatccacacattttccataaaatgccatacacatattgcaaacgcaacacacaatgtggcagcaaataatctatttctaaaagcacgttttatttcgagtttaaatattctattcataactacagctccagtttaaaatatttcttcaccgtatcattggtttttgaatctataccctc

SEQ ID NO: 1475 - DNA, 1707 bp, Unknown
  gut microbiota DNA sequence
attcttttaaaaccttgatttattgaaggtttgcaaataaaaagagcattgacctcccaaaagaagtataatgagttcaccacaaacaccattatcaacaaggagacaatgctcatggacattatactttatttacttctatttattcaataccaacataaacaaatctgctggctttttaattttatctgcagatatattccccttaagcagtgggtcttcgatgactcccattctcccaaatatcaaaaattcaagattgataagctcccaaaaataatctattacgaaaaatgggattacaaagactacattccttacctcgaatggaagtatggcaagaaaatcaaacctgtcagccgccgttctgaatgtgatattgatgacaactgtacctgtccacgttgcaatgctccaaagccttatctctacaagaataatggttcaaaaggacagattctgtgcaaagtatgctccaccgcattctctccggaagaaaaccgtttttcaaagtcctactccctcaaatgcccgcactgcaatcactcgctggctcataagaaagaccgcaaacactttgttgtccacaaatgcgtaaatccaaaatgtccttactacctccacaatctaaacaaagttgataaaaaagaccttaaggaggactatggcaagaacaaatataaactccattacatctaccgggaattccagatagatttctttcgcatggatttaaacactcttcccaagaatgcttcttccctaaaattcagtaaacatgaccagcatgtcatgtctctttgtcttacctacaaagtgaatcttgggttatcgcttcgtaaaaccgctcaggcattgaaggacatacacggcatcagcatctcacaccagcaagttgccaactattgtaaaaccgcctctgcctgcataaaacctttcgtagacaactacgattacaaaactggcaatgtatttactgccgatgaaacatacatcaaaatccgtggtatcaaaacctatatctggtttatcatggattctgccaaacgctctgttatcggctatcaggtatctgataatcgtggtgttggtccatgcattctggcaatgcggatggccttccggcatctaaaagaactgcctaagaactttaagttcattgcagatggctacagtgcatatccccttgccgcccagcagttcttccatgaattcggtgataagtttaagtttgaaatcacacaagtaatcggactcaccaatgacgatgaggtttctaaagaattcagaccttacaagcagatgattgaacgcttaaaccgtacatacaaagcttcctatcgtaaaaccaacggctttgataacatcgatggagccaactatgatctcgccctctgggttgcttattacaacttcctaagaccacataaacacaacaactataaagtcttaaatgaagtcgaaatgctgtctcaggctgacacgatgctgggcaaatggcagcttctcatcttccttggtcaacagacgattctgaacctgcaacacggcgaagccgctaactgttcttagattcagagccagaggtaattatcccagccaccgcaaagcggcgtgcccttgatggcacgaaaaagaactgctacactgctgtaatcgacggaaaaactctaactgttcttgagttcttcgccgtcggtgattaac

SEQ ID NO: 1476 - DNA, 31952 bp, Unknown
  gut microbiota DNA sequence
ataaaaggcataatcatagctatcgcttcggttatcattcccaaaaaagctcctattaccgaagcaaaaacaatcggatataggagcgagaacaaacaatgaactgcatatgcatacagttcacgttcgtcagtggtaatagctttctgtaaaattaaccaatctgctattttatcactcatattatttagttttccttttaaattttgataatccttttggactttcaggttcatacatcacaccacaggatgctgagtttgcttctattctaagcatcgtatcaagtgtacctttgacatgtgaaataatgttttttcttctgtctgtcgcaatcttcattagttgcctccttttgtaaatattcatcaacttctacttgccatcatcttctcataaatgatgataaggctttttttataataaatctatattgtttactctaaacagcatttttctcttaaaattgtcgtaatatggctaatatttgtcgtttttacactgtcccgcagattttttcattcatacaattataaattatctatattacagaatatatctgcattactttgttcattattatttaaataactgctaccatttacataaaacatgaaaggaattaatgatcttggattttgattacattactatgggacaacgcattaagcagcgtcgtaaagaattaaatatgacacaagcagattttgctgaaaaattaggtatctctcaaaatcacatttctgcgattgaatgcggctctcagcatctaagctttgagctttttgtttctatatgtaatacattatctataaatcctgattatttaataaacggatgtacacatctctctaacactccacttcaagtgatggataatcttactctttgtgatgatacttccgttgagcttacacgcagatttacagaactgctggttgagctttatccgaataaatcaaaccaaaaatagcttatttatgtcttttcgtaccgtcttcttgccttaattctcatactcttctataatgatatcaacaattatgtttttataggagattttttaatgagaatacttatttgtgacgatgatttatctatcacgcagtcactatcccaaataatcaaaacatatttcaacaaaaagaaagtaaataatctcgatattataacctttaatgatggggacagccttctttctgataaatcccaaaaagatatcgtctttttagatgtggaaatgccaggttttgacggcatctatgtgggaaatgaactaaaaaagcagaatgaatccgttattatttttatagtgacatcttacctcgaatatctggatgccgccatgagattccatgtattcagatacttatctaagccaatagataaacaacggttattccaaaatttagatgatgcacttgagctatactattctatcaatcaaaaaatcgctgttgaaacaaaatccggagttacgtctgttttgacttgcgatatcgtatatgtggaagcaaagggtagaaaagttatagtacacacttctacggctgatttggattccactcagacacttcaattttggatagatcatctgccacaggctaccttttttcagtctcaccgcagctatattgttaatatggctatggtaacaagctttgatcacgagctgatatacctttgtgatggtcagttcacagcgtatttaacaagaagaaaattcaccgaatttaagaaagcatatttgatgtttatggaaagtaagaggtaagtattatgaatactacaatttattattttttaatttatattgcagaagctctgatttgtattcaatatacttctaatatattttcagatcgcttttcccattttaaaacttttatcgcaatttttattttatactcaacattattcataatttcacttttacaaaatccatatattaatgtcatagttttttttatttttcatatattcattttctgctgcttatttcaaaccacaaagttaaatgctgtttttcactcacttatccttaccattacaatgatctttacagaactcattgttcttactatttattcaaatataagtgtgcatttttataccgaaatttatatacatcacattactctcgtaatggctataatcagcaaattactatattttatcatcacattttttatatcacataccttgttaaaaaatagcaacaataccataccattttcttctagagaatgttttctcttatgtataattccaatattatcattatggatatcttttacttttatacatttgtgtcttacaactccattgaaaaacaaacttgatgcaatgataagtataagcatgctttttattctacttattaatattctcatttttggactttttgaacatattaagcaaaaaaattccgaaatagcagagctcacacttcagaaccagcgtgatgccgactctgtagaatactacaaagccctcgtgtcacaggatgagaaacaaaaagttctcattcatgacatcaaaaagcatctcaatgccatagcctcactgaacgaacagcacgattctgaaaaaatcgcagcataccttacccacgtactcggttcttctgagttaaagcactccgtgcgggtatgcgataatgaccttttaaatgcactgctctgccgttaccagaagatttgtcttacgaaaaagattgcgctgcatattgatataagaagtaagtgtattgatttcgtgacatatgatgatctcagtgtacttttcggcaatctcatggataatgctgtagaatcagccgaaaaaacagttaatccttttatagaactcaatgtttttcagaaagagaaaaataacatgaccattatcacgctcattgattcctgccgcgtaaatcctatcgacaagaatggcaaccttttaccaactaaaaaaccgaatccacagtttcatggattcggtatgcgtagtatagaaaatattgttaagaagtataatggtgaaatgactttttactttgatgatcctaccaagacattccatacgattattatgcttcggcactgaaagttgctgcttttaacgattttttatcatctggagcaaatattcacatacatcaaagctctttgcttcttgttctgtttcccgcttctttaatgaatcatatatttgctccaataaataatcagcattcacttttttgtttacaaagctattttcatcagtagaagccattccataaccggcatctgctttcattgttttataggcagaataattatttatcgaattaggcgcagttcttcctttataaccctcatatgacataagcgcgaacatttccagatccgatgcattcgatgtatcaacatcatttacatgcacatgatatacttttctgttatcaccatgtccatatgccacttgaacaacaggatcatcctcctttgatgttttcacatatgaagctaaaactatctggctttctgtatcagacagtccaaaacttgtcattccgatatttttcagcttgtcatttggaatttccttatccggtgacatctgttcaactgcatttttattatttaccaatttattgtaaagagaactgttattttccgacaacatattcatgtatatttcagtaagttcactctgcctctccccacatttatttaaggaattttgctcactatttcctatttcgaactctatatccattttatcgcctgttgacttcttattatactttgaagtatatgccattgaaatatttgttcccacaccgtttaacatatatgcctcctatctgttttaccaataatattacacttttaattattagattcattgcaattaaattcttgccaaaagttccgcaggtgtaagtgccctatttaactaattatagtataacgttaatacgctatttttcaagatatatccccgttgtaacattattcttgatgttttctatgtattttcaacattattcttgatattttttgctgtgtttgtaacataattccgtacatttttccaacgatgaatttttattttcaaaaagccgaatccacactcccatggattcggcttttgtatatacacttctattttctattttgtatgaagctgtcaatcatcgcaatcacaccatctacaccgagctttgccacattcaggcacaggtcgtagttttctgcctgcccccactcctgtccggtatagtatttgtgataggtctttctgcggtcatttgtctcacgcacaacagtctttgcctttctcactgagactccatgtgtatcagccacagtatcaacgcagaaggcatcattcgctgtcaggaaaactgagacaacatcatctcttccctgaaaggcaaagttagcacagcgtccctgaatcacatatccctcacagccgtcctcaagcggcagcctgtctataaatgtaagagccctcgccggagtatcatgcagcacattatcctcctccgtctccatcacaatagagtaaagcagggaattaaccggtctctcactgtaaaactcctcatactcatcatagcagcctgcctctttggcaccggccgcaatagcctctctgtccatgaaatgtaaatgatatttctcagcgactgctctaccgatactatctgcatcgcaaccgcactttcttgcaattgtaattatcatataaatatagctcctttctgtgggaaaagccaacgcgcaggaagcgctcagacaaatcaataaaagtttgcaaacaccgatgcaaacaccaccgtaagaattcctgccaccgcgatagcaagagagctcatggctccctctatctcgcccatctcgatagcctttgctgttcctatggcatgtgatgacgcgccaagcgccagtcccttcgatataggctcagtgattctgaatattttgcaaacaaactctccgagtatatttccaatcacacctgtcacgacgataactgcgacggtgatggtcacatatccgccgagctcctctgatacgcccataccgatagctgtcgtgatggactttggaagcagtgtgacatagtcctcgtgtgaaagccccataagcactgacaacacaagcactgtcacaagacttgttatgacgcctgccgtgagtccgagcgcgactgctgctatatttttcttgagcagtgtccactgctcatagagcggtatcgcaaggcataccgtggccggtgtcagaaaccagctaaggtacgatgcccccttattgtatgtgtcataatccacatctgccacaacaagcactatgatggtcagtactattgaaatgagaagcggattgagtattgcaagcttaaactttttctttaaaagcatacctagcagatatgcaaccagacttactgtgacaccggcaaaaagcgatgtctgaaacaaattatccattatgattatcctctatcttatttattttctccagcatcagccctcttgcgcttctgcatacggattacgagctgtgaaacatgtcctgtagcaatcattacagtaagaagtgccacgaccgtgattacaatcaccggtacgagcaccggcttaagattgccccaggatgacataagccccactcccgcagggataaacatgacaggcattatctctatcatgaatttgcctgcactccttacagagttaagcggtatcaggcctgtcagcagacctatgaaaagtataaccatgccatatatgctcgccggaacaggcaatggcagtaaatatttgagtatctcacctacaaacgaaatcgcaagtatgatgagaaattgctttaataatttcattttatattgtatctccgttatatatatttcgtgactatttgtaactgtttatctgtgttccctgaccatcattgtacatacaatagcaagcagcacgcttgaagcccatatagcgcgtattcctatgtgcagtgagcacactccgcctatacctgctcctattgcaaatatcagaataattccatagtagtgcgcggtctttttcagtgccccgatatttctgtcacgcagatatattgacaggctctccgtgccgcttcttaggttgccgatgcacatggtgctggcatagccgtagccgtttacctttctgaaggactgcacctgcatagaacagctgaatgatacaagcattgtcgctatcatatcgtacctgtgtggtatgaagccgaccacaaacagtatgattatctctatcatcaccactatctgacgccagtggatgcgctttgccttcttatatctatgcccgattctctctgccacaagcacaccgagtgcaaatgaaaggattgggaaaagatacgatagtcccttcatccattcacctatcatcagatgctggctcatcagcactacgtttcctgtctgcgcattcgagaacaccttgtttctcacgttgtaggtgtaggcatcctgaaagcctccggaaagtgccagaatcgcactcagcaaaaaggtctctgatgtctgaatccttattttttctttttcagtcattttttcgcctctttttctcatattcgctgttagctgccacaccctcgtgtgacccacagcaattacatatttacagcaatccacacggtttattattatagaaaaaaagggcggatatttcaatacccgccccaaatatacagtgtattaaattttgcacaatacctaaaatatatattggatatacataatagatatacatcatagctataccagatacttttcttcaaactccgataccggcaccggctttgagaaataatatccctggaactcatgacagcccatcattgtgagcatatcaagctgctttttcgtctccacaccctctgtgatgacgtccatgcctatcttgcctgcaagcgctatgatactctctaatatatcctgtcccttgacctcgttctcagatttgcgaaggaagcccatatcgattttcagtacatcagcactgatgtcctttagcatgttgagtgatgagtatccgcttccgaaatcatcaatctccaccctgaagcctacgccctgaagcttgtggataatattcatattcttctcaaaatcggtcatcagcgttgtctctgtaatctccagatgcagattggacgctgctatgccatatttattaatcagccctgtaaaggtctcatatatatctataatataaaagtcctttgtagatatatttacagatatatgatagcttccatagcccttttccttccactctacaagcttttgcgctgccttttcccatatatagaggtcaagcttgtaaatgagacctgcgttctctaaaatatcaataaaagcatatggtgtcaggatgcctcttgatggatgaacccagcgcaccaacgcttctgcgccacttgcaacaccatcacggttcacctgtggctgtaagtacatggcaaactcatccttttgcagtgccggctcaaattcaccgagcagacgtctctgctctatcgatatctcaagcagatgctcatcatagtatgccacacagcagtcgtaattattctttatggtgtctgccgctatattagccttgtctaccataatgctgacagcctcatccctgtctcttatctcatacacacccatgtatgtatgcagatggaaagaattgcccgaaaactcacgctgcagctcttttattgaatctgccactcttttttcatcaaactcttctctcggcaggcacagcgcaaagcggtcattcataagccttgcacaaatagttctctctgatggattggaggacatgagcttcgcctgctttaagagcacctgattgcccttctccattccaaatatctcattgatgaatttgaaatcctttatattgctgcaaatcaggtaaaaggttgtgtcatgataattattcaccatatcatgcacatcctcataaaactgatcacggttcaaaagtccggtcagactgtcatgcgaggccttgtacttttcctgctcccacgacttatacatctgtgtacgatcattgtatacaaaataatcacatataacgcgatttctctcatcatatatgcgcttgtaggcaatctcaaaatagtgcttttcaccgtttatttcaatatccgtctggaaggtcatgctgtcccttctgtcatctcccagcttttccatccactgactatatttactttcataaacagacatattgccgccatgcctgtaaatagcctccatcagttcattgtaatatatgcacctgccctttctgtcatagcagatgataccattattcatatcgctgaccacaagagatagcatattttctatgagctcattcggcacatatctgtaggtcaggtaatatataataacagccatgataccatatataatcatggtgaggtcatatatggagtccgagcctatagtagcaatgtcaaacgcgaagccgacaaaaataaccaccgctatagcctcatatgcctccctgtacatgcgcgatgatttgataatcatatacagatatgtaaaaataatcagaatcacaaacgcatatgtgaatataaaatgcagcctgtaccataggctgtcattattgaatactaccttaatattctcagcttttatggattctatatcaaaaatcttattagtccaggtgttctctataagcatatatgtgtccagcaccgcaaatatcatggaagcagcctgcactcccttgaaggtctttacagcacctgtataatactgtgtataaaacataagagcgatgagcatccagtcaaacagagccatagtaagccccttcgcaagtactgtaacagtgtgccccggcacaaatgtaaaaacaaaaaagactgtagcgcaggcaaatgccagtgtctcatatatacacacacttttaccaagtctgtcatgttttttaaaggaaccgattgcgcaatgtgcaatcaacattgcttccagcaatactgccagtccatatactatcctcatattctcacctgtcttctatgaccatattactaaccaatataatgtcattgtaactcatttcatgtaaaatgtaaacaaaaaagaggttgtggcaacctcttttttgtaatttattaacatttattattttcctgaagttgctttcagtcgtgtcatggcacgggcaagcgatgctcttgagtgatagtattcctggatactctgcttctggcgaagctgctcctcggctctctcctttgcctctcttgctcttgctatgtcgatttcctccggatgctcggctgtctcgacaagcagtgtcacacggttgttgactatctctacgaagcccattcccactaccgcgtactcccagctgtcactgccctccggctgaaatctcatctcgccctcatcgacggctatgaccatatcctcgtggtgggcgaggatttccttctggccatcgaactcagggactattatggaacgacatcttcctgagtaaaacactctgttagcagctattacctttagataaaatgtatttgttgccatacgatttgtccttccttatgcttttactgctgcatagtctttgctttttccttgacgtcctcgattgttccgacattgaaaaatgcgttctcaggatactcgtccatctcaccgtctatgattgccttgaagccccttatggtctcctcaaccggcacatagacaccctggatacctgtgaagttctcagcaacgtggaatggctgtgagaggaacttctggatttttcttgctctgtatacgagcaccttgtcctcatctgccagctcctccataccgaggattgcaatgatatcctgcagctccttatacttctggagaatctcctgtacctttcgtgctacctggtaatgctcctcgcctacgatatcaggctcgaggatacgtgatgtagactcaagcgggtctactgccgggtaaataccctgttcaacaatctttcttgaaagaactgttgtggcatccagatgtgcgaaagttgtagccggagccgggtctgtgaggtcatcggctggtacgtatacggcctgtaccgatgttaccgaaccgttctttgttgatgcgattcgctcctgcagctcacccatctcagtagccagtgtaggctgataacctacggctgaaggcatacggcctaaaagtgctgaaacctctgaacctgcctgtgtgaaacggaatatattgtcaatgaaaagcagcacgttctggtgcttctcatccctgaaatactctgccattgtgagtcctgtctcagctacacgcatacgtgctcctggtggctcgttcatctgtccgaacactaaggctgttttttccagaactcctgattccttcatttctgtccagagatcatttccctctctggaacgctctccgactcctgtaaagattgagtagccgccgtgctctgttgcgatattgctgatgagctcctggatgaggactgtttttcctactccggctcctccgaagagtccgatttttccaccctttgcatatggggcaaggaggtcgatgaccttgattcctgtctcgaggatttcctctgcagggttctgctcctcaaatgttggtggttctctgtggatttcccacttttcttctgtatcaggctgtgctccgccgtcgatagcctcaccgagcacgttgaacagtctgccgagagtctgctctccgacaggtgtcttgatgccggcgcctgtggctgttacttccatatctctgtgaagtccctcactggaagcaagcatgatacagcgtactgtattatttccaatatgctgtgcgacttccatcacactttttttgtcaccatttaaaacttctagtgcgtctctgattgccggcaggttctcatcctcgaactctacatcgacaacaggacccataacctggataatttttcctgttttcatcaaaaagcctactttctctttttcttctgcgatttagcaccggctattacctctgtaatctcctgtgtaatcgctgcctgtctggcacggttgtaaagaatgtcaagctctgcaagcatgtccctcgcactgtttgatgcggactgcatcgccatcattctggcgttctgctcacatgaaaatgactctacaagagcaccgtagacaaatccaacaacgtagtttggtacgatacgatccatgactgcctcaggcgatggcttgagtgccagctcctccctcggtatgtctataggaatctgcacagtgaagtctgcctttttcagtggcagaagctgtgacatctgtgtttcctcctgaatcgcatttatcatgctggtatagataatataaacttcgtccagctcgttatgtagatatagctccaaaatttcttctgcaatatttctggcacggttgagtgtcggattctgaactgtgtagtggaactgtttttcaatctcaattccacgctgttcaaaataatgacgtcccagctctccgagtacgaaaagtgaatggttcggatgattctttaagtgctcctcagccattttcaggatattgtggttgtatgagcccgcaagtcctttatcggctgttattacgatatatccgacctttctgtcctcaggcagcttatcctcgttggtcttgaaatagatgtcctccatatcaggcagatgcctgagtattcggctcatctctgattgcagtgtgaagaaatacggctctgtatctgccagcatctttttggactttttcagcttcgaagaagaaatcatatacatggcatttgtgattttaagcgtatcattgatactttttattcgatcctgtatttccttcgtgtttgccataatactacctgttaccctttatactcttttactgcatccatgattttatttacgagctcttcatcaatggctctgttctcttcgatcttctgtccgatttccggataagaaagatccatgtatgagaggatatcgccctgatatttcttgacctcttttgtctctattgtatcaaacacaccattgtttgccatgataagtgtcattacctgctcatgcagtgacagcggatgacaaagtggctgcttcaaaagctccataagtgcttttccatgtgcaagctgtgcttttgtggcatcgtcaaggtctgatgcaaactgtgtgaagacctccatctccctgtactgtgccaggtcgatacggatgcttcctgatgccttcttcatggcctttgtctgggcagctccaccaactcgggatactgaaagacctacgtttacggccggtctcatacctgcgttgaagaggttgctctctaagaatatctgtccgtctgtgatagatattacgttggtagggatatatgctgatacgtctcctgcctgtgtctcgatgattgggagtgctgtgattgagcctccgccaagctcatcgctcagacggcttgatctctcgagcagtcttgagtggagatagaatacgtctcctggatatgcctcacgtcccggtgatctctcgagcagcagtgaaagtgctctgtatgctaccgcatgctttgaaaggtcatcatatacgataagtacatccttgccctgatgcatgaaatgctctgccatggctgttcctgcgtatggtgcgatatactgcagtgatgcaggatcgctggctgttgatgaaagcacgattgagtaatccattgcgccgtgttttgtcagagttgacacaatttttgctactgttgatgctttctggccaattgctacatatatacagataacatccttgcctttctggttgatgatggtatctgtggcaattgatgtctttcctgtctgacggtcaccgatgataagctctcgctgtccacgtccaattgggaacattgaatcgattgagaggattcctgtctcaagtggagtatctactgactttctgtccacgatacccggtgcctcattctcgattggtctgtaatcttcctctttgatatcgccctttccatcaataggctcacctaaagcattgatgattcggccgataaagcctttgcctacagggattccggcttttttctttgttcttactactttggttccttcatggattccgtggtctcttccgaaaaggattacaccgatttcattctgacggatgtcctgaaccattccttttactccattatcgaatactacgatctcaccgtacatggcatggtcgatgccgtatattgtggcgattccgtcgccgacgtagattacctcgccggtctcacggctctcggtatcgaagtcgaaattctctatctcgctctggataatggagattatgtctgttgcactgattgcgcccacaggggtcacctcctggtcaattttctttcaagctcacgaagctttccttcgtagcttctgtcatactctgtattaagagtcttaatcacatatccacctaaaagtgtttcgtccactttctgtgtaagggatatttcatattccggatatttgctttgtagcagcgccttggcgtcatttgcttcctcgtcggttgcggcctctgcactgataagctcagctcttatgatatggtttttctcatcccagtatctgtaatatgcctcaaagatttcattcatttcagcggcatatccaagctttaccatttcctttatgaagcttgtgataagctttggctcactctcaaatccgtataccttttctatgatgtcatactttttggtcagcggtataagtggatttgcgagcgtctgtgcaagcttttctgtcacaaagtatactctctgtgcttcctccacatcacgacgctctacagccagcctgtacaaaactattgcattatttactgctgcctgtgtcattagcttcacctgtctttacaatctttctcgctgctaagatggcaagttttgcaatttcagcctcagcggcctttgttgccttatcctgctcgctagcaatgtccgcttttgctttttcaagcatactgtctgcttcctgtctggttctctcaagagccttctcctgctcagcctcggctcttgccctggcatcgagtattatctggtctgcctgagtctttgcactctcgagcttctttttatagtcgctctttaagctttctgcatcgtcctgactcttctttgcttccgagaactgcttctgaatcatttcgtctctctgattaatcacgcccatcacgcggtcaaagaggaatttcttaaatatccagtacaggaaaagcagattgactactgtccatattatgttccatggatcaatttttaacattgctctaccttcctttctgtttcatctggttgtaactgtcagttacgctgcctgattatttaaggaagaggatgataagtaatgcgataacgaaaccgtaaatagctgttgcctctgcaagggcacatcctaaaagaagtgatttagagattttgctctcagcctccggctgtcttgcgattgcgtctactgcgctgcttgttgccttaccgattccaagtccggctccgattcctgttaatactgcgattccagctccgattgctactaataatgttgatgacataatgtgttctccttttcttgcttatatgctttcttttggttagcaattattttgtttcttttgtaagcgaggttacattttccatgcttacgatgtgaaattaaatgatgtggtgtttcatgcctcatcaggtcttcttactcggttgcctccttgatgaaaagtcctgtcaggaatacaaatacatatgcctgtataagtccatcaaagatatcaaaataacaactgaatactgccggaacgattgccggtacgaccatctttaaaagctccatgattacgaatgaaccaaggacgtttccaaataatcgcatacacagcgataatggtttgataaagatctcaaggatattgataggtagtattaccggcattggctctgcaaagcttttaagccaccttttggtgccctttgccctgattcctgccacctcgataagaactatgctcattacagcgagtgctgcggtgacgttcatatcctttgtcggcggtttgaagccaagtaagcctatcaggtttgctattcctatatagatgattactgttgccagatatggtatgtaatcctttcctttttctccgagtgtctcactgaagaaatcattaagaaatttgactcctgcctctacggctacctgtctgcgtccgggattttcaactgaaagatttctgccgagaaaaaagcacagtaaaaataccgctgccattattatccatgtgactactaccgactcgtatatgggtatgcctccgaatatcggtatcttgaataccacgtcacaattgagttcctctaacagtccatctaccagagcatccatctgcgttacctcctttcttttttgctatatgaaatttgatacgcaaattgtttcttaataactcaagatgtgttttgtctgacctttgatgtttgtttgatcttgatttaataagaagcaactatcgttgtacttgattttagtcacatcgttttataaagtcaacgtttcgtttttatattgtttggctggcaaagtttcacattttttagttagctttttatacattttcaacaatttatgtttttatttttgtgcagtttttctattgcgttttggggatgtttagttttattttatttttatttgcgttttattaaaaatttccaaataattcgggaggaatttccctttttttcacagtttttcacaatgcatttgaatttctgtgggggattggctatagtacggaacccgggcggcaggcactcacaggctcgggtgggctacgctacgctgccaagattctgtacgaaattatgcttgcagggtttctttgcttgacgaaaccggcttttatgcgccgtccatggcgcatactaccggtcacaaaaagcgtgaccagtagcaatttcagccatttttaatgcatcagaagatgcatggggctgaaattgcataaaatataggttatggcgcatagcttgacagcatagtgtcaagcttgcgttttcataaaagtgctatttgatatgtttgcccagccgtccttggctgggcatttctgtgcttcgtgggcataatttctacagtatctaggcagcttcgctattcgccctcccgagcctgtgtgtgcctgccgcccgtgttcctcacgctgtggctctatttaccttcttgtcgctttgcccacggctattgccgtgggctcgctctgtgcatgtttgttattcttttacgctttcccctcggctgttgccgtgggctcgctctgtgcgtgctgattatttgtgtatgctttgcccggtctccgccgggctcgcttggatttgctcgctctttgtgagggtttgctcaggcctaacccagcatcacatcgagtgtcatcatgaggcagaagcccaccataaatgctatggtggcgcggtttgagtgacctccctctgacatttccggcacgagttcttctatgactacatatatcatggctccggcggcgaagcttagcaggtacggcatcaccggctctattattccgatggcaagtatcgtaagtattcccgctatcggctcgactattcccgacaatactccgtatacaaaggctcttagctttgagcttcctgtgctatgtaatggcatggatatgattgcgccctccgggaaattctgtatggctattccgattgccaatgaaagagctgctgccctcgtgatggtggtggttcctgatatccagcttgcgtagagcactcctactgccatgccctccggtatattatgtaatgtaactgcaagcaccatcattgtctgtctgctgaaattgctctttggaccctcgactgaattatcgagatgcatatgtggtgtgattgtatccagtatcaataggaaaaacattccgagcataaagcctgttactgccgggatgaactgcatttttccaaggttctgtgactgctcaagtgctggaatcagaagactccagactgatgccgcaatcattacgcctgctgcaaagccactgagcatttttgtggtctttacggaaagctcatttttcataaaaagtacacatgccgcaccgagcgacgtgcctataaatggtattaataaacctaatatggttgatgtaatcatggttgcctcctattctgctgtttttctattttacacaaacttcccatatataaaactatatttaccggagagtatacagttgttccgaagaaaaaaatatgaggaatacactgtatgctaggccggtatcacaaaataaaatatgggaagtttgaatattttattattcaacatattatttcttatatcgtttcgtatatcattttacagtaactgaatattcaaaaccacttaatgcaaaacagccacaagtaattagtcttctctaacccaattacagtttaatacacctatataatttcgtcaaccggcttctgtgagccttactcgttacggttcacacctaacagtgtgaccagcaatgattacaagctactccatagcttagatacagtcgatttatgcttcttttcacagcaatgccctgacaaaacgtcagggccgggtatcacatgccacagatggcatataaaatgtcttctaataccgattcctgcaaagaggctgtcttcccacacatatattatcctttgtacggtcacgaagctccggcaccggattcggcgccacctcaaagcgataatcctccccgtttttgcggatataatcctcaataaaggtatggctcattacatttcttaccgggtcattgaccaggcgctgatatctgataaatgtttcaggagcattggttcttacatccacatacctttcacggcacgctgtgtcgtttaccgtactgccaagcacacacctgacatactcaatattgctctcaagcacaagaggagccgggaactcagcgtccgggatgacctcctgccaatcctttttctcgtactgtcttagcagctcaagtgcaatatgcagatgcttaagctcctgttcaaacataaactgccatatgccacgtattcttgtatccgtctccgtttcataacagctccaatacagccagcactcgacatactgatgcacaaggagattttcaaggcggctcatgcatggcttcaacaggctgccatactgtgtgacatgctgttcctcgaccattccgatttcctgatatagcctgcgtcccatctcatcgggccaaagtgccgctgtgttcatatagtagttcatagtctgctgttctgctgctgtgattacgtttgcagccagcacatccattgtcgcagggcatttatccgtcatcggatatcgtattgaatcatatggatgcctgtggtgtgaaatagtcggtctgcccggtgtgatttccgtatagcctccgacaagcttctctgcgtgctcacctgttgtaaaatcaagataatctgcatagcggtacaaatgatcaaagtcctcaagtaacgcaaaatcgagcgccgacttaatatttttgtcatttactcgttttgcaagatgcgcagtcagatcaaccgcaagctgctcgtagcctatggtgtgctccaatgccgactcatctgccggctttagatgtgttagtattttctgctgctgttgctcacttttcctgatgtatgcaagctttcgtctaagctcatcatcacctacgcttcttgaaaactgatgtgaaaaccacacgttttcaaattctgtaccattcatcaatatgattctcgtccttgtatacggatttacctcatttttgttatatggttttacccagaatttctcccagtcaacaaataaatcgccggttctctccggcctcattttaaatggattcataatacaaacatacctccttcatgctattgtatgcacgaaggaggtatgctgtgcgtatgaatcacattctaataatttgtcaaatatatatgtgtatttagagttttccgaatcagcctcataagagcctttcctgctctattgttttatccgattcaagaattgcttcttttaattcggtaagcaatcctgcgtcctttttttgcagtttttccctagttgaagccttaagtggtattccagcgtctttttttaatgcttcctcaaaatccgctacccccattctataaggcattagtttttcaaaaattctatccttaataaacaagaatatgcttatccctccaaaatccatatctccccaatggaggaactcacattccttagatacaataaggcttaatttctttagaaaatacacttccttaggagtaaaataaccatgacaaaaaatatacaaggtattctcatcatattgcatactttcatagttagccttattttctatggtcataattcttttgcatcctgcaagcgaaaccggacttgcatgctcaagtgtctgcgtattaataatggttccataaatctgctttgacgtatcaataacacatgtatcatcaattctatatgacaatggtcccttccattccattgtctgtgcatatgacataatgccatgcatcttcaaaatttcaagccccgacttctttttatcctctttggcatcatcttcctctccctctgtatcataatcctccatatccttctcataatatggagaatatttagtcagaattgataccatcttttgtcgatagcatttttcaaatttctttgaatctttaaaaacctttgcactaaaaacacgctcccacacaggctcctttattcttgttatagcattgatacacttaaaacgcatatcctcctcagcctctgtgacactctttccggcttccagacgccccaaaatatcatcataatatctgcatatccaatcgcagtcaccaacctctgatttccactgctttacagactctatcaatcttagctgttttgctcttgaatcctcaacaccctcaagccgacacagctccggtatgctgctgacatcacaatcaatttttttaatatcgctgttgacctgaatccaattaattcttatcttcccatcgtggcctgcttgtgtattattctctatgaaccttgcctgatcgattagtttccggcgtccaccaacaaattccatcatttctgttattttgttcaaatgtttttctccggttagttttcctgaccggtatccttcggtgtctgtttttttaataatatagcctgcaagcgtgtgcttaattggagtttttcccatagcataatacccctgtaaaaccattaatacgtcctatcacttttcctcaaacagctcaatttcctcgccaagtggtcctttgcagaatgctatgcgcgccggaaatgccggtgttgatgcgatttctatatccttcggctcgataaatacctcgtatcctgctgcttttacatcctctacacacgcatccacatcatctgttgcaaatgcaaaatggcgaatcacacctttgcccggtgcatcatctccatcgttaaaaatctcaacaattccgtttccggtatcaagcatgattcctgcctgccattcccttgcgaccgggatttccagaatgtttttgtagaaatctatcgtcttttcatattcctctgtgctgctgcacttcatagatacgtgatgtataccttttattaagctcattgtttttctccttgaaatcttttgttgaatatattatatctatcacttcttttattgtccatatatacagtctatcatgattgcggccacgtctgcctttgcgctttctcaaaattgccctgctcactgctaaatgcaccatcatcgcataaatccagcactgtttcatccttcagatacaaaacaagcgttttttcagtctcatcatcatcaccgcttttccatatgtacctttctacatctgaaaaatcatactgtttttccttaaaatgaaccaatgttattttctgcgttgtatagtttatttcataataccacagtcttgccgatgccagtatacagataaatcccgctattcctatgaccatggcagtttttatggctgcatttaatatggctgatggtttaaaaaaagcatatcctgccaatggtacaatcaagcctgctacaaccattaccaaaaaggccggtattcctataaaacgttcaagtatctgcccgcttaccatttcgcgttccactgcgccctctgcgactcccagaaacaccatgcaaaacaaaaagctgaccaacagtataagaagaaatttaaatatgtttaaaaaactatctgtgaaagttaatatcatttcaacaggctttagctttcccaccaggcggcagataaaatatttcttttttatccatgcggtggcatacgttacgacagcgctcaacacggcaataatcagcccatacccctttgaatctgagaatatggcacacaaaaaatactctgccaaaaaaatcatcctgtatttgcgtattttttttgaaataatcccgaaatagcaatccaccgaaagtgcgtgctgccctataaactgataaatatcattgccggtcatatcatcagccaaatttgcttccactctcagatatttcttataaaacgaatctgtaaaaaaacaaacagccaacactgcaacccacttaaagatgtcatcactttcaaatatgatgaacatgcctgccataagacatattacaaaaagtactctcgcctgccttattgttttcacatttctatcttctatgccctctgcaaaaatttcttccgctttatccattttcttcctccagtaattccctgagattcttatttttattttctaaatcatcatttaatatctgttccctgtccccgaatttaacaagcctgccattatcaagcaatccgatatagtcagttatgtcattgacctcctcaaccagatgcgtgctgattatgatgcttatgttttctttttctattgttcggatcaaaagctcccagatgtccgtttttacgaccgggtccagatttgccattggctcatccaaaagcagaagctttgggtgccttgccagagcaaaagccagttggagctgcatctgttttcctgttgaaagctcctcaaattttgtcgtatattcttccttggtgaactccatcatttcaagtatttcatcaaaatgcttctgatcccatctgctgtaaagacagcttaacagcctgatattttcgtcagccctaatcccgcctatacaccagcttcttccaccgacatatgccacctcatcatgatacagaatgtcaattgctttcattccggtgacatcaatatcattccataatacctttccactcagtggttcaatacgtccgtacactaaatcaaaaagcgtagtttttcctgcgccatttcttcccaaaagtgtcatgagatatccgtcatccagtgaaaagctgacattttccatagaaaaggttttcgtactgtaagataaattttgaacctctagcatgtttcctcctcccaaagtatcctcaccatatcaataaactctgcttcatcaagctctgccgcctttgccttttctataaccgcggcaagctcctcctccacacttaaagtacgtttttcctcgagatatgccatatccggatcgtccacgaaaaagccctttccaggcaccgaatatatcattttctccttttccagctcctcatatgcctttttcgtggtaatgacgctgaccttaatgtccgcggaaagcgcccttatcgatggaagcgcatcatccttattcaattttccggcaagtattgcctcctttatctgcgtggcaatctgctcataaatgggtgttccgcccttagactgtatggaaatattcatttctgcctccaatagttcttgccatatcaattatcaatatggcaccggacaaaattcctgctatacatccaagcttatagaactcattgtctattcctgccatatcagaaaagctgccatttgtaacaatagtcattaagcagacaaacaaccctgcgtctataacaatttttaccaacgcaataaaagtctcatatatttttacagactttgaaacactcgcgtcagctaaacacttttctaaatttctgctgtcttctgctgctttccaaaagatatcatttatcgaaaagtgtgcaagaattatgatatatgaaataaaacataccgccacataaagcggatgtgaaaaaagctccagctttctgtgccttatcactataatcgcagtgtttataagaagaggaacacttaaacacagtaaatcaagcatcacctctgtcaaaaatctcgtttttctttccttttcattaaaaggtaaaagataatttatttcagaactgatatagcttgcacttaatgctataagcagcactccggcaaatacaaagcccaatactccgcacagtgttgtcacaagtaatacgataaatgccaaaccgatatgccctggtgaactggataaccatatcttttttctctcaaaataatccctgatcattactcatcaccactttcttttattatctctttcttctgtacgtagtacatgatttctttaagctctgcatatctcatatgctgcctgatttcatgattaatttttgcggttatttttgcttcatcatatcttatcagcaattcgttcgagctttcgcttaaacgccctccgactacaagctccttcggtatcctctcaagcagtgtcttgtccccggaaacaagtctgtaggaatccctaagctcatccagcgaaccgtaatagaatttgcttgtggtattgtctttcttttgcagccataaaatataatctgcgaaatgctcaagctcctcgaccagatgtgtcgcataaattatgcatttattttcatctgctgcaagcgcccttatggtttcataaaatttatcacgaaattcaacatccagatttcccgtaggttcatcaaaaaagtacacctgcgcatcatagctctgtgcaaatgcaagctgtagcagtatcttctgcccctgtgaaaaatccgaggcattcataatatcctttttacttttagaaattctaagaggtacgccagcaaaatcgataagaccatactgcttaagaagagcctcatattttttctgattaaatccgtcgtaatatctgccgtaatattttcctatcgagacagcagatatattttccctaaacggcaattcactaaatacataagctattttcttcttgtatgccttctcatccgtctgcagacacacaccgtttatcacaatcccggtgtctgtcgaatcagattctttcatccccataagaacagaaagaagtgttgacttgccacagccgttctttcctatcacacctacaatgcttccacccggcacttcaaatgaaatattgtccagcttgaatttgtcaaatgttttgctgacatttctgactatcagtgcattattcataagctactcctttgtatgcaaatgacattttttacttagcgatttattcattttgcgttttttggcccgcctgttatatatacagtatatacagttatatacaggttgtcaatatacttttatcccctatatattttcaattttattttcttgtactaccggtaaaatatgcaagtgatatggtgtagttcgtttaaaactgttatactaggatatatcagaaaataaatacaatctacaggaggattatcatgataataaaaaacggcattgtagcagaccctgcttcaggtctctacgaacatatggatatacttgtaaaagatgggaaaatagtaaaaatagcacctgacatctcatgtgcgtcagacgctgctgcaactgaaaaagaagaaataatagatgcagccggaatgattgtcggaccgggacttatcgacacacatgtgcatttccgtgatccaggcttcacatacaaggaggatatccacaccggttccctggctgccgcaaagggtggcttcacaactgtcgtgtgcatggcaaacacaaaacctacagtggacaatgtggatactctaaaggacaacctcacacgtggaaagcaggaaaaaatccgtatgtatcaggccgctgcaatatcgcactccctcaaaggacaggatgaggttgacatggtagctttaaaggaagccggagcatgtggctttaccgatgacggcatcccgcttacaaatgctgctttctgctacagagccatgcaaaatgctgcaaagctggatatgccgataagtctccatgaggaggaccctgcatttatcaaaaacaacggcatcaaccacggaaaagtatctgacgctctcggtatctacggctcaccatccatcgctgaggagactctcgtcgcaagagactgtctgcttgcgctgcgcagtggtgctgatgttgtaatacagcacatcagctccggtgtatctgttgatatagtccgcacctacaaaaagcttggtgcaaggctccatgccgaggctactcctcatcacttcacgctgactgaggatgctgtcttagagcacggcacccttgccaagatgaatccgcctctgcgcactgaagcagaccgtcaaaagattatagatggacttatcgatggcacaatagaccttatcgcaacagatcatgcgcctcacagcgccgaggaaaaatcaaagcctgtaaccgaagcaccaagcggtatcatcggtcttgagacatctcttgctcttggtatcacaagccttgtcaaaccgggccatctgagcatgcttgagcttttggaaaagatgactatcacccctgccagactgtaccacatgccttacggtactatctcagagggtgctgctgcagattttgtcatctttgatcctgacgaaaaatgggtaccatgcgaatatgcatcaaaatcatcaaacacaccttttaccggcatggaactgaccggtaaggttaagtacaccgtatgcggtggaaatgtgatttattcggataaataaattgtgtatgcactattaaaaaagcagattgtgaacgcatgtgttcacaatctgcttttttctacttctccaccaattccaggcaatctccatagtgcctctgcagagactttaagtccataatcatcacataaaatactctgccattgtgcactgaatccactatcctgccatgatcgagcactgaaatatatgtgccgtctgcttttcgcatatgaaagaaaatataatcatttgagtgtcctccgttaatctgcgaccatatgcttttttcacagctttcctgttcatccgggcgtatcagattgcagaagctcttacctgtatatgcaagcagctcgtccatatttttacagcctgtaagccgaagcagctcgctgtttgcaagcagaatctcatcattttctttatctgccctgtaaacaatgaacgctcccggcatattgtcaataatatccttcacggcaaatccaagcttcgcacggctctttatacgctcaccctcacgatatgccatgcagccgttcttcccacgcattttcacctcataaagtgccatatccgcacaccgcatgagctgggaacggtcatcagccaaaacaggatactccgcaaagcccagtgaaatggtaaatgtatgttcttcacctttacaataaaatttcctggtttcttctgtaaacttcttaaggaaaggcttaacctccactaccgtacaatccggcatgaaaatgctaaactcatcgcctccgtttctgccgagtataacatcctttgaaaaatattgcttcatgctctctgcaagtttcttaagtgcaccatcacctgccgcatgtccatacacatcattaacaagcttgaaatcatcaatatcaagcatcgccacaacacagtgcttttgcggattctgtctcatatattgctcaacctgctcatcaaagccgtgcctgttgtagataccggtcagtgcgtctgtcacagcaagtctcttgaaattattcctgttttcattgattaaaatcaatgctactgtaagccctgtcaagagcaggactataattacacctccgataaacatgtatatcagatagttattattgtaaaacccactcttgggtaaaatctcaagcctccacttatctccatacacgtcaaagtcatatatcaccggattgttcagctctttctttgaaccgtaaacccactcatacgaatcatcccacggcgcagcactcttctgcagactgtacttgtatccaaaatcggaaagagcctctaccgatgcagaaaaaatatccggaaccttaagtataacaattgtgaagccccaaaagctcttctgaccattttcatcctctaaataaacaggattgcgcaccgctatgccacatccgccctgcttcagcttaaacggtccctgcataattacagtgtcattatccctcgcatagcgcgaaatctctcccctgtcactatcatttatcagatcaatcttactggattcattactctcctctggatatatttcagtcacaactccattcggtgctatctgtatactctgaatcgaatcgtccatcatatttgctgcaatatcataaaacctatttatatttccatcaccacttatgacaacctgctttaagctatcggtaactcctattccctccataagctcgccatatatacgctccgtatatgtcatcgcattgagctttgcatttgtcctgttctgctgttcctgactcttgccgactacatatatagcgccgattaacgcacacatgcccaatataaataccactgccggaataatgaatctcttttttagctttttcatttgtatcactttctaaaatcaatgtctatctgttctatatgattttaatattatagctttacgataagaaaatgtctataaatttacttagttcatatcaatatttttcagttgctcacccgctcgaggaggcaaatactttctacgtgcgtcgtatgagaaaactgatcaaatgcctgccacttcatgagttcatacttctcttcacagagtatcttcaaatcccttgccaatgttgccgaatcacagctcacatatacaatcctctccggtaacatcgcaagcattgtgttcagacacttctcatcacagccctttcttggagggtcaacgactatcacatccgggcgaagcatatctgtacgtccggtggatgctgtatcatcagtgattttctcagttttctttgcattctcataaaactgtggaagcacctcctcagcctttcctacgaaaaactgtgcatttgtgatgccattgagcttcgcattgtttttggcatcctcgattgcctgaggcactatttccactccgtacacctgctttgccttctgtgacaaaaagagcgatatggtaccgataccacagtagagatcccagacattttcatttcctgtgagccctgcaaatgcgagtgctgtgctatagagcttttctgtctgcttcgggtttacctgatagaacgactgtggcgaaatctgatatgtgatgcctgtcccctgtggtgtgaaatcagggtaagaaagcagatggatggtgtcttcaatatatggtcttccccatatgcagactgtctttttgccgaggatgacatttgtgttttccttgttgatattgtaggaaatcgaagtcattccatcgatttttgagagtctttcgcacagtatatctgctgcattcccggctcggcgttttgcttccagactgtccccgtttaccacaagacacaccataatctgctttgatgcaaaaccatatctgataagtacatggcgcaccagccctttatgtgtgttctcgtcatacggcgtgatgccgcactcattcatccattgctttatgatatccagtatctctttgttttgcggcaccccaagcttgcagtccccaaccgggatgatattatggctgcgcgatgcataaaagcctgtcactatattgccatccctgtcataccccactgggaactgtgccttgttgcggtagcggtacggactgtctgcgccaacaggcggctgcattttactgtccagctctgcctcggaaaatccacctatgcgcatgagattgttacgcaccttatcatttttaaattcaagctgtttttcataggagagcgcctgtatctggcagcctccgcacctcttgtgcagctcacattccggctcaacgcgaaaagtggaaggggtcttaatctcttccactcttgcgtagccatagtttttctttaattttgttgcgcgggctgttatgacgtcaccaatcagtgcatcctttacgaaaaaggtcatgccatcataatgtccgataccctcgccatctgttcccatatctgttatttcaagttcaaatatgtcattttttttcatgcttttctcttctttattttatatatataattactctttataatgtttgtatccggtgcaaactttcacaccaaaatcacaccatagctatattaatatcgtccgctttttacacacttgttctgcggaaatttgtctccataaatctgttgtagccctgccactttgtatcgttttcaggcacatttacaagcagctccctgaaggtctccatcttggcatctatgttgtctgcaaagctaagtgccagtgcctcgacaagtgccggttttttaggagagccaaactcaagctcgccgtggtgggcaagtatacagtgcttcagctcatttgcgagcactaccgggaagccgtcgatgcccttaatcgcatcgcctacccactctgcaccaatcatgatatgtccgaggagctggcctgcgtctgtatagtcattctccgggaaagtagagagctcctttaattttccgatatcatggaaaatagctgccgtaagaagcaggtcacggtttaaaaccggatacatttttgcaaaataatcacagttcttcgtcacaccgagtgtatgctccaaaagtcctcctacaaagccgtggtgcacgctctttgcggctgaatggaacttgaaacggcgctcaaactccttattgtcaaaaaagctatgtaaaagctgtgacagatactgattctttacagagccgataaagcccataagctccttatacatgacctcgacatccttatcgctgaccggcagataatccgcagggtcatattctccctcgtttacctttctcgcacgctttatggaacactgcaaattgccctgaaagcttgtgatatcaccggttatggctatgtaatccattgcgtcaaattcctcaatgcctactgagcccacatcccatatcttggcatccagcgtgcctgtcttgtcctgcagtatgacattgtcataaggctttccgcttttggtcatggctgtctgcttactcttgcataaaaaaatctcattgattctctctccctcgcggagagttgaaatatacttcatatatcctcctaatttcggctaattcatcacaccgattttcacctgacaggtaatctccgtgtagccgttgcttccttttctctttactttcagattgcaggtatcctcaggcttttgctgcataagctgtgtgttgtacgcagacacattcgatacatccttatcgcttaccgccactatcacatcaccgctttgaagccctgcgacaaatgccggtgaatccatggtaacctgctttatataaacaccctttgggatgttatatctgtttgctattttttccgtaactgtagtacaggtgatgcctatgtacggcacatctgcgccgccctcaagcttttcaatgaccggtgacagattgcttatgcttacagccgtgagcgtattgttttcctccgccggattaaaatcctgcagcgaaagccctatgacctgaccatccgtattgatgagtataccgctctgtgacctgttgcttgcgatatctgtggtgagcaccgagtaattgttgtcctgcgccgacagctcattggttgttgatgttataagacctgtgagaatggcataatttgcttcaagtgcaatgacagatgctcctcttgaaacaatatttgaattaccaagctccgcaaccgctatagccgctgttgtggcatcgtccagaagtgacttatccacagaaataatcgctatgcctgtattactgtcgtacttgaccagtgcagcatcagccatcatgtcgtttacaaaggtcacactaagcttatccgccttatccactacatctttctctgtcagaatgattagctgctttccattgtccttcagtatcactcccacaccctgaccctcggtctcataggaattgttgaaaatatcagtggcatctgtcacacccgtgactcctactacaaatttcgttgccaaagctcccactctgtatagctggctctgcactgcctgataatccgccagtgtaggcttgtatgtctgctgggatgactccgaagaagtgccgggctctgtactttgtgtaccattttcactatatgcatcactgctgtcatctatgcctgactgctgtgtggctgtctgcacatcattattatttttcccatctgaagctttttttgattgtctgctgattaccggcagaaatatagcaaaaacaatgcttgcagccactgcaaatgccactccgcagagtgctgccgtgcctgctttttttgcaagtctttttttattcagcggtttatcctttatcttttctctgataaattgctccatattgttaccctgat

SEQ ID NO: 1477 - DNA, 9850 bp, Unknown
  gut microbiota DNA sequence
ctacagatgctttggcaacgacaaaaaagcccttaactatggttattaaccacagctaagggcttagtttataatatggaatttgttcagagccaagctccgaactttagtctgcaagccacctgttaattgttccgttacccataaaccactggataacaagaataatggcacttgctatgactgttatcaatttgttatcaaaagactaatcgaaatcgctgaaacccgcataaacactggcttttttaagcaactcgatttattcaaactcaatagttcccggtggcttactggtcaaatcatagaatactctattgactccctttacctcatttataattctgctcatcactgtctgaagtacctcaaacggtatctcggctgcttcggctgtcatgaagtccacggtgcggactgcacggactgcaacggcataatcatatgttctctcatcacccatgacacctactgaacgcatgttggtaagggctgcaaagtactggtttggcatccatgatggttcctcgccgtgggcctctttgtactcttttgctgccttttccacttcgcttctgtaaatccagtctgcatcctggacaatgcgtaccttttcggctgtgacttcgccgatgatacggattccaaggcccggacctgggaatggctgacggaatacgagataatcaggtaatccaagctccagtccgaccttgcgtacctcgtccttgaagaggtttctgagtggctccacgatatccttgaaatcgacatgctccgggagacctcctacgttgtggtgtgatttgatgactgcagattctccgccgagtccactctccactacgtccggatagatggttccctgtgcaaggaaatctacctttccgattttcttggcttcttcctcgaatacacggatgaattcctcaccgatgattttacgcttgcgctcaggctctgtgacgcctgcaagcttgctgtagtagcgctcctgtgcattgacgcggacaaagttgatgtcgaacgaaccgcctttgccgaatacgccctctacctcatcgccctcgttcttgcggagaagtccgtggtctacgaatacgcaggtgagctgcttgccgattgccttggcaaggagtgctgcgagcactgatgagtctactccacccgaaagtgcaaggagcactttgccgtcaccgacctgctctctgatttcttcgattgtgtttttgacgaatgaatccatcttccatgtgcctgcacatccacatacgccacggacgaaattgtaaatcatctgtgttccgttcttggtgtgaagtacctccggatggaactgtactgcatataatttcttctcaacattctgtgttgcggctattggacagtctgcagtgtgcgcaactacctcaaagcccggtgcagcctctgcaattctgtcgaaatgactcatccagcatactgattctgatggcagatccttgaacatcacgccgtttgcagaatatgtgatttctgtctttccatactctccaacctccggtgtgattacctttccgcctaatttatgcatcataagctgtgcaccgtagcagatgccaagcaccggtattcccagctcaaacagctctttctggtatgatggtgaattctcttcataacagctgtttggacctcctgtaaggatgatgccctttggattcatttctttgattttctcaatgtctattttgtatgagtaaatctcacagtacacgttgcactcgcggacacggcgcgcaacaagctgattgtactgaccaccaaagtctatgactatgaccttttcctgatccatgttttcctcctaattgtttattcgccatgctgctgtctcattgattacgtaaaagcaacatgttttcttatgtcattatagattacggagtgcttatctgcaagcgattttgttaaatttctgttttgattttatgtgcaattacgttataatgaattataaacacttttataggctgggaggtttcatcatgagttttaaaataatcactataagccgagagtttggcagtggcggtcgctttatcggcgagcagattgctcaaaaatgcggcattgagttttacgataaaaaaataattgagcatgtggcaaaggagctcggtatctctgagcagattgtcgcaaaccagggcgaatatgcacctgccggaagtattttttcatatgcatttgtggggcgcgacatcacaggagtttctctttccgaccagattttcaatattcagcagaagctcatcaaggatattgcgcaaaaagagccatgcgttattgtgggacgttgcgcagactacattctttctgacagggatgatgtgctgaatgtttttatagagggaaataagcctgagaaggctgcaagaataaaaaagctctaccataagagcgatgacgaggtcaaaaagctgctaaaggatgtagataagaagcgctctgtaaattaccgctacttcaccgacaaggagtggggcaacaggaaaaattatgacctggtgctcaacagctctgtactagggtatgacaaatgcattgagctcatcgcagctgcatacgcgtaacataaatagaattacaacctgtgtgtaatattaaaaatactcccgcataaactgtaacaacagaatatgcaggagtattttttgaaatcatatattgagacaagggcggtggaaatcgccaactacatagttgaaaacaatgccacggtgcgtcaggctgcaaagcagtttggcatcagcaaatccactgtgcacaaggatatcacggatgctgacaggctgcttcgcattgacccggagcttgccgcaaaagcgcgtcacattctcgatatcaacaagtccgagcgccatatccgcggcggacttgccaccagagagaagtatctgcatctgcctcatgtgcatgccggctgagtgcatggatgcttctatccccgcattgccaggtgcgccgttttccgtacatctgaggcttttcgttaattcaagaccggtgtcacatgacttgtgagcacaccgtacagccacttgccctcatcacttagatcctcataggtaaagccgcttgtcttatcgcaggcaggtgttagaagcgctgatttttcgtccttattggacagattccagcacacatagctgatgccgtagctgtcgagcaggctgatccagttgtttgcggaatctatgtccacctgaccatttccgtcggcgctacagatgccaaactccgatacaaatatcggaagtccggcgtctgccgccgattttagcttgttctgcaggtcctccttgtgagttgcggcataaaaatgcagtgtgtacatgatattgtcatagcctgtgacagggtccttgactgcctcatccacattctggctccagttaggtgtgcctatcagtatgactgcatccctgtcgtagcttctgattgacggaatgacctcgctggcgtaaaactttacatcgccccaggtcgcaccgttgcacggctcattacaaatctcgtaaatcacattgttgtaagaggcatactgctgtgccattttggtaaaaaatgtctttgccacatcgctgtaacggtttggattgccatcgtttagcacatgccagtcgatgatgacatacatgtcgttgttgagtgcgtactgcacgccgttttgcacaagtgtctcaagctgctgcctgtcaccatctgtgcagtagccaccgctttcgtaggtgtacatggcaagccttaccacgtttgctccaaagcttttcagcgttgcaaagcaatcattggtcacatactgtggataccacgcaagaccgtgtgtgctgactccgcgaagctgcacctcgttgttattttgatcaacgagcttgctgccctccacatgcagcttaccgtttactgacggacaggcaaggactgagctctcctgtccgttttctgtggtgagctgctctgtatcagccacattctgattttctgtactgctttgcgtactgtcctcagtattattttctgcagaattcaccgactcagtggctttctcatccatctgtgattctgtctctttgttgcccttgttaccacatcctgtaaaaatcccaagcaccagcactgcagccaataccaatgctatatatttcttcatattgttatactgtctgactgattactgaatggatgtaaccttgtagtcctcagcctctacagtctcctttaatttctcatcggaaatatcagagcttaatgtcactactgcagttccgctctcatggcttactgctgcctcactaactgcatcaagcgcctcgagggccttctttactcttgcctcgcagtggccgcacatcattccttcgatattcattgtctttgtcattgatttttcctcactttcatttggtttatttgttttgttttttctatctggtgttgcttttctgtcatgcttaggatcatacaccctgcacagattcagccgcagggcattggtaacaacgcagaagctcgacaggctcatcgctgccgctccaaacatcggattgagcttccatcctaataaaggataccacaaaccggccgcaagtggaatacctattacattatagaaaaatgcccagaacagattttcgtgtatatttgtcaatgtagcacggcttaaccgcactgctgccggtacatctatcaggcggctcttcatcaggacaacatccgctgcatctattgccacatcacttccagcgccgattgcaattcccatatccgcacgtgtaagcgccggtgcatcattgattccgtcaccaaccatggctaccctgccctgctttttcagcttccttatgacagcctccttgccatccggaagcacacctgcgatgacttcgtccactcccgcctgctttccaatggcattggcagtctgctcattgtcaccggtgagcataacaactctgatacccatttttttaagctgtctgacagcttccggactgtcctcctttattatatctgcaacggctatgataccgcaaagcctgtcatcagcagcaaagaacagaggagtttttccttcctttgaaaattcgacagctttcgcgcgcatatcatctgacacttttacaaatttgctgacaaaagcaagatttcctgcttttatcattttgcctgcaagcgttgcagtcagaccatttcctacaacagcgctaaaatccgtcacctctgcaacagcgatttcatccgttttagcgcgctccataatggcttttgcaagcggatgctcgctcttggcctccactgatgcggctattgcaagaagctttccggcattattgccggttccctcaaaaaatgtctcatccggcacgatatccgtcaccttcggctcaccgcttgttatggtgcctgtcttatcaagagccacaatctgtgtgcggcctgttgcctcaaggcttgccgctgtcttgaagagtataccgctctttgcgcccttgccgtttcctaccattatcgcaacaggagttgccagtccaagtgcacacggacagcttatcacgagcaccgaaatgcctctggcaagcgcaaagcccacggtctcaccggctataagccatgctattattgtaatgattgcaattgtaataaccgccggcacaaatactcccgataccctgtcagcgatttttgcaataggtgcctttgtcgctgcggcatcagaaaccatctgtataatctgtgagagtgtggtgtcttcgcctactctggttgcgcggcattttataaagcctgactggttcactgtggcagcgcttactgcatctttcggctgcttatccacagggatgctctctcctgtgagtgccgattcgttgacagcggttgttccatctattatttcaccgtccacagggatattttccccgggtctgaccacaaagatatcgccctttttcactgcatccacagaaatttcctgctccacgccatcccttacaacggttgctgtctttggggcaagctgcatcaggctctttaaagcgtctgttgttttgccctttgagtgcgcttcaagcatttttccgacagtaatcagtgccaggatcatggcagccgactcaaagtaaaactcatgcatatatgacatgaccgcatccatatcgcccttcacctgcgcagctgtcatggcaaaaagtgcatacacgctgtatccaaacgatgccgcagagccaagcgcaacaagcgtatccatgttgggagcgccgtgaatcaatcccttaaagccactgataaaaaacttctggtttatgaccattaccgccactgtaagcagaagctgcaaaagccccatagccacaaggtttccattgaaaaactcaggcaacggccagccccacatcatatgtcccatggaaaaatacatgagaacaactaagaatatgagcgatgctataagcctgttgcgcagcttcggtgtctccctgtctacaagcgcatcctgcgctgcctttagctgctctaagctgttattcgctttgccattttctgattctgttgctgtgcctttgggactcgctccatagcccgcctgctctactgcctccactatctgcgcatctgtcgcgcttccctcgactcccatcgagttggtcaaaaggctgacagagcagctcgtcacaccatcaaccttagagaccgccttttccactctggcagagcatgccgcacagctcattcctgtaactgtatattgcttcatactgtctgtatttccttctttctactattcgaatctaactattcagaagccttttctaaaatctctcaattcctgtcaccttgaaatccagtctttcgatggcaaatgtgatctcctcatcgctcagctctctggctgcctcaacatgtgccacgccatgttttaaatccacagccgccgatactccgctcatcttctgcagcgagcgtgtgactgagtttttacagttcatgcagtgcattccgtctatgtgcacatctgctctcgtgactatctctcctgtaagctgtactgtggcttcctcgtcctccttcatggctccaccgccacagcaggcgccctcgccctttgaatgcttaatagtctcctttaagcccacaatcaccagtgcggcaattattgctattattaatattgtgattattgtactcatttttatacccgccttcttataatgctacttcataagcttctgcagtgtgttcaaaagctcatctattgtctcatccttgccggctcttatgtcatctgccacacacgtctttatatgattggccaaaaggactttattgaagctgttgagcgcagcatttgcggccgccacctgtgtgatgatgtcagggcagtagcaatcctcatccagcatacgcttgattccacggatctgcccctctatacggctaagtctgttgatgagatccttatattccttctctgaccgctcttttttgcggttgcagcaacagcatttggtttctttttctgccatgggtgcctcccttctttcttcattcgtaactgttcagtaccttcacagttgcatttgttgcacatgtctaaccataccccttatgggtatccgtcttcaaatgcattatatacccctgcagggtatattgcaagggcagatttccttattgagaaaaattatcttctgctcagcccatacttttataataaaagcatgcaagctgtgttctgtccctcaggttttctcccaaaaaaaatcaaggagagaacatcctgctcatcctataaatttgcaaactacaaccgcgagctgcttttgggtgtgattttaaccggacttgcggtatgcgctgtaatttttgtctcagctacaatcatgtttaaaggcagcacattctcgttttcaggtttcctgttcacactcaacatgctctgcctcatatgaatatatacaacgaaaaagccggtacatcatgtttccatgaatgtaccgactttaaatacttagcagtccgtacgggaatcgaacccgtgtttccgccgtgagagggcggcgtcttaaccgcttgaccaacgaaccgtgtattataatatcatggtcaaacgaataatgcaagtatttttttaatttttttcaaaaaaaattttccgttcatttaccttaaacattttccctttaaatgcttctggctttaattccattttcgtccctatgtatgctctgtgacaatctattatattccggctcattatcccaaagcacgcgttcttatcctcatattttatttatacgttttcctcttgaataagattatacacctctttggtcacacaacggtcacacggagcgcttttccacggattttgttaaaagtatacattgaaagtgccgaaaactgtacaattttagacaattttcggcatttgtgtattttttattcgttataatcaactattatttattatattttttgtatatcttttcaaacgcaggcatgctgcatttaagtcattcaaataatttattgctgcgttagccttgttaatcttatctcctacggtttcatttattattactgctgaaaggcctatagcttcatcaataatcatacattttaaagtatcacttgttacatcaaaaaataccctgcattctgtcttttcctcttccttttgattttcaagattctgctttgtatgttctctatatttgcctcactacggctgcctgcttacagcgactttcttcaaaaaaaacaacggctgcatcatccactttccgtgaatgatgcagccgatctgtcattacatcgtgtaactgttttagactctggctttgcgaccttatgtttccataagtgtgccttgataggtgtaattttatcggttttgggtagtcttgtcaacagactctatccggacctcggatgccttgtttcgtgtcttcaaatcatttattatccagagataataagtcttgccgtccacatcaagttcatgtacctcatcaattttctggtcatcaaccgttacgttactaatgtcagaataatctgtgacgccccatgccggaattgctttatatttcttctctacactggctttaaatgtgtgaagcatgctttgtgaaagatccgaaacaaaagtctcttcccatgtatagctgtcttctgcaagactctccacaaaatcaatatttaaaacacgtcctccacaataagtatatccctcattatctttcatgaaatcaaaacaatttacatatgatgtatttccttcattttcttctttgttttgaaattttccctgcatataaacatgaactaccccattatattctgtctgacataactgtttttctgacttcactttttcatctacatctaataatgcctcatctacagacttatatttatttggatgtacatcattaatatatgtcatagcatttccatttgctccacttaaaaattcatcctccctatgcaaataactcattattatacatataccaataaacattattacaaatacgattattacgattattattttcttttttttcttaatcatgttatcattcttcctttatatattacatttatatcattcatattactgaagcgctggacacacaccattatttacaaaattattaataaaattaataattgtctgccctgcactacttggatcatttccatataacattgcccccagtgccgcagctgctattaccacaacatatacatatcctattcgcatatataccccatatttatctgttagtatttcgttacc

SEQ ID NO: 1478 - DNA, 247 bp, Unknown
  gut microbiota DNA sequence
aggaaatcaaataaagtgcttcgttcgacttgcatgtgttaagcacgccgccagcgttcatcctgagccaggatcaaactctcatgttaaaaagttgatctcagtcaagttaaacttggctaattcgttcattcagataaatctgaatttactgttttaaaggtcttcaattttcattgaagcgttctgattgattctcaaaatctttcaaggtttctcactgttcagttatcaatgttctttgttt

SEQ ID NO: 1479 - DNA, 12410 bp, Unknown
  gut microbiota DNA sequence
ttatgatcgctgatttgatggaggaaaaatatgtttaacgaagaaatgataacaaaatacagatacataatattacttcttggtacagcagtatcgtttgtgcttggctttgcagtggcatttgcacttgctaagctgtgtggagtgatggctgtaaaggcagtgctcaatatcgctttcacggcaggcggtatcacaggaatgcttggatttgtgtgcatttgtctggctgagcttagacgcatatagttacacattaagaaagaaaacggaataaattattttgacatacgacgaaataaaaaagaacaaagaaatatgtgaatgcctccgataggaagatgggcattcatgcgcaggatgagtatggatctgaatagttactgattttacataaaaagtgcatattcgcacataaacaaaacaaaatacaaattttatcgaaaaacttacttataaagtttctcaactcttgaacttaaaaatgattgatagtataatttaagcgattggtgaaaaataagattaaacgataaggaggaaatcgcaatgattacctggaacaacttggataccctggaatccttcaaggagctttctaaagtgggacgtgttgacataaaagaggccatgtcaggagacaatggcgctaagcgtgtcaaggagtacaacatcccaatggcagagggattcacttacaactttgctgcaaagcaggtggatgcagatgtgcttgaggcacttgcaaagcttgcaaaggaggctcagcttacagagaaatttgaggcactttacaatggtgctgttatcaatacaggtgagaaccgtctcgttcttcaccagcttacccgtggacagctcggagatgctgtagtggcagacggagttgacaagcgtaaattctacgtagagcagcaggagagaatcgctgagttcgcaaacaaggttcactcaggcgagattacaaacgcagcaggagaaaagtttacaacagttgttcagataggaatcggcggaagcgatttaggacctcgtgctatgtacttagcacttgagaactgggcaaagaaaaacaatacattcaagatggaagccaaattcatcagcaatgttgaccctgatgatgcggcaagcgtacttgcatcagttgacgtagctcactctatttttatattagtatctaaatcaggtacaacacttgagactcttaccaatgagtcattcgtaaaggatgcattaaagaacgcaggacttgatgcttctaagcacatgattgccgtaacaagcgagacatcaccgcttgcaaagagcgatgattaccttgcagctttcttcatggacgactacatcggaggacgttactcatcaacatcagcagttggtggagcagtgctctcacttgcattcggtcctgaggtatttgcacagttcctcgacggagcagcagcagaggataagctttcaaagaatgcagatatcatggagaatcctgagatgctcgacgcactcatcggtgtttacgagagaaacatactcggatatcctagcacagcagtgcttccatattcacaggcactcagccgtttccctgcacatttacagcaggctgatatggagtcaaacggcaagtctgttaaccgcttcggtgagcctgtagattatgtgacaggaccggttatctttggtgagcctggaacaaacggacagcactcattctatcagctccttcatcagggaacagatattgtgccactccagttcatcggcttcaagaacaaccagcttgacacagatgtagtcatccaggacagcacaagccagcagaaactctgtgcaaacgtagcagcacagatagttgcatttgcatgtggtaaggcagacgacaacaagaacaagaacttcgagggtggacgtccttcaagcatcataatcggagaccaggtaaatcctgcatctcttggtgcactccttgcacactttgagaacaagatcatgttccagggcttcttatggaatgtaaacagcttcgatcaggaaggtgttcagcttggaaagatacttgcaaagaaggttctcgcacatgagacagacggagcacttaaggagctcagcgatatgcttaatatctagtacatcgaataataagtaaagatacagaaacagaaatataaaaacgagccgcaatcctgtgggtatcaggattgcggctcgttttgttctgccataaatcatccgggttaaagatgatgcatgacgaattgggtgagataatttatttaggtttatagttactaatgttgataaatgttatcattatttgtgtgctttatgaaagacaatatcatccttgatatttctgtcatatctggtataagcatggccattctttcctgctgcagcactgtcgtccttctcaggaccgttctccatccaccaggcataggctgcagcgccgatacaaacggcagcacacacgacaattattattgtttcaagcattttaaatcctccgttttactttattatcagcatgatgcggagaaaatgtttatttaatgtatctaagttatatttcctccgcatatgcgcgagttttgaaataatcagcgaaagaaattagtttatgcccatccttgtcgtggataaaacggataataaagcgccggctcgtgtttgtaaggcatatgcgcatcaccacgatagcggcatatgcgaataaaataatatgtattaactggagtaacgcacccagccagcttaaattggatgtaagcctgcctaaaaaaccaagcgaagaggtacggatgcggcatatgactgcaggaaaagaaggtatttcccctatatactggcaatccatgagtgccgacatatctgactctgaataaagcattgcgcgtgagtccaagacttcctgctgtggaagcgcggccttatcagaagaggcataagagccccagacaaccctgtgatcgtatgaaccgtatgctgtgcggtcaggatcaaattcgtccagatttttgtcgagacttagaaaggagcagaatataagacaaagcaacagtggtaaaaccagtattttcttcatgagagtccgctcctttccttccaatttatgtttctattttcttcctttaggttaaaaaagtcaacttgtaagtagatttcttttcaaaaatattgaaattcttaatgggctgtaattgtaaccaaatgattatcttaaatcaatgatatacatattgcataaaaaataatcgagaatttatgcaagtttgtgcatcacgataatagacatttttcatgacacgtgatactataattaacgtaaaaaccccccaatacattatatatttttactatccccatagtaaaataccttctcctaaaggacagcagaacgatggctgttctttttttgtcccaaaatagtgtatatttcgggaaacaagcagatacaatattgttgaaatgatttagacatgatacaatcggattagatattagatagcacgcaagaagcgagacatgctgataacagctctctttcttcaagcctgcagacattgaaggctctgatgtcataattcagagtcactgacaccaaatactgtgagcagatgatagttgattcacgtatgaggaggaagaacattttaagatttagggtgtacttccggcgaagtgcaccctttgttagtgaacaaagaggtacaataaccgcatgcgcatctgcatgctcgcatgcaagggcgtatgtggttattggacatcccaacataaattgaaaattgtagcagcgtcaagctgcggagaagcctcgaaagaggcgaattttcaattaatgttggggctttgttctcattaaatacaaagaggtacaataaccgcatattaaatattataaggagtaacgcatggaaacgagaatagccctgatcggcattatagttgaaaacccggattcggttgagcagcttaatcatctgctgcatgagtacggcagctttattgttgggcgcatgggtatcccatacgagaaaaagaacgtgaatatcatcagtgtggcgattgacgcaccacaggatattatcagtgctttgtccggcaggattggcaggctggatggcataggagtgaagacagtttactctaataaataaagcagagcagactacaggagaaagcatgaccgaaaatacagcaataataaaaattatagatgaaattacggcctgccggaatatcaccctcgagcagctgcatatgctgcttgagacggatgatatgcaggcagttgattaccttagaaagagggcatctgagaaagcacacgagacctatggcaatcaggtttttatacgagggctgatagagtttaccaactactgcaaaaacgactgtctctactgcggtataaggcacagcaatacccatgcggaccgctaccgcctgagtacggagcagattatggcatgctgcgagagcggctatgagcttggttttcgtacctttgtgctgcagggaggtgaagatccgtactacacggatgagcgcatctgtgagatagtgtccgggattaaggcaaagtatccggactgcgcagttacactctctatcggagaaaaatcaaaggagagttatcagagctattttgatgcaggggcagacagatatctgctgcgccatgagactgcggatgaaaagcattacaataggcttcatccggcagagatgtcacttgcaaacagaaagcagtgcctttgggatttgaaagagataggatatcaggtgggctgcggcttcatggtcggctcgccgggacagacagtggagaccttgtacgaggatttgcagtttataaaggagcttgagcctcacatggttggaatcggtccgttcatatcgcagaaggatacaccttttgcaaacgagaagtcaggcacgatggatgagacgcttcgcctgctttcaatcatcaggctcatacatccaaaagtgctgctgcctgccacaacagcgcttggcacaatccatccgctcggcagggaaaagggcatacagtcgggtgccaatgtcgtgatgccaaacctctcaccggtcaatgtccgtgacaaatacaagctctacgacaataaaatctgcaccggagatgaggcggcagagtgccgctactgtatggaaaaccggatgaagagcatcggctatcaggtagtggtgtcgcgtggggactacgcagatttttgattaatagttacgattaataaatataaaacaacaccaggatatagaaggagataaaaatgtacaacgtaaaatcattaaaggctgaagaatttatttcagacgaggaaatcaaagagactctcgaatacgcagaggcaaacaaaaataatatagggcttatcgatgcgattatcgagaaagcaaagctaaaaaaaggactcacacacagagaggcatcagtgcttttagcctgtgagattccggagaagcttgacgaggtttacaagcttgctcagcagataaagaaggatttctacggaaacagaatcgtgctttttgcaccgctttatctgtcaaactactgtgtgaacggctgtgtttactgtccatatcacatgaaaaataagcatattgcgagaaagaagctcactcaggaggagatagtaaaggaggtcacagcccttcaggatatgggacacaagcgtcttgcaatcgaggcaggagaggaccctgtaaacaatccgattgagtatattctcgagtgtatcaacacaatctacagcatcaagcacaaaaacggagctatccgccgagtaaatgtaaatatcgctgccactacagtggagaattacagaaagctcaaggaggcaggaatcggaacctacatactcttccaggagacatatcacaaggagagctatgagcagcttcatccgacaggaccaaagcatgactatgcatatcacacagaggccatggaccgtgctatggagggcggcattgacgatgtgggacttggtgtacttttcggactggacaaatacaagtacgagtttgcaggacttttgatgcatgcagagcaccttgaggcagtgcacggtgtaggtcctcacaccatcagtgtgccgcgtataaagcatgcagatgatatagacccggatgtatttgacaatggcatcagtgatgataccttcgccaaaatatgcgcacttatccgtatttcagtgccatacacaggaatgataatctcaacccgtgagagccaggctgtccgtgaaaaggttctgccgctcggtgtttcacagatcagcggcgcatcaaagacaagtgttggaggctatgcagacccggaggctgagaaaaatgcagaggcaacatcggagcagtttgatgtcagcgaccagagaacacttgacgaggtggtaaactggcttataaagatggactatattccgtccttctgtacagcctgctacagagaaggcagaacgggagaccgttttatggcactgtgcaagagcatgcagatacttaactgctgtcatccgaacgcactcatgacacttaaggagtatctcgaggactatgcaagcccgcagacaagagagcttggaatgaagctcatcgatagggaaatagaaaatattaccaatccaaaggttaagcagacctgctatgagcatatacatgatattgcagacggaaagcgtgatttccgtttctaaaggaggaaatatgggaaatttgaatgagacgccttctgccaacagacttcatataggtatatacggaaagacaaacagtggtaagtcatctctgataaatgcggttacaaagcaggaggtttccattgtagctgacgtggcaggtacgacaaccgaccctgtgtacaagccgatggagatacatccgctcggaccgtgcgtgattattgatacggcgggctttgatgatgatagtgagcttggtgaaagacgtgtggaaaagacccatctggcagcagagaagacagacatagctgttgtagtgcttgatattgcagaggtcattgccgcaaagaaggcaggggtaccgtttaaaaaagcttttaaggatgaggcagagtggagcctgctatttgcaaaaaaacatactccggttgtatttgccttaaacaagatagacgagattttgctttccgcagaggctcaggaaaagagcaggggaaagcttgacaatgctgcaatagaggccgcgaagtgctgggtttatgaggaaaacagtgctgtgatgggcaaaaatgcagacaatagctttgaggttgtagcagtcagcgcattaaagggcaagggaatggatgccgttatctctgcactcacacgccttttgcctgaggatttcggacaggaatttatcctgggagaccttgtttctcagacagacctggtgcttcttgtcatgccgcaggatatccaggcgccaaagggcagactcatattgccacaggtgcagacactcagggaattgctcgatagaaaatgtcttgtgatgagcacgacgactgacaaaatgacagatgcgcttgcagcattatctcacgcgccaaagctcatcgtgacagattcacaggtgtttggctatgtgtacgagcacaaaccggcggagagtatgctcacatcattttcagtgctttttgcagcatacaagggtgatctgccatattatgtggagagcgcaagggcaattgatgccttaaagccatcctcaagagtgcttatcgcagagtgctgtacacatgcgcctcttgcagaggatataggcagggtgaagcttccgaacctgcttcgaaagcgtgtcggtgaggagcttaccgtggatattacaagcggtacagacttccctgataatctttctcagtacgatctcgttattcagtgcggtgcttgcatgtttaacagaaaatatgtattatcaagaatagacagggcacgcactcagcatgtgccgatgacaaactatggcgtggctatagcacacctgacaggaatactcgataaggtgagcatgccctagaaaaaccttaaaagccgggaggaagagaagctatcggtatgacgaaaacaagcgattttgacgacaaagtgaattatagtggcgattataaaggcaattacagcggcgattatagagacaattacagcagcgattatagcgccaccggttacgctcgtctggcgaagagtcttattgatatagtaaaagagcagcaggcgaagcttggctacaggaaggaaatagtcagactgtattatcctctttccacgctcagacatttctttgagtgtgcaggggatgacaataaaattgcagccggcgtaatttcagagcagcagatgcttgaaatccttgctccaaacaacctgccaaaacagcttactgacaccataggtgagataaaggtcaccgcaaaaaatgagcgtttttgcatagagataccacctgagggcagtgagtatgtgcatgaaaacacagctgacaacgagtttataagggagctgattacacttgtcggcacgcatggctgcaccatggagcagataactgagttgttttacaaatactcggacgacatcgaaaaaaaggaaatgcaaaacggcgagtttgactgttacatccgcttcttaaatgagccggatgacacatactactattgcttccatgatgagggctgccatattatttaccatagatttctgccgcaggattatgcggactttggattttaatggataagtttctttcttttggtgttggcctttgaatttactttgaagttacacgaagacatagtttgacaaaaatataacaatcgtaatataatggcggttgagagtagggtttatgtataatacgcacatcaggagatatacacatggcaacatttaccagaaaagccataatgcagacttttttacatatactgaaaaacaaaccgcttgacaggattacagtcaaggatatatgcgagcagtgtgagataaacagaaatacattttactattatttcaaggacatatatgatgtgcttgaggccatatttgaggacgaggtcaggcttgtgatggatgaggcaaaggaaggcgtgacatttcatgatgcatatgccagagtcgctgcccttattcttaataaccgcgaggcgataatgcacatttatgcatcggaaaacggcagggtattaaggacatatctggatgccgtggttacgcaggtggtgcgccgctttgtgttggaaaaggcagagggctacagcctggatgatagtgacattgcttttatcacggcgttttacagcaacggaatcgtgggcagtacaattaagtggattgagagaggcagtatgatgagccgtttgcctgagaacattacggcaaatggcgttggactgtcaaaaagccaatacaacagagatattgttaagagaataggtgactctttcgatgccacaatttatgatatgattgagtgctgtctgtaggcaggcggatattgtatgacaaaataattcgaacagatttgacagagtgtctgaatttcagacactcttatttttttgtccattttaaagacgattatggtggattagaatagcagacaaaaaggagggagatactttatgcacacattggtacgtgtgaaaaatgcatacactgtcatgacaatatgcctgattgcattgggggcagctttgttatttgcgccacagcttggacttaggactttgtgcgtggtgtatggagtgtttctcatagtatacggagtgacaaagttgtccggatattttgcaaaggatttatttcagcttgcgtttcagtttgacctggcgcttgggatagtttcaatagtgcttggaatcataattattaaaaaaactgagtatattatagagatattgtctacagcaataggcatttttatgttggtagatggagcgttcaagatacagactgcagtggaagcaaagcgttttggcatcgagagatggtggctcatactcgtgatgtcgtttgtagtggcatttgtgggaatactgcttcttgtgacaccatttgagaccgcaggcatgatagtgagattaataggactgaatttgagtcttgacggaatactaaatttatttgtcgtcagaaataccgttgaaacaataaggaggaatacaaagtgggaaatttaggacatcaggcagcgagacttgctgcatcaaaaatatgtgacaacattgtaaaaggactttgcaaggacccggagacagaggttgtaaagcttatcgacatgtggcagaaatttatgggcgatgagaagattgatttaaactatgacagtgcgcgcaagatgatctgtgataaggactgcacgctcaacaagtacatgcatcgtcttatcaacgagatagatcctcatgtattaaagacaatcgcgctcaatctgggctttgaggcatttgtttacggcacaaaaaccatccgtaaaaatcgtgaaaagtatggctgcaatgtgccatggctcattcttatggatccgacaagtgcctgcaatctgcactgtacaggctgctgggcagcagagtatggccacaagctgaaccttacctttgatgagatggataaggtcgtaacacagggcaaggagcttggagtatatctgtatatgtttacaggaggggagcctcttgtcagaaaatcagaccttgttaagctctgtgagaagcacagtgactgtgcatttctggcattcacaaacggcacactcgtggatgaggccttctgcgcagacttaaagcgtatcggaaatttgtaccttgcaataagtcttgagggcttctcagaggtaaacgacttaagacgaggcacaggtgtatttgcaaaggttatgcatgcaatggatttgcttaaggaaaacggacttgttttcggtacatcaatatgttacacttcaaagaactataagacagttaccagtgatgattttatcgacatgattgtggaaaagggctgccgctatgcgctttacttccactatatgcctgtcggaaacgatgcatcactggaacttttaccaaaccctaagcagaggctttacatcaaggaccgtgtccgtgagatcagaaatatgacaagcggcaagggaattttcactatggatttccagaacgacggagagtttgtcggaggatgtatcgcaggaggaagaaattacttccatataaatgccaacggcgatgctgagccatgtgtatttatccactactcaggagccaacatccgtacacacagcatgcttgagattttgaaacagccgcttttcatggcatatcatgataaccagccgtttaatgagaatcactacagaccatgtcctatgcttgaaaatcctgagatcttacagcgactcgtaaaggaaacaggtgcaaaatcaactgatttgcagtcacctgagagtgcagagcatctgtgcaacaagtgtaaggagtatgcgcaggcatggaagccatgtgccgataagctttgggcggaggaaggacacagtaattaatgatatttgaaacacatgcccattatgatgatgacagatttaaggacgaccgtgatgaaacaataaaacgcgtccatgaaaaaggagttgccccgataataaatgtcggggcttctattggctctaccatgactacaatagagcttgcagagaaatatgactttatatatgcagcggttggagtgcatccaagcgacatagctgatttaaacgaggaaacctttgcatggcttagggaacagactgcatgggaaaggactgttgcagtcggggaaatcggactggactattactgggataaggagccaaaggtgcaggaaaatcagcgctactggtttaagcgtcagcttgagcttgcagcagaagcatcgctgccggttatcatacactcgcgtgatgcagcacaggacaccatggaaatcatgacagaggcagcaaaaaagaatatccgcggtgtgatacactgctattcatattcaccggagatggcactggagtatgtaaagctggggtattatatcggagtgggaggtgtcgtaactttcaagaatgcaaagaagctggtacagacagtgtcagagcttccacttgatagaatccttcttgagacggactgtccatacatggccccggagccacatcgaggcacgaggaatgattcgtcaaacattccatatgtgataaagaagatagcagaaatcaaaggcactacgcctgatgaggtagagcgcaaaacccgtgcaaatgcatttgaacttttcacgcgtgtaagtgattgagccacaacatgagggacgaaaagcatgaaccgcgaaaattcacgaatataattg

SEQ ID NO: 1480 - DNA, 19799 bp, Unknown
  gut microbiota DNA sequence
ctgtagtatggtgctttcggatcgctaccatcagcaacaagctcctttaactggataccggtcttaaaaacactgtcatattctatcatgctagtgccaatgccctgattatgcaattgttcataaatataatgtccaaatggatcatctcccaatctggtcagatattccaccttgtgcccaagtcttgtaagacctattcctacatttacttcagcacctgacatacttcttgtgaaatgctcacatttttcaagtggtccgggttcatcagcgataagcagagccatcggctcaccaaataatagtgttttcttcataatatatatcctcagataagtattcttatacttttatgcaaaatgaaaataattctttgtattattgtatgagatatcctcaacaagcttaccaagcgtgctttcatcatatggatattctccattttctaccagatttcctatcagattacaaagaatacgtcggaaatactcatgtctggtgtatgatacaaagcttcttgagtctgtcagcatacctacaaaacagccaagcagtccctgattagcaagtgaagtaagctgctcagtgattcctgtcttattatcgttgaaccaccatgcgcttccctgctgtatataacctgcctccggaccatgctggaagcatcccatcacagatcctatagcagcgttgtctataggattcagactgtaaagtatggtctttggtaaagcatcggcttcctgtaaaccgtttaataaatccgcaagctgtgctgacggtgtatagctgtcaatgcaatcgcagcccgcatttgcaccaaatgatttgaacattttgctgttattatctctttttacaccatagtgcagctgcattacccatccaagtctcttgtattccctgcctataaagagcagaaatgctgtcttgaatttcaggtcttcttcgtaggtgatatcctcacctgcctgcgctgatgcaaatatatcctctatctctgcggctgttgccgggacatacattgcatagtcaagactgtggtcgctcgcacggcatcccatctgattaaaaaactcaagcctctttatcatggcagccttaaaatcatcatagctgcctatatccatctctgcagcacctgcaagccttcttacatatgtagcaaagcccttatcggcaatcttcattgctgcctcaggtctccatgccggaagcacctgcacattaaagctcttatcagcttttatctttttgtgccattcaagtgaatcagccggatcgtctgtagtgcacagatgagtcacatttgatttaagaatcattccacgtgcactcatatcctcctgctgcaatacggcattgcatttattccacacttcttcagctgtatcaccatttaacactccgtgatatccaaaatatctctgaagttccagatggctccagtgataaagtggatttccgatagccttcggaagtgtctcagcccatttctggaatttttccctgtcagaagcatctcctgtgatgtatttctcgtctacaccatttgctctcatcagacgccacttatagtgatcaccacccagccagacctgcgtaatattttcaaatcttatatcctcagcgatttccttcgcatctatatgacagtgataatcaataatcggtgtgttttttgcatatttatgaaaaagcagctttgctgtctctgtctcaagcaggaaatcatcatccataaattttttcatggtatttatccatccttccaataattgagttctatgcgcgaatcttatttacaagctctacagcttctttggtcatctgctcaatcctgtcaaactcaccgtcctctaccatagaaccctttaccatccagctgcctccacatgcaatgatgcagtcattacacagataatcagccagattgcctgcatttataccacctgttggcataaaacgtgttcctgcatatggtgccgcaagtgcctttatggctttaatgccacctgatgtttctgccgggaaaaacttaactaccttaaggcctctcttcacagcctgagccacctctgttgccgtagagcatcccggaaataccggaatattcttttctatacagtaatccacaatttcaggatcaaagcctggacttacaataaattttgcgcctgcttccatggcctcatccacctgctctgttgtaaggaccgttcctgcacctacaatcatatcaggatattcgtctgtcataatctttatggaatcctttgctgccgctgtacggaaggtaacctccgcacatggcagcccgccctcacacaaagcctttgcaagaggctttgcatcattggcatcatttaatactacaaccggaactactccgagtttttctatgctttctgatatattcattgtcattcctccataaacatgaagtataaaatctataattaattattagacacgtacttgtgtaaagttgttcttacggcaccaacacctgcaataagttccttaaaatattttacaactcggcataaaagacctgcttctgcaaggtttacaccaaatatctcactctttgcaagaattggaagtatctttttctctgcctgctcatcattccattttatatccttaagatatggtgtaagctcggcaagcattggatctgagctaggctcaaatgcatttccgttatcatccactgccatgagatatctgagccatcctgcaaatacaagcggaataagcttaagatctgatgcttcaagctcatctgatgccatatatgcctttattgtctcaccaaaacgtattgcaagcttctgtgatgtatcagtggcaattcgctgtggtgtatcaggcatgaatggatttggaagtcttacctcaagtactgtttttatgaatttctttggatcaaggataccgggatttaccacaacaggaagtccttccttgtaaccaattatctctatcatctttctaagatcatcatccttcatctcctcagatatcttgtcatatccaagcagacatccatatattgcgagtgctgtgtgaagaggattaagacacgtacataccttcatcttttccactttatcaacagtctcacggtctgtgaacatgagtccaccggcctcaagcgcctctctgccattagggaatttatcctcaataacaagatactcagtctcttccgcattgacaaacggtgctacatatgtattttttgatgtgataaccggatcaagaccctcaactccgtcatcaagcagcattttctctacatttgcatcaggacgaggtgtaatcttatcaatcatgctccatgtaaacgacaccttatctgaattaacataatccgcaaagcctgcttctgccacgccatttttactccatgcctttgcaaattcatctatagcggcataaagcttgtcaccattgtgtgaacagttatctgtacttaccattgcaataggctttgctccgttaacatatctgttgtacaaaagtgaagcgaccttgcccatatagcttgatggcttatccgggcctgcctcaaagtctgctgccacatctgccattgtctcaccctttgcattaaccaggctgtagcctttttcagttattgtaaatgttgccatctgcaatgagtcattggcaaaaatttcttttaatctgttgtatgctttctcgtctgcggaatcaagcggcagagcctctgctacacttgctaccacatccttatcgatgcttccgtctgacttgagtgtcgcaacaagtccaagattatcatgaggctcatacatcttctttatgatctcataatcgaagccctctgccacaacaagtcctctgtctattgcaccaacattcagcatattctgtactacacgggcatgaaatgcacgaaacagatttcctgctccgaaatgaatccagaatggcttacttttggtgttctctctcatcttttcaatgttatattccgggagcttatagcctttttgctcccattcttttctatctgaaatgccctctaatgtcagtttcatctcgactcgccctctcttattattattttgctgatgacttatctatcgcttcccaaagtccgttcaggtaagctgcaccaagtgctctatcatataatccgtatcccggcattgccacctctccccagatcattcttccatgatccggacgtataggtccttcaaagcctatatcatacaatgccttcatgatctcatacatatcaaagcttccatctgctgataaatgtgctgcttcctcaaaatccctgtctgaattaaacttcagattgcgcacatgtgcaaagtgaatgcgtccctttaatgaacgaatcatatcaggcagatcattctcacgatttgtgccatatgagcctgaacagaaggtcactccgttgtgcgggttatcaaccattttcatcattctttggatattatctttgttgattatgattcttggaagtccaaacacactccatgccggatcatccggatgaattgccatatttatatcgtatttgtcgcaaaccggcataatacgctccaaaaagtatttaagattttcaaaaagcttctcatcatcaatgtccttatacatttcaaaaagctcttttacgtgagccattctctccggctcccagcccggcataatgcttccattggcatctcctgctatggaatcaaacattttctccgggtccaatgcatcaactgcatcctgattatatgcaagtactgtagaaccgtcaggacgctttcttgcaagctctgtccttgtccagtcaaatacaggcataaaattgtaacataccagatgtatgtcctcttttccgagattttcaagtgtttctatataattatctatatactgttctctctccggtacaccggtcttgatagcatcatgaacattgacgctctctattccagatacatggaggccggcggcctccacctcatccttcatagctttgatgcgttctctgctccatacttctccgggctgtgtatcatacaatgtagtgataacaccctttactccgggaatctgtcttatctgctcaagtgttactgtatcgaattttgaaccgtaccatcttaatgtcatttccattatggtttcctccaaagctattaaataatcttaacccttaataccatccatcgcgattccatctaccagatatctctggaatatgatgaagaatatgatagttggtaacagcgataacactgacatagcgaaaagtccgccatagttattgtatgtactaggatcaaggaacatattaagcgcaagtgatagtgtaaacttgcttgttgtactcatgaaaatgagtggctggaagaaatcctgccaaatccagtaaaatgcaaagattgaagctgtaataatagaaggctttacaaccggtgcaaggatcctaaagaggattgctattcttccacaaccatcgatctctgctgcctcatcaagctcctttggtacacctctgaaaaactgtaccagcatgaagatgaagaatgccgctccaaagaaccatggaagtataagtgctattcttgtatcaataaggtttaattttttaagtacgatgtactgaggtacaaccattacctgtgaaggaatcatcatagttatcattacacatgaaaaccagaaatttgatcccttaaatttaattcttgtaaatgcataagctgcgaaaagtgaaaccattacacatcctataacacctactacagttactattacggtgttgccgaggaatgtccaaaaagacactcctcctacacctgctaatgcacttttatagtttgtcaccagatcgaattgctccggaatgagcgaatacgcatccttgaacatcgtagcattgcttttcattgagctggcaaagagccacagcagcgggtagatcatgataagacctatcgcacatgttactacgtgaaataacactgaattaagtgttttcttttctttcattcccatgttattcgtctcctcctgtctcataatgtacccagttattctgtgtcttgaataatacgatagtaaataccgcaataatgattacaagtatccatgcaagtgcacagctataacccatatcaaagtatgtaaatgctcttctgtacagatataatacatatgataatgtactgtccaaaggaccaccatctgtgattacgtagctctccgtgaatacacggaatccgtttacaatctgtaaaataagattgaagaatatggttggtgtaagcattggaagtgtaatcttccagaacattgtccactgctttgcaccatcaaccatagcagactcataaagtgaacccggaatctgctttaaggctgcaaggaaaataagcattgatgatccaaactgccatacacccataagtatgattactccaagtgctgtatgtgggtttccaaggaatgatgccttctggtttatgccaaatactgagagtaatgacattacaacaccctggtttccaaaaatctgtctccatacaattgatactgcgatacttccaccgataatcgaaggaatataataaattgtacgatataagccgagacatttatgcttcttgttgagaagcattgctacaagtaacgcgaatgcgagtcttagcggcacaaggaacaatacgtatatgaatgttaccttgagcgcctgtctgaatgtctcatcctgtgtaaagatacgtatatagttatcaaatcctatgacctttgcatcatttagcaggttgaagttggtgaatgaataatagattgatatcaacatcggtatgaaccacatcagtaaaaatccaaacatccacggtgccagcatgacatatccggctatattatcctgcttcttatagatgctttttcctttagcctttttcttcatctaaagtttccacctttctgcttttatattctattgagcgttgtttctctcaagaattgcgttagccttctcacggaactgcttagcagcctctttagatgtgagctgaccatataatacactgtttccggctgatgcaaatgcctcattaacctcagcaattccacttggatctgctgccggagtctcacctacaactgctgataccttgtctgtatactcaaaagcttccttctgctgctctgaaagcttgtcacgttcaataagattatcacgtacatctgatgatacaggtgttcctctttctcctaagagaatttcatttgcttcatttgagtttacaaaccagttaataaacttagcacactcttctttaacctttgatgtctcagatacgctgaagaacataccaggcttaagccataatcctgaatcctttgcatttggcattactgcaagcttaaggttaggatttgctgagctgactgttgttgggaatgcattccactcgatatctgtagcagcttcgtcagtaacaatcggtaaaccttcttttccaagagatgctatctgtgtctgctcatctgcatcaggagctacattatcatcagccatctttttccacatatcaaagaaatcagatgtaatcttatcgtcgtcatatccaagtgctgttccatcctcattgaataatgactcaccctgtgatcttacccagtaattgaagatatttacatcgccaaagataccggctgttgctgcaagtgcactaggttttcctgttgactttgcaactttttcatttaatgtaatataatcatcccatgtccagtcatctgaaggcacttcagctccagcctgctcgataactgtcggattgtatgttaccgcaagtgctgtagtactaagagggataccaaccgtcttgccgtttgaatcgcctgtcttcatgatattcttatcgatagtgcttgtatcgataacaccgctgtctacatattctgaaagatctgcaagtgaattattctttgcatatgtagaaatgtaaaggtaatccatctgtacaatatcaggcatgcttcctgatgctgcctgtgtggataatttctcaaaatatccatcccatccggccggaatagcctcaaattttacattcggatgactttctgtgtagagatcaagcaccttctgggttgcctcatgtcttgcgtcaccgccccaccatgtaattttgatggtcacctgatcatcagagcctttcttttgtgtgttgtctgttgatgcgccgccattgccacatgcgcccatcgacattgccatagcgcctgttaataagacagctaaaagtttgtttgttctttttctcataggttttcttctcctttgctttgtttgtaaaccaattataaattctgtataaaaaaataaaaatggaagaatcagatttagcttttgaataaaaccgactttccatttttatgttcaactgcaattgcaattatccgatattaaattttctatatgtctgtttttttcaggttttccctgtattctgttggtgtcatgccacaaacctttctgaaggttttcgaaaaatactgtccatcagccggatatccaatgagctctgtcagcatggctatcctcatatccggattgtactcgagcagccgctttgccatctctatacggctctgctccagatatgctgaaaatttcagatgcatatttctgataaatacccttccaaaatagtcctcattcataaataaaatgttttttgcaatgtactggatattgagctctgtgttatcgaaattgctgtaaatcacatcgagtattttctccatacgctctttttccttaccggtctcatatatattcagcgtttctgctatccacctgctcacctcagtaatcgcgctttcatcagaattgattccgcctatattcagcagcttcagcttttcactgcccacatagctgctccaggttactataaaggcttcaaatatcctctgtttttcatcgtttgacagccctatgctctgaagctttttcatggcaagtgttatctcaaaaaggatattgtcatacctatctgagctttttagtctgtcaaaatcaaaataatatgtattgctctctgcttcattttgtgtcggatagcacaaaagccccgcatctgttttattatcaaccatggtaaacagatacaaaagctgtttataaagctcatgtgctacagagatatctccctcgagactggctgctgatgcaatagcttttgacttcattctggcaaattcctgcaaggttctttcaaccgccttactaagagaattatccgtacagacatcaattgcaaaaattaccatatcatctacatatgtaaataaaggcattgttgccatctgcagtatctctccaagtatatttcccaatataaactgctctatatattcaaagccggacacctcatttttcattgcaagcagacgatagctgtctccatttgccggaaaatccttcttaagtgccattatctcatcatcagacagcctgctgcctgtcaaaaggcgcctgaagagttcctcctttgcatgaggcagaagctctcttttaagagtgtgatactctcttcttttatctacctctttttttgcgtcattcatgactgcaacaattttatcctcgtcacacggctttagtatgtagtgcctgattccgtattccatagcctggcttgtaaactcatactctccataacctgacaatacaacaactactatatttctataagtctcagaaagcttttgtatcagttcaataccattcataacaggcatctttatatctgtaagcactatatccggcacatccttttgaatcttcccaagtgcatcagctccattccatgctgtgccgcacagctgtatatcatacttatcccattggataaaatgtgccattccctctctctctatctgctcatcatctacaattaaaagcttatacatcttgatccccctttgccctcttgtgtagtttgattgtaacattagttccttttcccgacacactgtctatgtaaaagatactgttctcatcatccattttaagccgctctgatatatttttcaggcctattccatgtcccttaggcttgaaagtatagcttctgacagcttcaagctcttcctcgctcattccgacaccgtcatctattacttccatcactatcgcatcagcattttccctgacactgacagttatggtgcatatgtccagactcacctctgctccatagctaatggcattttcaacaagaggctgtaaaatcattcgcggcatgatatatttgtcaagtgcaccctctgtaaatatctcaaactttattctgtcctgatacctggactgctgaattttgatatagcttttcaccattttaatttcgtccgaaattatggcataaggagtctgcgaaaacgaataatgtaatatatctccaagctccactatcatcctgccggcctcttcatttctcttagcccttatcatccagtgaattacatttagcgtattatacaaaaaatgcggatttatctgtgctctgagcatcttgtacttcgtatctttaagcagcagctgtttctcatagttttcatgtatgagtgtatccacggtctcaagcatagtcctaaactctctgctaagagtacctatctcatcctgtctgtctgtattagtgagcatttctcttgctccctgaaaatcaccgttctccactatctgcatggaatctgtcagatgctcaagtggactgacaataacaaccgacagcttcttcatgaagaaaacaagtgctgtaaacacggcaagaaaccctaaaataagaagtgtacgcactgtctgcacctgtccgtatatatccgaatacggaaaaaagctcacatatgtccaatctgttttagcggaatacaaatacgaaacaaaatattttctgcctgattgcttgagtattttgtagcctgagtgctccacatattttggaagatcatcaagcttttttatattctcatcctcatatatcgcacaattcttattgtaaacatatattgcagccttgtttgatgacagactttccttattttcagaaattacgttgccgacatcacacacaaaaatcagctttcccatatccgagaggctcatgtcaagtctgtttctgacaacccttccactaagcagatacggacattcctccgttggcccatatgtggtatatgccccttttccctgctccatctgttttttaatagcagtaaagctctcgccagacacatcccaagcggctgttccaacctctacagtattaccatacaaatccacaaatattatggattttacacagctctcgggatcatattcattaagaaggattctccttaaatcccttattttctgattgtaatcaagtgatggatattcaagcaccgacaaatcagacagtgtacgctgcacaagtgcatccatggaaatactgtaattatttctttctgcatcctttaagccacggttaacattttgtgaaaaataatccagctcctgaagtgatttgtcatagagctcctttgaataaatcctaaagcttatctgcgtcagcccaagtgctatgagcaaaaaagcagatgcaaaggttatatagaccataagcattttatgagaaatacttaaatcagtaaattttttcttcattttatctttcagtttatctttcacaattcgccacctcgctttatcatatgatactaaaagataacgattttctcaacacatagatatacaaaaacttgtgacgcacgtataatatgattgattaaagggtcaaatcacatatctccatatcgttcctccataagctcatatagttctaagtccttaaggtgattttccatgttgcacacaagcacaactcttctatcctcttcactatacaagaactctctctgccacagatagaaatgaggtccgtctcctaagtttcttatgtagctcatgagtccctcaattacccaggcagtctgttttatatctgtcaggcattcatttgcatagaagtcatgccatttgccgtgctctctgtcgcgcatatctctgtctgctctaagatatgcttttctcgcttttcctgccttataaaatgccagcttgtactctcccgcaaatgcctcgcacaatgcctcacacataagcaaagctccactgtagcagttatagtatatttcagcctgcagataaagcgaatcctcaaacaaaattctctcatgatctatgagccttgcatcaagtttttcatagcagcaaagcagctgctcatagctctcttttcctttagcgcagagcttcttgtaccactcaacctggccttcaagtgttttgtcatcacaagcccacaaaaggtcctctgctctttgtgatttatccttcataaactgacttataagcattctcgctacatgatttgcaaactgttctcctgcatggtcatcctcatgctcgccatacttaagcgcatgctgccaatactgtctgaagcattctgcgatttcagtaatatggtcttctccataatacgaagcgatatagccctttagatgcttatctatatcgacatccccatctctccacatatttgctataaaatccagataatatacatgtggcttcacatttgaacaattgataatccagtaatccttcacatgatgctcaagcacttttttaagctcgctatgtacaagctttggtttattcggaagcattgttatatggtttgccgcctgcaaatcataaaaagatacatgataataaattccatgtcttccggtattattttcctttgggagagccggtattcttggattatgattgccctgacgccttgtcaccatctttccaaagccattgtctgcccatatttttatcacatcatccggcagcttcaggtaaccgtcacgatacagctccatagtctctccgtacagatttgtgcagtactgcgcatcaggtatttcattttggacatagtctctttgaagtccaatgagcttgcccatcaattctccccttgactctgatgtctggtatcttggatcattatcccagaacggacagtctccctgtcctctgaagcctagattccatattacatcaagcttcttctgctcatctattccctccttccaaagctcatggaacttctccggatattcatcatatgatggtgtcagctcaggatatcttctggcaaacataggtgctcccagtggctcagcatgatgatgtgtgatacgaagccccatgtcagctgcaaggtccctgtatatatgtgagttcttatcagtaccgggtataaccagatttccaccgcatctaagcaatgcctcaaaaaccatttcccacggcatatcctttttcctgtcaacataccacttgtgtataagcacctcatcatttacaaaccagcccctgtacttaacggcatatggctttgaggtgtatgcatattcaccggaaatacgacagccctttttcttaataaatacctggtcattccagaaccagaatggaagcacaccaagtatatccctgcttatatgatatagtccatatacaaatccaagcgtatcagaagcgtatattacgagcatattgttatcacattttatctcaaactgctctgcttgcatattttccataataaggactatatcgcagcccttttcatcagaatcacagcacacctttcttatatcccgctttacattctcaattgccctcattaccggaacagctgaatccatatatataatttttgtatttacatttatctgcatttccatctttattttacctcctgcctattcagcctgattttcttatttaataatatttcacataaatattacatgcttaagctattataataaacgtacaaaattgagtttccatttgaaaaaaacatacttttttcaccggattctacaagtcggatttttccaagtcacaattcgcttatattcattcctttttgtcaaagccgattatataattacctcacaacaacatcataccgaaggaggtgcttgcgatgaaaaatttatcctttaaacaacgtattgtatacctatgggattattatcgctaccatgctttaatagtcattttttgtatagtgtttttttgttattttctttcccccttacttgcaacgaagaaacatgacttactttcaattgctatcatcgacagcacccagactgcaaaagaagactgttcggctttgtccgacgatcttacctccctacttggcggtaacacaaagtatgatgctgttcatatagatacctcaggcacaacatatgacacctcttcttcctcaacaattaaactatccatattgctttcttccgttggcgaaaatgacatagtcatttgtggaaaagagctatatgaaaaatacaattcaaagggtgcattttcaaatgcctgtgatatcagcaactgttcccaatgggtgtcttacggctacacagactactccggtgtctatgcctgtattcctgtgagctgtaagcatcccaaacaggctgccaaagtaattgattatctaaatgccaaataacaggaggattttttaatgaaattattttctatggatggtaaatttttagaaacctttaataagattacagatttggttacactaaatattctctggctgctctgctgcataccgattattacaatcggtgcctcaacatcagcactttatcaggttaccctgcagattgcagaaaacagagattcatatatcacaaaagaattttttaaagcttttcgtgaaaacttcaggcaggcaactattgtttggctggctgtaattgtgacaggctttgttttattgtctgatatgtttatcatatctcatttctttacgggctctgatatgtctgtaattttgggactgatatttatgattttaattctcttatttgcaggctccatgtacttttttccggtaattgcgtatttcagaaacagtaccaaaaagattttcagcaattcattcaggctggcattctcgaatcttagaactaccttccagctgtttttaattggcctgattcctgcacttgtgatgattctttttcacgaaagaataattatcggaacattcctgcttattgtaattgttcctgccttatcagttttttgcaagagcgtactactctcaaagctgtttaagacaattaaagtagcaaattagttattttttgaatatatactttcccttcctttttacaaacagcgcagatatcacaattgtgatatctgcgctgctattttacattatttttctcctaaaaacactcaaatggatattcatttaatgcagccatacagttttatttaaactactgctgcacattaaacgctttaattcccggataaaccgcgctctttcccagctcctcttcaattcttaaaagctggttatactttgcgacacgctctgaacgtgaaggtgcacctgtctttatctggcatgtgttgagtgccaccgcaaggtctgcaattgttgtgtcggcagtctcacctgagcggtgtgagctgattgctgtatagcctgccttgtgtgccatcttgatagcctcaagagtctctgatactgaaccgatctggtttaatttaatcaggattgcatttcctgctccaaggcttattcccttcgcaagtctctcagtgtttgttacgaacaggtcatctcccacaagctgtaccctatcgcccagacgcgcagtaagcttctgccagccttcccagtcctcctcatcaagaccatcctcgattgatataataggatatttgtcacagagctttgcccagtgctctataagctcctctgaggtgtactctgtgccggcctttggcagcttgtaaaagcccttgcccttttcactcttccactctgatgatgcggcatccatggcaatcttgaaatccttgcccggctcatagcctgccttctttacagcttcaagaattgtctcgatagcctcctcgtcagatttgagtgctggtgcaaatccaccctcgtcaccgactgacgtggcaagaccgcgctcctttaatatggctgcaagtgcatgaaatacctcagcacaccatctgagacactccttgaaggaaggcgcacctaccggcataatcataaactcctgcacgtcaagtcctgatgagagtgcatgacatccaccgtttacaatgttcatcataggtacaggaagtctgtttcccgagataccacctaaaaatctatagagaggaatatcaagtgatacagctgccgccctcgcacacgcaattgatacagcaagaatggcattagctccaagcttagacttgtcctttgtgccatctgcctctatcatagccgcatctattgcatagatatcacttgcgtccatacctgtcaatatgtcgttgattacagtatttatattttctactgccccggtaacacccttgcccagatatctgctcttgtctccgtcacgaagctcaagtgcctcgaactctcctgttgaagctcctgatggtgctgtgcctcttgcaacagttccgtcaaccagataaacctctgcctcaactgtaggatttcctctggaatcaagtatttctctgcccactaccttttcgatttctaaataattcattatgaacctccttatgttttttctgattcaattttatcctacaatacagtttctctatgtcatgattgtagaattgaatgcaaacatgcatcgatgataccttttgaccctttaatcataaaaatacatatgtgaaagcctgccacatatgcatatatttataaataaagaaaaatgctacacagttagtttaatctaacttatgtagcatttcaatagttcataatgataatatttcccaattatagaaatattatgttctcacatatcattttaaatctatacatcctcaatcattgcttatatatagcacatctttagttactgttcacacgcaagcttgacaccacgctgtcaagctatgcgccatagtgttaattattgagtgattacagcccctgcctcaatctcacgagcaacatacacaccgcttgccgacgcatgtgaaagtgaatgtgtcacaccgcttccatctccgatgatgtaaagccccttatatttgctctcaagcttatcgttaagttctacctccatgttgtagaacttgacctctacgccgtaaagcaaggtatcgtcatttgcagttcccggtgctatcttgtcaagcgcgtaaatcatctcaatgattccgtccaggattctctttggaagcaccaggcttaagtctcccggtgtagctgaaagtgtaggcgtaacgagtccttcctcaatacgcttctcattgcttcgacgccctctcacaagatcaccaaaacgctgtacaattacaccgccaccaagcatatttgaaaggcgcgcgatgctctcaccatatccgttgctatccttgaatggctctgaaaaatgcttcgcgacaaggagagcaaagttcgtgttttcagtctgcttgtctgctccctcgtagctgtgtccgtttactgttactatgccgtttgtattttcatttaccacgatgccatgcggattcatgcagaaggtacgcacattatcctcaaaaagctgcgttctgtatacaatcttgctctcatacagctcatctgtcagatgtgagaaaatcagggccggaagctcaacacgcacaccgatatccacacggtttgacttggttgggatatcaaggtcattgcagaccttctccatccacttgcttccgcttcttccaactgagatgatacagtatctgctctcatatgtgctatccgctgtttttactgcatatccggatacattgtctgtgtgagcctcttgtaaactgcaagcatcagcccctgctgtattctcatcatacagcacctctaccgactcaacaggtgtatcaaaataaaaatccaccttatccttcagatgtgcatacatattttccagaacaacatagtttatgtcagttccgagatgtctgaccgatgcatccaaaagcttgagcttattctgcatgcagacctttttgagctttgtgccggctgtagaataaagctttgtgccctcaccgccgtacttcatattaatctcgtcaacatattccatcagatcaatggccggctgcttgccgatatgctcgtacaaggtaccgccaaaatcatttgtaatattatattttccgtctgaaaaagcacctgctccgccaaaaccgctcataatagaacagctcttgcaggaaatacagttctttattttctttccgtcgataggacattttctcttagcaagctcatgtcctgcctcaaaaaccgctattttgcagtcaggattcttctcgataagctcatatgctccgaagatacctcccggtcctgctccaatgattatcacatcataattattcatctatcaattgcctcccataatacgttgctgtttgtacgcccaaggtggcgcacgccaatcacttatgatactatattttctccattatcgcaagagcaatttctatattccagcaaatctcccggctgacagtcaagtgcttcacatagctttgcaagcgtggataccttgattgcctttgccttgccgttttttaaaattgatatatttgccatggtgattcccacacgctgcgacagctccgtaacactcatctttctctttgcaagcattacgtctatgttaaaaataatctcgccttccatgtatctctcccgctcaaataaaactgtagcgcacacgctatattgtcaaatcactctgctcctgcagatctgcggcctttaccacaagatgtgacaaaaccgccgccacgaccgatgccacaacacaggcaaacactatgaacacaagagccagtatcacccccggatgattcacatatatcctccacatgcagacattcacaacaaaaaaatacaatgcatcaaacagaattattttcgatgccagctttatatgtcttgcattctctaatgaaaacgacctgtcttttccgatatttacagctaccctccagcccagatacaatataacatagcacggaattgcactgatgataaacagaacaagccatggtatatacatatcagaaatctgaggatcagacgcaataagcacatgccctatccatggtatggcaaccgcacagaccactaatccgcaaagtgctaccgctattattactatctttaaccatttttcaagttctttttgtctcatttattcaccttgcttctcattgagaagtccatactctgcaagaagctttttttgatactccttatcctttgaagctttctgcaattcatcatatttgccttcggacaataaaatctgatttagctgattaatcaattctattccttgttctaatccctgttctaagccttgctttattccttgttctaagccttcctcgatagcatcagctctttcaagctcaagctgcctgtcaaattcataatttaactgcatactcttcgtcacctcacttctgtaagtctttagaaactccttcagaatatcattgtcgatacaatagtctatagccttctcaatatctatagcaagatcatcaaatgccccgtctgcatgatactctctgaccttatttacaaatg

SEQ ID NO: 1481 - DNA, 414 bp, Unknown
  gut microbiota DNA sequence
ctgttatctattgataactcaacagtgaaaaactctctactcgatttccttagaaaggaggtgatccagccgcaccttccgatacggctaccttgttacgacttcaccccagttatcgagcctgccttcgacagctccttcctttcggttaggtcactggcttcgggcattcccaactcccatggtgtgacgggcggtgtgtacaagacccgggaacgtattcaccgcagcattctgatctgcgattactagcgattccagcttcgtgtagtcgggttgcagactacagtccgaactgagacgttatttttgagatttgctcggcttcacagctttgcttccctttgtttacgccattgtagcacgtgtgtagcccaagtcataaggggcatgatgatttgacgtcatccccgc

SEQ ID NO: 1482 - DNA, 45651 bp, Unknown
  gut microbiota DNA sequence
taacagtatatctcggaataaaggaatgggatggtccaaggaagctgtcagatatgtttggtgatgtggatgaggagcttctgccatttataccggattacaggattaacctgctggcaccaagggagataacagactttaccggattcaggacatcaatcaggcagcttttcgaggtactgcagaatgcatatgataaagaaaagatgcaggaagtgcttcagaatgatgaaaagtttagcaatgtagacagagagacggttgaggcaatcaacctgtttgcaggaacagatatagacatagatgagaaagaagaggtgattgatatgtgtaaggcgtgggaagagcagaaaaatgaaggcagagaattaggtagagaagaaggtcgagaagaaggcagaattcgtcaggcaaaaataacagctttgaaacttcagaaaaaaggtcactcaatagaagatatagctgaatgtgtggattttgatgaggaaactgtaaaaaaatggcttgtgagctaatattgtagtgaaatgtaaattagaggaagcaatctttggacgagaactcgggggttgcttcctcttttgctgacagtaggatggggcttcattctctacgaacggcgcgtttcgacggtttcgtcaagcatagaaaatctaaaagcataattcctacagtatcttggcagtgtagcgtagctctcacgaaagtgtatgcgttagccggtcacatgggatgaagcccctcacactgtgccaaaatatagcctgaaatataatttttttgaaaaaatatgatttaaatgcaataaattgattaaaatttggttaaaattgctaaaaaaggcgaaaaaaattatacagcaatgatactattgtactagaaaataacttgcattatgctttgatttatggtacaatgagcgcatacaaaccaaagagatgctgatagggcacagctctttgcacaaaaaaccatgttataatgaaaaggagaaaagaactatggtaaagaatgtatttaaaaagttaggaaagaaacagaagaacaacaaaggtttctctctcgtagagcttattgttgtaatcgccatcatggcagtgcttgtaggtgtacttgctccacagcttatcaagtatgttgagaagtctagagaggctacagatatccaaacatgtgataatattgctacagctttaaagacatattatgcagacgaagaggtttcggcttcggctactgctactacggttactgttacattgactacgacagagctaggaacaggtgctgatacggctgttaaagatgccggattaacaaaagcgaaaattaaaggcacaaagtggactagtgataaaataacaattgtatatgataagaaagatggaactattgaatatactggagattctccatattatcattcagataaggatcaattcaaaaagggccctaaatcagggaaataaaataaaaagatatatagtaatttaattttttaaggaccaccaaccatgaccacagaactgatacccatctacatcttaatatttgcattcggtatagttataggcagcttcctaaatgtctgtatctaccgcataccgcaacatgagacagtggtgaccgaaaggtcccactgcatgagatgcgggtatcagctcgcgtggtacgatatggtgccggttttcagctggctgtttcttcgtggcagatgccgcaagtgcaaagaaccgatatcacctcaataccctattattgaggcgttaaacggtatattatacatagtagtatttgcagtaaatggacttgagcttacgagtatcatctactgctttcttacatctgcactcatagttctgagtgtgatagactggagaacatatgaaattccattcggaatcaatatatttatactgatacttggaatcctgcatgtgtttttagaccatgataactggtctgaatatgtgataggattcttttgtgtcagtttatttcttgaaatccttcttcttgtaagtggaggaagagccataggtggcggagacgtcaagctcatggcatgtgcaggtcttgcgataggttggcagaatattacattagcatttttcttaggatgcatcatcggttccgtgatacatctgattcgtatgaaagtaacaaacgcaggcaacaggcttgcgatgggaccgtacttggcagccggaatatttatttcgatgctatggggtgagaaaatgatatcggcatatttgacactcgcaggcttttgaaaagtgtgttataataaagcgtgcttgacacaggcaatatgacttacggttagataaaagcagagtaaaacacagatataccgaaatttatatagaaagtttgtaactattcagtacagttacaaatgttttacagacgtatacagtgtaaaacaaagataaacatggaggattaggttatggcaaacagggtactcggcattgaaataggggagaaccttaccagagtagttgagattgattacaaagcgaaaaatcccaagatttacaatatgttcggctttccgacaccaccggggatgattgatgatggagtggtacagccggatggaatgtttcgttctatcttatacagcaagctaaaggaaaagaagattgccacaaaaaaagctgtttttgtgttaaattcagcacgtatagcaagcagggatattgagcttccacttgttaaggaaaagcagcttagggaaatgattgcaatgaatgcatcggattattttccggtggatttgagccagtacaagctggtacatcagattatagagaagattgacagaccggaagaaaagaaattacgtctttcggttattgctgtgcctaatgaccttattttgtcatatggtgctcttgcggctgattgcagactgcagcttgtagctcttgactatagtggaaatgccatcaagcagctcatgagaagagagattcccggagatgtgaaggtgactgtcaaggtggatgaggtttctaccacactgactgtaatggatggaagcatggtaaagctgcagcgcaatgtcaactatggacttgctgatgctatagaggaaattcaggatagtgagctttttggagagtatctgtcatttaccgatgcagttgatgtggcacgcagaaagacatgccttgcaataaagcctgatggtacagtgccggatgaacctgcaggcggtggcatggatcctatggggcatgagattgattcagagcgctttaagaagcttcgcctgaatgtgtcatacgcactttccaatctgataagcagtctcggacgagtgatagactactatcagtcgagaaactcagatactcctatcgagagaattttcctcattggcttaggtgctgatttcagcggactctcaaagcttttgaccaatgaactgaatattaaggtagttccgctccagcagtttgacggtatgcatgtggcaaagagcataaacctcgcagaggcaaagctggcagagtatttcaactgtgttggatgctcactgaatccgcttgacatattagacagtaagaaaaacaagggaatcggtgctacgattatggcaggaacagctgcaggtgccatgccatccggcagcgcacaggcagggatgcagggaaaaccacctgttggtcctgatggaaagcctcttcccgtaccggcaggggaggaagccgaaaagcctgtttcttttgcagtgcagcttctcatttttggcttgtgtgtggtagttgcagttggtatcacggcatacagcattttttcaaatcttgttttaacttcagacaatatgacgcttaaagcgcgtgtttctgatttgtcatatgcacagaatatatatgatgtgtacaaccagacaaagaaggactatgactggactaagcttcttgagagcgcctcatccaacaagaatgatgagataacgggcttcgtggatgagctggagcagaagcttccgtcagaggccaagcttgtgaatatgtctgttacgacagatggtgtttcgatgaccatcaagacaggcagcaaggatatagcggctgatgtgattgcacagcttcgtacatttgagagtatcatggtatccaatgtgtcaaccatcacagaggaggttgatgagaccggtgcttcaaaggttcagttcacagtagattgcacatatgtaaaggctgatgacagtgctgcttctgaatcggcggatggcacaggcagtgagccagatgatacatcaaaagatgcgtcatcacaggcacagacggatagtaattcatcatcagatacagacagtacaaatcagtagggggtgttaggatgtcgacaagagataaaaagttacttattatattagcgggtgttgccattttagcactgacatattttttgatttttattccacagtccaataagagggattcactcaagagcgaaaacatgaatctgaaatcacagtataatcagctttcagcacttgcggcaaaggcggatgactacacaaagaagacaaaggatatgtctgatgccatgcagcaggtgtatgacaattttccttcatatttacagattgaaaacggcatcatggatgcagttgcaattgaaaaatctaccaatacaaatattacagagcttacagtcggctcaccgactgccattgatgtgaataatccgacaggtgaagccggtacagattcttcgtccggcagcacaacggacagcagtaatacagacagttcgcagagctctcagaccgctgatggcaacagttctcagtcacagactgatgacggtagtgcagctggtagcggcacatcatcaggctctgcaaagtctacggttacaggctatcagctttatgatgtcagcacagttatggcattcaagacagaatatcatgggcttaaggctatgctcggcgaggtgattggttcatcacagaagaaaactatcagcacactcaatgtgagctttgatgattcgacaggcaagctgacaggtgagatgcttgtggattcatatttcctgtatggacttgataagccatatgaggcaccatacatacctgcagtaccacatggtacaaataatctgtttggtacaacaaactaactgattaatcataaatattaaatgttagattattgagttatgagataacaaaatacaagaggggaggaagcagatttgagaaagctaaaaaacgatgatcgaggagtaacacttgtggagattattgtgtcgattgctattctcgcaataatcgtgcttccttttttgaatgcatttgtcacagctacaaagaccaatgtaaaggcaaaaaacgagatgaatgctacacatctggcgacaaacattatggagggcattgagaagaactccatgaagacactggcgtatcagttcaactatccgtcggagggctttgacgtggcggacggctttaatatatcagatggaagcagtgcatgtgagcttcttaagaagtcgggcaagtttgataatgtaaagaggcttgaggatatcagtgctgagattgtaaacaaggacgatgtcatcactagctgtattcacaagactgatgcatcagccaaaataatcgatacatcgctttgggatttcagggagtcggatgcacacaagtattatttctatatgtctggtgtgcagtcaggcacaaagaaatacaatgctcttgtgacagtggatgcaaaatcggacgcagagtcggacaataaggttaaaaagtacaacatggacgaggtagcggatatgtcggccatggatgcaaattttgactgcatgagtgcagacaagtattctgctacaaatattatatctgcatttaacaatatgaatctaggcttcagtgtacagcagagtgatataaagagaactatcacaattgatatagaaaagagtggagctgcgagcaataaggctaccaaggtgacggtgtcgtattcgtattctatcaataagaatggagtaagaaagacttttccggatccgaatagtgcactgaaggatgattataccatggtgatttacgacaattcttcagatactgtaaaccataatctgagaaatgtctatctgttttacaatccatggtacacatctacaggagcactttacaatacctgcaacgatgtcattataatcaataataaggacaagctggactgcacggtaaatattgtaaagcaaaagactatatcggatcagtcagagttgagcacgaaggagagtacatataaggcatatgtgaaggtaagtgagccgggaaatcgtacaggtcatgcttatactcatatagccaccaatctgaatgtaaatatgggagcaccggataatccactacagccggggcaggctatatatggctttaataacaatgtaattcagaatgatgtaaaggcaattgtcgatataaagaatctgacaaaaagcaatgcatctgaaaggctgtatgatgtgaaggtggctgtatacgagagcaaggcttcactggatgatatatttaatgataaagacccggttgttacgatgaccggaagcatggggtattaattatgaagcgtaacgataaccgtggtgcttcctttgtgatggttgtagttgcaatggctatagtggctgttttagctgtgactgtgctgtggatagcacttatgaacctccagatgaaggtgacggatgaaaaaaatacagataacttttactcggcagagggtgtgctggatcagatatgtacaggtctgcagggagatatttccaaggcttactcagcaggatataccaaggttatggagaattactctgacagcagcataaatgaggccggcagacagagcaactttgcgcaggagtatctgaagagcttaaagaccagcctggagtatgacagcacaggtatgacgtttaataggggaaagctcatacaatatgtagacccgaagcttctcgagaataaagacaatcagccacgtgctattatcaaatcgaccaatgccgatgtaaacggcaatggacagctcaaggtgtaccaaaatcgtgtcgtgctgaacggactgagggtagagtataccgatgaaaagggatttaaatcaataatagagacagacatttctctgggagttccatccatgagctttacagcatcgggaggagttccggagctttttacatattctcttgtaggaaatgaaggactgaaaattacatcaggacttactaaagtaaatctatccggcaatctctatgccggctgcgaaaatgcggcagacacaggaacttctactacgagtgttgttattccaaacaatgccacacttgatgtaaaggataccagctatatgattgcagagggcgatatagaggtgggagactttgccggaaaagatacggctacaataaaaaataacatggctggtgtacacaataacagtaaactttctgttgatgcacagtgtcagctgtggacaagcaacataaatgtaaatggtgcaacagtcaatctggatggcatgacatatgtggcggatgacatgaccttaaagggtacaggctcaaaggtcacacttggcaagaataataagagtaataatgcaaagtacgtcggctttggcaatggaggcgatgacaaggaaaatcctgtcgcaggcgatagctctgctattatcataaacggcagggaggcatctcttgatatgtcaaatatcagggagcttatgttagcaggaactgcatatatcaatacacaggctattgtaaattcaagtggtgtgagtacaccaaacagcaatgtggctatgggtgagtcaatctctgtaaagggtgaccagatagcataccttgtgccgcctgagtgcataggcacaagtggagagggtgcggatgccaaatcgctttatagcaagaatccactctcctataaggagtacaaggatatcacggcaacaggacaggatcagacgaagtatactgagataaataccaatgtggtcagtacaaagacaggcaaggcgctctcggcatatctgccggagggcaggacaatcgataagtgtataaagaaagtctttgttccttctactgataatagtgatgatggacttgtatactattatgtcaatctgccaacgaataaggctgctgagtattacagtgactattttggtgcagacagtgacaagctcaatagatacactaagttctatactgacagcatacaggtaaatgaggctgcaagcatctatactgccggcaattacagcatctacgatggtagcaatttaagccttttgaagggcatagctgatggtgtggacatggatgcacagtcagatgccttacagcgcacatatactgcattaaattcaaagcttttgacgaattatgcggatttaccgacaaatgcagcaagtgtttcgctttttacaaatatagttaacaataccaatttgctgaaaatagtgccaaattccggtaataaacatatatttgagactgagtatcagggaaaaacgtatcaggcaattgtcaaaaacggtaactacacctatgatgcaaatgacaaatcacacaatgtggatataattgttgctacgggagatgtgacactgaatgctgactttacaggtaccataattgcaaagggcaggataatcgtaaacaaagaccagtgcgagattgataatggtacacaggaggtatttaaggcattgcttcttgaaaaggtaagtgatgcagacgatgcactgcacctgtatgatgtgttcatggatggtgccaactatctgggtaatgtttcttctttttcaaataagaaagaggcggacacaaaaatagattatgctacgctcattacatatcagaactggaccaaggagtagaaaacaagcggcttttaaggcgcaaaacagctgcgaaatatttatatttgacatattttgacgatatatacaagggaggaatccaatatgtctgtaaaagaaaaaaagaataatggcggtttttctctcgtagagcttatagtagtgatagcgatatctgtcgtactgataggcgcggcaaccatatccattcgctcagtcatgggtgttgaggtgaagcaatgtgccagaaatattgaatcgataattaacaaaacaagagttacctctatgggaaaggacagcgcagttcttaagatatacaaggcatcagatggtgcctactattataagacgactataaatggtacggaatctgatccaagtaaaatcggaaagagcaggattgatgtatactattccatgaatgatgattatagtggcaagacacaattgaacgtctctgacagtatagagcttcagttcgacagaagctcaggtgcacaaaagccggatagtaacggcaagtactgcagccgtatctgggttcaaaaaaacagcaccgagaaggttatcacgatatacaaggaaaccggcaaggtggtatgtgagtaatttacatagtttaatgcaaaatattttattttgacgcaaggctgttataagattgtatgatgaaatcggagaggaagatgaaccatgaagattttaaagcgcatgaataaatcaaataataggaaaaacagtggctttacacttgttgagcttgtcattgtcatggcgataatgggaatactcggactggctgttacaggctttataggtacgagcacgaagcagtataagtatgctacaaaggacgtagacttgcagtatgaggcacagctgaccatgaatcagataggagatctgataattgatgcgcaaaagggtgttaagtatgagcctgctacggtggcagccccggtggaggtggcatcagcaaaccctgaggcaggttatattgcaactgcatcagcggaagaagcgtcatccgaagaagcatcatctgagcaatcatcatccgacagcaagctgataatctgcaacaatgattgtacatacaatatcatatacagatcgtcagagcacaaaatctatctgcgaaaggatacactggatcctgcaactggtgcggtgaaggctgatggtcagggcaaggagtcacttatggcagaaaatgtcacaggctttacacctgatttaagtgaggcagaaagcaagaactctgtcggacttgttgtggactttaaggcaggagacaagaagtatacttcaaagcagaacttcactatgcgcaataaggtaccgaccggagcagatgtggagtatgtggcaccagtagagccgatttctgtacatatatactatggtggcagagatgtttcaggtcagagcatttcatatgtcagaagagataatagcaatatccttgaatttacatctaaaatattgggtggaaataatccaagccaagaggttatatggtcatataccggcagggctggtgattggagtagtacaacgtttaattcttctggaaatacagcaaaattatctatcggagaaaatgaaacatcaaagcagtttatagttaaggtgacttcaaaagaagatacttccaaatatacatctgtaacgataaatgtggttgatacacgtaattggctgactaatcaagaaatgcaaaatgtgctggtgccaggggcaacactgaaaacatggattgaaccagaaaaagttaaaaatagcggaatagaatacgatcctgacgattttgaatggcatatggaatcctatcaatacatagatggaacgaaaactaaaataaataatgattatattttaaataataatagtgaagaaagagtagattatggtggaggtatttatcttagttatcatattgataagactaagcactggaatggggattttaaccagacaattgctgttacgtctggattcaaaaataaagagtatgatatattgatttgggtaacattgaaatcagatccatctataggatcaaatattattacattaagatgtaggccatataactaaaaggagcaatcgcaatgagcaaattaagaaaaaaaatagtggttccaatatcgctcacacttacaggatgtctcgttgtggcagcttttgtgctgaatgacagccttacaaaggtcgatgcaaatgtagcgttcaatggaatatcggatatagtcagctcacatggcaaggacaagcccttcaacatagtggaggtggtgcctgacaagaaaatggcatccattggctatctgattgacggtcaggagcctgacgattggtttggaacactgtcaaagatgtctgataaagatggtgccggtgtaaaaaacaggtctgcctatatggaaggactgaaaacaaagcttgcgcctatcactaccgaggaaaaggataacacaaggcccctttactatgagccgtatgaggagagctatgtcagtcagggcgatgactggacagagcttgcccttgtagatatggacagaataaacaagggtaccaccggttataagatgacagagcaggcggagggagattataagttcaataccgattaccagcttgcagtaaatgaagagggactgcctacaggtcattacagacaaaatgttgaccattatgttttcatgcagggcgaggatgagacggaagatggctctgatacagagaatgaaaatggcaatcaaattaaggcacccggcaaaagaggctactacagtgttgcttttactgcggtcaagttgccggatggcatgacaaacactcagtatctggtaccgtctgataattcacagaaagctgatggaaatacagacagcggtacagataatacgccagatacaggcacagctgacgatacagttgagaagcatgtggtttattctataaagagcgcatatgccattggttctgctgagggcatgcaaaacatagcaaaatatgacccaaaggcatatatttacaggattgacaattcagatatcacatcaccatatgaatttgttgcaagagctgaccggatggcaagtctgcctgatggcagtaagccggattatgagaagtatacatactgtacggttgagatggagtatgtgcctgcagataaaatcactgatgacgagacctactacgaggtggacactgaggtacctattgagtttaattatgatgagaccggcgagtatggagcagtgcttgatacacagaatccatacgagaagatagatggtggcacaccggataatcagccggcaggtaagaacggcgcagatgatatttcagatgatgcttcaatagctgattctgctacagagaataatgatggtaacacaggcagggtaatcctcactgatacagacggatattttgatatagttaaggacagccagacatatacctatgtaggtaagggaaaaggtgactatataatggaggctgataaaaacggctcgcttgattatcctgtaaatactacacacatatattataagggtggtttcaagaacaataactggttcagaacaggtgtattcaatcaggagggcaagacaggcgatgatgataagactgccaatatgaccttcaaggtaaaaacggtcacacccaaggagcttgagcagatagatgtgtcaacaattgatttactctatctttccggctcaaagtccgtcctttcaaatgatttaggaaacgatgctgcaacatataatactgataatgacatttcatgggacaaggtaaagcagatagtccagcgtgtacaccagagtggtatcatgatgcctgttatagtggataatggtattgtgtggcctgattcgaatgcagattattccagcaacattaaaaagcttgcaggtcttttgagctgtaacaatttcagttccttgaattttacaaaggactctactgataattttattaactggaatgataaaaatgtcataacgtattacaaagttgccagttcaactcgtacacatggctatgtggtcggcaacgaatatgtcattccacgaaactattctcctgatacggatgtgccatttgttttaagagatgattttgcttctgcatttattgcaaatgaagatgaaacacaatttgtcaatgatgctaaaaatgagaattttgacgagatagcagagtacatcaactcagagaatacaagcaggaaaaaagaaaatagtactcttggaaaggacgagtatgcgtattatgacaagaagatttcaaaggcgatagttttaagctatatcatatcgtatgctgataaaagagacattataaatccgacagatagtctgaacatactggatatagagcccggaactgtaaaaaatgagtctgacgctttaaattatgataagctaaaaaattggcttagatcaaggtgcccggagaaaaaaaaggttacaataacaagggttacgagtgcagaatttattggaagaatagaggaccttaataactatgacatgatatatatgggacttgtagccgataatctgaattatagagatggtcatacagtatataatgattggaagatggatgggcttaaatactcaaatgttggtgatattgttgttataaatccgaaagatgtggtaaattattggggatatgatatgctcaagaatggtcatgcgggattgctggatactgattatataaataatggagaggcgcttaatactcagcttacattaagaggaaatggaaataatgctgattatttaactgctccaaacacatatagaggttcaggcaatgatattactaagcagaaggtttcagaattggaggattatataaaggcgggctttcctgtcgtcttttcagatggctttttcagcaatgatagcaagtataaaagtggaattaatgaggattacattgataactgttcaaatgtttttacttttttaagttatgcaaaagataaagacaatcttcttaaagtggacaacaagggaaacttaaaaaataagtcaaatgagccagcggagcttgttacctacctgactactgaaaaacctgaaatattactcaaggagcaggaaaaagtaaaagatacagattatgttgagattagtaataatcagatcacattggaattttcaataaacaatgcaggcggtgctgattccaaagcaagttttaatgcacagctgtttttggattcgaattccgatggtaagttttcgacaaccaatgaaggaatagctgcaaataagataaaattatattgtgatggtactattgtgaatccggtaatgggtgatgatggtaaatatatgtatagtctgaatgcaggtaattataattataaactggtctatgatttgccgaatggctatgtaggagttatgccttggcagcttcgtgtaagtcaggctacaaatagctacagatatgatcagaaatccggatatgtgtatgtcaaaaattcaaaaggcagtcctacaaaagtcaagattcttcagattaattcaaagttggagcataatgagggctttaggggaaattttgatatgcaggcgcagaagaatgatagcaatacaaagtttaataaattacttagtcaagtgaaggattttgatctggatatagaaacagttcgttatgacgacgtacctaaaatggatgaggtatgtgataagctgcagacatacgatatgcttgtgattggatttggtgattgttatgatattgataatacaaataatcatctcgataaaataaaagcatatatccagtcaggaaaaccggtattgtttgctcatgatacaacgtcattttgtaataataaaaatgataataaatataataatgtctggggatataagtttaactctataattcgcgatactgtcggactggataggtatggaatactgtcaaatgagtatttaaagaagggcaatacattaataaagagtactgattcggattttacaaaagctgtagagaccgctgaaaagaataatactgatattgcatatgagccaaaatctggtaatacagttattgtcagacagaatcagggatttacttatgcggatttaaatcagtatcagtggaaagataatggtagtgatcatggcgagtacaggctgtattcagggcttgataattatgatgttgaagctaagactaataaggcagtcaaggttaattcaggacagattaccacatatccttttaagattgctgacgaaataaatatagctaccactcataagcagtactaccagctggatatgaatcaggatgctgatggtgatggtgagagtgatattgttgtatggtataccttgtcaaaccagggaatttatgagcagtctccaaaggatgtaagaaataattattatatttacacaatgggaaatgtaacatactcaggtgtaggacattccgatttctcaaataatgaggatgaattgaaactttatataaacactatgattgctgcatatagtgcagcggttcatgagccgtcaatttatcttaaggagaatgctgataccgattcaaatgacatatctacattatatgcaactattgatgatgccattgaagaagatgcagctaataaagcagatgccagattagatggtgcagatagtacgcaggatgtttattttacggtaaaggattcaaacctcgtacgtaatcagattgatgataaaactgttgtttatatggacttttatatcgaggatccgcaaaaaaatccaaaagatgaaacgattggcaccggagatgataagatttacttaaagaaggtggactgggatatctattcactgaataatgacggaactgaaaatgaactgataaataacagtaaagaaaacagtgaattaaaaaaagatccaagggacttctttgagaataacaagacatataaggtaaaggtaccattgagtgttttaccggaggaagctaattctataaagatttatgccgtaggatatagtaagatttatcagtcactggcgagtggtggggataaagagaccacaacagccaaggcatacaagaccttccagatacagcgtgtaggtcttgcagatttggattagttttcaaaggttcctggctatcacatacttttcgattaagcacaatttatcaaacagagacttatataaaccatttatatagtctctgtttttttactgtttctttatactttctttattgaattatccacgctaattgataaaataaatagtatgcgcacgattgcggatatttttttgcattcgtgtatgggggataattaaccggaaagaaaggaaacgtttatgagtaaaattttcaaaaacctgattccatactggcgatggatcatattaatatttgtttttctcattgctcaggcatactgtgatctggctttgcctgcgtacacatctgacatcattgatgtgggtatccaggatcatggcattgagcatatcctgccagaggagattacctcggaggattatcagatggcacagacatttatgctgtctgacgagaaagaaaaatttacggactgttatgaggcgcaggatgcttcaaaatcagatgacagtgtggcaaaatacaagctgacagctgattcggacacacttgataagctggatgaggagcttttggttcctcttgtaatggcatatcaggcctttcagtcgggggagcagatggatgtggatgcatcagctatcccgcagccagcagcacttgatgataccatgataaagcagataagaagcaagatgcaggacaaaatcgatgcggtgggttcctctaccttaaagtccatgggtgtagcttttgcgacaaagtgcgacgagaatgcgggaattgatgtggatgccaaccagattgcttatctgtggaaggcaggagccaagatggcagcctttgcagcaattatgcttatagcagcatgtgttgtaggctttgcggcttcaaaggtcggtgccgctgtcggcagggatttgagggagaagaccttttcaaaggttgtaggtttttcaaatgccgagattaacaaattctctacggcatcacttatcacgagaagcacgaacgatatacagcagattcagatggttactactatgatgcttcgtatggtactttatgcgccaatagttggtatcggtggtatcatcaaggtggcacagaccaaatccggcatggagtgggtgattgccattgcggttgctgccatcatggtttttattttcacactggttggcattgcgatgccaaagttcaagattatgcagagtcttgtagacaaggtaaaccttgtttctcgtgagattcttacaggtctttccgttatcagggctttcggccgtgagaaggaggaggaaaagaggtttgatgaggctaaccgtgagcttacacgcacacagctgtttacaaaccgtgtcatgacctttatgatgccgggtatgtccatgatcatgtactgcatcacactcggtatcgtgtggattgcagcaggcagaatagacaagggctctatgcaggtaggtaccatgactgcgtttattacatatgccatgatgattgtcatgtcattcctcatgctttcagccatgtccatcatgcttccgagagcaggtgttgcggcagagcgtatcgatgaggtcataaggacaaacagcaccgtaaatgatccaaaggagcctgttactgaggctgatcatagaggtgttatccgtttcaaccatgtggatttcagatatccgggagcaaaggaggatgtgctttcagacatagattttgtggcggagccgggcaaaatcacagctatcatcggaagtaccggctgtggaaagtctacacttgtaaacctgattccacgtttctatgacgtgacgggaggctcaatagagcttgatggacacgatatcagagactacacactaagcgagcttcgcgagtcaataggttttgttccgcagaagggtattcttttctcgggaaccatcgcctcaaacctgcgctttggtaaagcagacgcgagtgatgagcagataaaaaaggctgcggatatcgcacaggcttctgagtttatagagacaaagaatgacagatatgacagctcaatcgcacagggcggctccaatgtgtccggtggtcagaaacagaggcttgccatcgcaagagctattgcaaaggatcctcatatctatgtgtttgatgacagcttctcagcacttgatatgaagacagatgcgcgtcttcgtgcagccttatctgaggttactgggaatgcttccgtcattatcgtggcacagcgtatcagcacgattattcatgctgaccagattctcgtgctcgatgacggtaaaatcgtaggaaaaggcacccacgaggagcttcttaaaaattgcgatgtatatatgcagattgcacagtcacagctttctgcaaaggagcttggacttgatgataaggtggcagaaactgcaacagataaagcagcagatactgcaacaaaaacagcaacagatacttcggctgtatcaggcttagataatgaaaaggagggcatgtaagatgagtgagaacaataacgaacagttcaagatgcctcctaagaggccaagagggccaatgggcagaggccccggaatggttacagagaaggccaaggatttcaaggggtctacaaagaagctcataaagtatctcggcagatactgggctgccatcattgcagttatgatatttgctgcagtctcgactgttttttctgttgcaggacctaaggtcatgggtaaagcgaccacagcgcttgccgagggacttatgaacaagattgcaggaacaggcggcatagattttgattatattgcaaaggttcttttgtttacgctggctttatatgtggtgagtgccatctttatgtttgcccaggggcttatcatgacaggcatcacgcagaagacctgctacaggatgcgtaaggacatcacgagcaaaatcaaccgtatgccgatgaagtatttcgagtcaaggacatacggtgaggtactttcgcgtatcacaaacgatgtggacacactcggacagagcttgaaccagagtatcacacagattatcacatctgttgccactttggtaggtacacttgtcatgatgctgtctatttcaccgctcatgacgctgatttcactcgttatcctgccagtttcgatgatacttatttcgtttgtcataaagcattcacagaaatacttcagacagcagcaggaatatctggggcacataaacggacaggtcgaggaggtgtacggaggccacctcgtcataaaggcatacaataaagaggctgagactgtaaagacctttaaggaggccaacaatgtgctctacaaatccgcgtggaaatcgcagttcctctcaggacttatgatgcctatcatgcagtttgtaggaaatttaggatatgcgggagtagccatctcaggtggtatacttgccataaagaatgtcatcacaatcggtgatattcaggcatttatacagtatgtgaagaatttcacacagcctatccagcagatagcgcaggtggcaaaccagcttcagtcgatggcggctgcatctgagcgtgtatttgagttcctcgaggaggaggaagaggatataacagtggaaaatcccgtaaagccagaccatatcgagggaagtgtagagttttcgcatgtacactttggttataatcctgaccagatcatcatcaatgatttttctgcaaaggtaaagccgggacagcaggttgctatcgttggaccgacaggagcgggaaagactaccatggtcaagcttcttatgagattttatgatgtaagctcaggtgccattcttgtagacggacatgatatcagggattacaacagagccgatctgcgagatgcattcggcatggtattgcaggacacatggctctttaagggcaccattatggaaaatatccgctacggccgtctggatgccacagatgaggaggtcatcgcggcagcaaaggcagcacatgcgcatcactttatccagacattgccgggtggctacgatatggagctcaacgaggatgcgtccaatgtgtcacagggacaaaagcagcttttgactatcgcaagagccattcttgcagacaatcctatcctgatccttgatgaggccacatcctctgtcgatacacgtacagaaatccgtatccagaaggcactcgacaatctgatgaagggcagaacaagctttgtcatcgcccacaggctgtctactataaagaatgcagatatgattcttgtcatgaaggacggagacattatcgagcagggtacacacgatgagcttcttgcaaagaacggattttacgcagagctgtataactctcagtttgaagaatagagaaagcacgggtatcgtgcggttttgcgaatatgcgtggggctgaatggttacataaaattttaaaaaaaatacgctctcgacaaaattcgacaaaatgtgttatcataaaagcatacaatttgttttgacatgacagtaattggcggcataggagagtttgatgagcactttaaatgtcgcagtagcagacgaaaagaaaaatatgcagagtttattaaaaggcatggagtttttaggaacagcaagaagtagtgatgaagcatacagcatgataaacggtaatgccggttctgatgtgatacttgtgtatgtaaagagagcatccggtgacactgagccacttgatgatacatatatggagaaaaaatctcttgagacacaagtgacggatatcattcatgagataggtgttccggctcatataaagggatatcagtatcttaggactgcgatagtgatgtgcgttgaggatatggaaatgcttagttctatcaccaagcttttgtatcccactattgcaaagaagtacaagactacctcaagcagggtggagagagccataaggcatgctatcgaggtggcatggagcagaggcaggatggatacgatagactccatgtttggatacactgtaaactatggtaagggcaagcctaccaattcggagtttattgccctgattacagacaaaatacgtctaggaatgtaaaaatcgtcattatagacaaataaaaccacgttttgataaatttactaggcaaaatgtactcccgcgtgatataatatagtatacattctattggtttcaggatgtatactatattttttatcagattaatcgttgtttaaataactgtaatctggggaggtttcagcatggacaaaattaaaatattaatggccgcatcagaggcaataccttatatgaagacaggtggactggctgacgtagtgggatctttaccaaaatattttgacaaggacagatatgacgtgagagttatacttccgaagtacaaatgtatggatgataaattactgccacagcttaagttcgtctgtcatttttatgtcaatctcaactggcgcaggcagtatgtggggatttttacatcgcagcatgatggtgtgacatattattttgtggacaatgagttttactttgcaggagataagccatacaacaatatatacgaggatgtggagaagtttgctttcttttcaaaggcggtgcttgaggctttgccggttatagattttgccccggatgtgatacattgtaatgactggcagacaggactcttgccggtttttctaaagactgtgtacggctcagacaatttctatgccggtataaagacagtctttaccattcacaatatgaagtttcaagggcgttggaagattaaagaggtggctgatgttacaggacttccggagcacatttttaattcaggggagctggagttctatggtgaggctaattatttaaagggcggcatagtatatgcagatgagattacgactgtcagtccgacatatgcagatgaaatctgtacacctgagggcggcgagggcctggatggcctgatgcttgagcggcgcaggcatttgagaggcattgtaaacggtatagattatgaagtctttaatcctatgaaggatacatatctggataagcatttttctgtaagggaattgagtggaaaggttgttaataagcgtcagctgcaggcgaagtatggtctggctgtggataaggatgtcatgctgattggaatagtttcgcgtctgacaaatcagaagggctttgatctggtggcatatgtgatggaggagatgctttccaccatgaatgtacagtttatagtgcagggcacaggagagcagcagtacgaggagatgtttaattatttccatggcaggtatccgcagaagcttggagtatatatcggctactcagaggaaaatgcacatgagatatatgcaggctgtgacgcatttctcatgccgtctctttttgagccgtgcggcttgagccagcttatgtctatgcgatatggtacgctgcctatagtcagggagaccggtggtcttaaggacactgtagcagcgtacaatgagtacgagaatacgggcgatggcttttcctttgccaattataatgcgcatgatatgctgcatgtcatcaaatatgctcttgatgtgtttgaaaaccataaggacagatggcaggagatgatgcagcgcgccatgaggcatgacttctcatggagggcatctgcgaaagagtatgagaagctttacgacatgctgcttggcaactagtacatcgttctgcaaataacaggccaaataactttcttgaatttccaactatgttcttagaaagtaaaataccggatacatatctatgatatgatatccggtattttgcgttatcgggtatgattataaggttatatgattatcagtagacagtgtctgttttactatcgtatatgtagtaccgctcgccgagtacttcctcgtcgcgtacctctgtagagtttacctcacagatgaattcgcttaggttgcagacatctatatcgctatccagcggcattaccagaaactcatggatactgcttggtatgagcagcatattgccgccgagcttttttgccagcgagcttagcacacccgggtagagtatggcggatgcaccgtttgtctgcctgctgtttgtaaggatatacataggcaggctgtcaaaatcacagactgcgcgcatctgattggcatagccaggacattttttggcaagaaactctgccatgttgattattgagcatggaagtatccttggggtattttgcattgaggcgcggaatagtgtttctgtatctatgccccagcgtgacagaagcgcatctgtgactgtaatggtgccaaattcaggcagctgcgctcctacatatacttcaaatatgatggcaaaatccagatatttgatatagggcatgtcctttagctgcttttggtttttgtcgtagcttatgagctgaaaaattattttctcctttaccttggaaaaatcatcacagaagcttatgtcaaaatcttcagttggcttgaaatcattgtaggtggataaaatggcatcgagaatagaatcaatggatacaccatcaagataccaatggtagtaaggattgagataaatagtcggtgctatattgaatttgggattgataatcaccaatccgtcgtagatcatcccgttgttcttttttacaggatggatagtgagcttgaaatcattgtcaagtcttgaggttatttctgtttctatagtatgtaaaaactctgtgtatttcataaatctccttgcggagcataaaaatatcggatcccgtggaaaagtaaaacccacgaagcaggcgcttcgtgggttttactctatcattgtttggtgtagtttgcaatatgtatttttttacaatttttagacttcatttttgtgacatcatacaaaatatagctgtgcaattcatttttaatccgatttgagcctctgccacagtgtgttgtaaagagttgcgtcatcatcatttaaagctctgtatacttcacagtttttgagcatatcggaaggaggattaatcgcctcattttcctttgtttcctcatcctggttgtcgatgacagactggataggtgatgcatagtatacatattcaaagttgagctgtgcaggctcatcaccgcatatatagttcaaaaattcctgtgcgccctctttattcttgcatgtctttggaatgaaccatgagtcaatccagaggtttgagccctcctttggtacgatatagtccaggttatcgttttcagccatggcggcagctgcctcaccggagtagcacactgcaattgccgcattttcagcaaccatctcatcacaggtctcatccacgtagtaggcgagcacatcactgctttgtttgttcagtatatcaaatgcttcatcgagctttgctgtgtctgtctcgtttatcgagtagccaagtgtgcgaagggcgggagtaaaggcatcacggacagaattaatcataatcatgttgtccttgtatttgccgttccacaggcagtcccaggtatttaggtctgatgcatcagccatctttttattgtatagtatgccgagtgtgccgtagaaataaggcacagtgtactcatgtgtcgggtcaaaggatgcggacatgtcgattatatcctgatttacattttgatagtttggcattgagctgtagtctatcctgttgacctcaccctcacttatgagcttctcgatgatgtagtcagaggtgcagatgacatcgtaatcgatggcaccggacttgtactttgtgtacatttcctcaggctcctcgtattcctcgtatttaatggtgattccggtttcctgctcgaagctgtcgattactgattcatcgatgtatttaccgtagtttagcactgttatggcattgtcattgtttgtgcttccggcgcttatggtaaatactgaaaagctgccgattaccagcattgcaacaatcgcgatgctcacactgcgctttacgatgcgcagctttttagcccttgcaggcttttttgcagcgctgacaggtatctggtttgagttgatatttatcacaaccaaaagcagcagcactgtgaagaaaagtatggttgacagagcatacagctccggctttacgccttttttgagctccgtgtagagcatggttgagagtgtgtttactccggcacccttcgtaaagtaggtgatggagaagtcatcgagtgacatggtgaccgccatcataaagccggagaacactccggggcttatttcaggccaggtcaccttgaaaaatgcatatagaggtgatgcgcccaggtcaagtgcagcctcataggtgtatttgttggtctgcttgagctttggaagcacattgagtatcacataagggatattgaacgtgatgtgtgcgataagcactgtcacaaagcccagattcatgaattttacaaacaaaagcatcattgagataccggtcacgatatctgcattgagcatcgggatgtttgtagcgcccagatagattgtctggttacgtttcttcatggcgcttatacccatggctgcgagagttcctattattgtggaaatcacagccgctagcagtgtaatctgcagtgttgtcgaaaatgccgacatgatacgctcactctgaaagcactttatgtaccagtcgagcgtgaagcctccccatttaaccttggatttggagttgttgaaggagagtactattaatacaacgataggtagatacagaaacaaaaaaatcagtcccatatatacccttgatgctattttttttaccataatgcgctctggtctccttccttatcaaacagattgacgagtgccatgctgattaaaacaaataccatgagcacgagtgagagaccgcttcctgcgccccactgcgagccatggacgaaatcctgttctatgatatttccgatgagcaggacctttccgccgccaagtatctgtgagatggcaaaggatgtgagtgatggcacgaaaaccattacgattccgcttatgacaccggaaactgtaagtggcagtataatcttgaaaaatattgtgactttgttggcgccgaggtcaagagccgcttcgatccagtcgtttttgattctggtcattgagttgtatataggcagcagcatgaatggcagaaagtcatagaccatgccaagcacgaccgctccggaggtattcatgatgttgaagcccggcagtccgagagtggtgagtatcgagttgatgacaccgtttttggacaaaagctgcttccatgcgagtattcgaagcataaagttcatccacataggaagcatgaaaacaaataccacaaagctttggtttttaatctttaagccgtttaaaatcatcgcaagcggataggacagcaccaggcatattatagtgcatatgattccaagccgtagggataaaagcagtgccttgatattggtgtgctgtgctattgcagccacatattcaaatgtgaagcctccgtcagagcctttaaatgcatagtacacaatcatgaaaagcggaagtataataaatccgataatccatatgaggtacggccctgcgagcagctgtttctttattttagacatctatctccaccgccttttcatctgaggactcaggcttgtgcattacctggatgttaaatggaatcaccctgatacccacatgactgccgacctctacatatttggtggtgtgtaccatccagtcgtagccgtttgcctttacctcaagctcatagtgcactcccttgaagatattggacacgacatcaccctgcatgtagccgtcctccgcaggcaccagctccacatcctccgggcggatgactatatcgacaggcgtgttctcaccaaagccctcgtccacacaaggcatttttacaccgagtatctcgacaagcttatcctttatcataataccgtcgatgatattgctgtgtccgataaagtcagcaacaaaggcgttttcaggctcattgtaaatgtcctccggtgtgccaatctgctggatatagccctgattcataacaacgatggtgtcagacatggtaagagcctcctcctggtcgtgtgtgacgtagacgaaggtgataccgagctcgtttttgaggcggatgagctcatactgcatgctctggcgcagttttaagtcgagagcaccaagcggctcgtctaacagcagtaccttaggctcgtttacaatagctcttgcaatagcgatacgctgctgctggcctccgctaagagaatccacagagcggttttcaaagccgtcgagattgacgagctttaatgcatactttattttgtcatctatgtaagccttgctttttttctttattttgagaccaaacgcgatgttttcagcgattgtcatatgagggaaaagagagtatttctggaaaacagtgttcagatttctctcgtttgcaggcacatttgtgatgtcctttgaatcaaacatgatttttcccttgtccggggtctcaaagccgccgagcatgcgaagcgtagtggtctttccgcagcctgatggtccaagcagcgtcagaaactcattctctctgatgtatagatttaaatcgtcgagtacaacattgccgttgtacgactttgtgatatcgataaaatcaattaatttctttcccatggtgtaaacctttctcatgtaattatagtactggtaggacctgtatgtttataatttgctgctgtacccactaaaaatgcggcaggcagtaattacagccctataaaagagcttctgcaggggaaacgtcagaagcttggaggattgctgacccatatgagcacggcatcctttgaagacttattttcaataaaatgctttttaccggctttaaaataaaaggactcaccggcctttacggtgtgcactttgccaccatagcaaagcttcactatgccctttattacatatccaaactcctcacactcctgaggcagatatatttcagaactgccacccggatgaagagtgagcctgacaggctccatggagcgggtctgtgcgtttggaatgatccattccaccttgctgtttttttcctcgtcaattttctcgaaatagtcgtttgccttgtatacaatctgctcaggttccgaatctgtaaaaaactccgccggtgtcatacccaggcactggatgatatcaagcagggtgccgactgacggtgaattctgatttcgctcgagctgggagataaatcccttcgtcagctcagccctgtcagctagctcctgctgggtaagtccgtactggatacgaagctccttcatacgatgtccgatatccatgtttacttccttttctaatacattttatgttatatttactgtaggtttaataatagattttttgtttactaaaaataaaccaacgagataattttaatatattttttataaatgtcaaggggagttttgtaataaaaaaagcacctcattcagataattgaatgaggtgcttttttatgtatgaagccgataaccgggatcgaaccggtggcctacgcattacgagtgcgtcgctctacctactgagccatatcggcaagctatattatagtatcagatataagagtgtatgtcaaatcaaaattttgaggtgaaatttttagagagataattatagaaaggtattgacattaaaatgtatatagtgtatatataacacataaacagttaataaatacagtacggaggtagcatatgaagctgatgcaaaattcaggagtgcccatctatcagcagatagcggacagcttcaagacagatattttggccggcaggtatgagcagggggagttccttccgtctataagagggctggcaaaggacttgaaaatcagtgtgataaccacgatgaaggcttatgagcagcttgcagatgagggactcatcacagcggcgcagggcaagggcttttatgtcaatgcacaggacagtgagatgataaaggaacagcacctgcgcaaggtggaggagtcgctgacagacgcgatagccgcagctgaggtagcaggaatctcgaacgacgagcttaagggaatgcttgaggcattgcttgaggtggataaataaagatatgaaaatgaataaggagaaatgaagatgacaacaaagaatgcaattgaggcagcaaaaatcacaaagaaacttaaaaacttcacactggatgtggagaatttcgcaataccacagggctttgcgacagccttaatcggagaaaacggagcaggaaagacaacacttttaaatatattagcaggaatcaggcttgactataaaggtgaaatcacatactttggacagtattccgacaaacagaaggaaaactcgggagatattaaaaaccgcataggctataccggccccggcaaatactatctgccgcagtggacagttaaggatatagaggaaatcagtaagctgatgtttgatgatttttcagcagatgattttcacagatattgtgaggagcttgcaatattttcacatggcagcattgatatgaagaaagccaacagctcattttcggatggtatgaagatgaagctcatgctggcaggtgtcatggcgcgaaagacagaccttcttttgctggatgagccggcatcgccgcttgatccgcttatgagagataagctgtgccagatgattggcgagtatatccatgagggcaacggaaagcgcagcgtatttttctctacacacaatatctcagatatggaaaatatcaccgattatgccattataatggaaaacggacagattgtggagcagggctttgtcgaggatttaaaggaaaaatatatcctgattaaaggtgatgcagcagatacagaggctgccggtaaggtgctttattcaatgaccaaaaacccgtacggctttgagggcatatgcttggcggaaaatatagataagctcgcaggacttaatgtgacaaaggagattccgacactttaccagataagcgttgcggtcatgaaaaataacacaaagattgtgatgcgctagtgcgaggtgaggtgttatggaaaataagtcaggaagtatgaatgaaaaaatgttttcacaggaaaatgatactgaaagaacaattaataaaaaagataacaaagcaaagaatgaagttctaacatacgtcagggattaccgtgttatgactaatctcaagtatcgtcttataacaaatatactgattccgcttttagcaatttttacatcaatgctaatttcctgttcaaaaacagtctgggcatggataggagttatagtaattgtttatgatttttatatgatgtgcgaggtagtgcaggactatttctgcttcggctgtatgtgcaagaagaatgcatttggcatgcattttttaaagacaggttttaacggagtaagatactttcagaatgcagttcttgtggatatacttgtgagaccgattcgtattggaattacaatactcattgcttcaataccatttattaaatttggagttaatatctggtcgatatttgacattattatgatatcttcaattgtttcggttggctcattaaatatattcagatacatggatctgggaatgtatatttatctgctggcgcttatagttatcttcccggcaattgcaggtagtatagctgttttgatttatggcgcaaaaatttggtttatcgcacctgtgttagcagtggtgcttgtaggagtgatagcagcgacatattatcatatgatggtgcgtatccgcagatcatatgttgatgtgtagaggcattttaaattggaagtatacttgaaaaggagaaatattatgctgaaagatattaaattaggatttaaattattgagatatggctacaaactgaagttgaatgtgatcatgcttgtattccttgcagtaatcggaattgcatccgatataatgagcaaaggaactacaatcataggcgggatatactttatgatgagtggtatgttcacattccagctcatcatgtcgatggatgtatcagagcttatccagtccacatcactgaaaaagaagctgcagatatacattccggtgatgtcaagcacggtaatcaatcttgttatttttacatttctggtggtagaaagagtcattctgatacagtatggagtggcagataagacgcagcttatctacacactttttacgattgatgttgtactgctgatagtatatctgtacacaagcatatgctataagtattatgtacttggctttatcgcattcatggttttgtttatgggcgtttttactgtgctttcaggagcagcgtttgtgccggtttctaatgctgtttttaagcttggactcccggtggtggcattgctaggctatattgctatttttgcaggtggagcgcttgagatattgataggagagctgctttacaagaagcctttgtcagaattcgcattcaggggatttttccgtgatgcaaagtagtgatgttactgttcccgcataacagtgtgacaaacaacatagtgatttcaaaaaataagaaatatttttgtaaaaatattgaaaaaatgatcgctttgtagtatgttatcattgtcggtgcaaaagccggcaatgagactaattaacatattatcaggagaaaaatatattaaatggatagtgacagttatagtaaacaacagttagacgacttgtttatggatatgattgcctactatgatggcgatccaaagagaatccagcatttcaccaaggtgcacagctatgcaaggcttatcggtataggagaggagcttgatgatgcctcgctctttatacttgaggcagcggcttacacacacgatatcggcatacgtgtggcggaggagaagtatggcaggtgcgatggaaagcttcaggagcaggagggaccgataatcgcccagaagatgctctcacagcttggctttgagaattacatagttgaaagaatttgttttctcataggtcaccatcacacatatgacaatatagatggtcttgattatcagatactcgttgaggctgatttcctcgtaaatctgtatgaggatgatgcgggaaaccgtgcaatcgacaaggcatacaagcgcatattcaagactgaaacaggaaaaaagatttttagactaatgttcggatatgaagaagaggattagtatgagccgggccgggaggagacttccggcccttgttcgtattatgcagcttatatcagaaatagtaattaatcagaatagtaaatatgcagaatagttacctgaaataatatttggggatatgtcaaaaatttttgaattttgagaaagaaataatataatatggcaaataaaattaactatcaaaaattaatggaagatttaataaaagaaaattgcatggacaataactgcactccacgtcttttgctccatagctgctgtggaccgtgcagcacgtattgcatacagactctctcggagtattttgatgtgactgtgttttattacaatccaaacatttacccaccagaggaatatcacatgagagcacaggagcagaagcgctttatagatgagtttccggtgaaaaatccggttcactttgtggagggtgtgtacgacaccaagcgcttttacgatatggcacgcggcatggaggctgtgcctgagggcggggagaggtgctttaagtgctacaggctgcgtcttgaggagagtgcacagtatgcaagggagcatggctttgatttttttacaacgacactttccatcagcccgttgaagaatgccgaaaagctcaatgagataggaaaagacttagagagccaatatggagtgcgatatcttttctctgattttaagaagaaagagggttataaaaagtccacggagatatcaaagcagtatgatatgtacaggcagtactactgcggctgtgtattttccaaggagcagcgtgacagagagattgcagcacgtgggtgaaaatgtggttgcgtgacagcaaaaattattatataatttagcacagtaaagcggctgtttagagcaggcggcggtatcacatcttattttcatataatacattgtgatacatgaaaataaatcatcatttaataatcaaggaggaatctcatggcacagttatggggaggacgtttcacaaaggagacagatcagctcgtttacaatttcaatgcgtccatttcatttgatcagaagttttataaagaggatatagagggcagcatcgcccatgttacgatgcttggaaagcagggcatcatctcacaggcagagagcaacgatatagtggcttgcctaaagcagatacttaaggaggtagagtcaggggagcttgaaatcagctcaaagtatgaggatatccacagcttcgttgaggctacactcatagacaggcttggtgacacaggaaagaagcttcacacaggccgaagcagaaacgaccaggtcgctcttgatatgcgtcttttcaccagaaagacagtgaaggagactgatgatgagcttaaggagcttttagctgttatccttaagattatgaaggaaaacacacagactatcatgccgggctttacacatctgcagaaggcccagccaatcactctggctcaccatatgggcgcatattttgagatgtttaagagagacagatcaagactgtgcgatatatataagagaatgaactattgtccgcttggctcaggagcactcgcaggcactacatatccgcttgatagggactatacagcacagcttctggatttttacggaccgacacttaacagtatggatggtgtgtcagacagagattatctgattgagtttttatcggctctttcaactatcatgatgcatctgtcacgtttttctgaggaaattatcatatggaattcaaacgagtaccagtttgttgagattgacgatgcgtacagcacaggaagctcaatcatgccacagaagaaaaatcctgatatagcagagcttgtcagaggaaagacaggccgtgtatacggtgcgctcatgtcgcttctcaccaccatgaagggtattccgcttgcgtacaacaaggatatgcaggaggataaggagctggcatttgatgcattcgacactgtaaagggatgtatcgcactttttacaggaatgattgatacaatgaagtttaacaaggacgtgatgagaaagagtgcaaacaatggctttacaaatgccacagatgcagctgattatctcgttaaaaagggtgtaccgtttagagatgcacatggtattgtaggaagaatagtgctttactgcatcgacaagggcattgcaatcgacgatatgagcatcgacgagctcaaggctatctctccggtatttgaggaggatgtatttgatgccatttcaatggagacctgtgtcagcacaaggtgtacagttggagcaccatcaaagacatcaatggacaaggtaattgccgtttacgacgagtatatgaagtcaaattggcaggatgaagtgtagtttttgtgcatattttataaaaaacaggaagaaaaattattaatttaatatagttttttccttgtttttcattagagtttcaagtaatatatttcctataaagacagttgtacgcgacagacggacaaaacctgattttaatgtcaaagtatagtgtatgacatggtcgaagaaattctagaagatagggagattagagtaatgagtgaaaagcttaaagtaggtatcctcggtggaacaggaatggtaggacagagatttatttctcttttagagaaccatccatggttcgaggtaacaacaattgcagccagcccaagaagtgcaggcaagacatacgaggacgccgttggtgatagatggaaaatggacacaccaatgcctgaggcagttaagaaaatcatcgtaaagaacgtcaatgaggtagaagaggttgcttcacaggttgacttcgtattctcagccgttgatatgtcaaaggacgagatcaagaagatcgaggaggactacgcaaagacagagactcctgtagtttcaaacaatagtgcccacagatggacacctgatgtgccaatggttgtacctgaaatcaacccacagcacatggaggttatcaaatatcagaaggagcgtctcggtacaaagagaggcttcgtagcagtaaagccaaactgctcaatccagtcatatgctccggttcttacagcatggaaagagtttgagccatatgaggttgttgctacaacatatcaggcaatctcaggtgccggaaagacattcaaggactggcctgagatggttggaaacattattccattcatcggtggagaggaagaaaaatctgagaaagagccgcttcgtctctggggatatgtggatgatgagaagaaacagattgttcctgcagagtcaccggttatcacatgccagtgtatccgtgttcctgtattaaacggtcatacagcagctgtatttgtcaagttcaaaaagaaccctacaaaggagcagctcatcgaggcactcgagaagttcagcggagtaccacaggagcttgggcttccaagcgcaccaaagcagttcatcagatactgtgaagaggataatcgtcctcaggtcgcacttgatgtggattatgagcatggtatgggaatcaatgtcggacgtctcagagaggatacagtttatgactggaagttcgtcggactctcacacaacacagtacgtggtgcagccggtggagcagtgctttgtgcagagcttcttaaggcacagggttacatcacaaagaagtagatttagcaatttgctggaaaatttattaaggagggcggattttccgtttgtgggctgtgggcaccggtgtagcacacagtagtattcctcagaaaaaatatgaagtcagccacgggattatttacggataggttatggcagtttgcaagtctaaactgtcatttgacctgttggaaacccgtggcagttcatattttttcttcggaacatactgtgtactctccggtgaaggcagtgtattgaacggaaaatcctcactctgtgaattaattattatgcaaaagtcgagcctcttaaaagaggctctcttttttgggcttttttattctcagttgttttaaatagttacgcttgaatttatattttatcgtggtaaaatagataggctgaggagaatattttttaagaggtagagataagtgaagaataataagtatgaaattgatatggtgaacggttcaataatggataagcttatttcatttgcgttgccacttatgatttcgggtattttgcagttagcgtttaatgctgtggatattattgtcgtgggacagtttagtggcagcaaatcacttgcggctgttggctcgactacggcacttatcaatgtgtttgtcaatttgtttatgggtatatcgcttggtgcgaatgtgctcgctgcccgattttatgcggcaggcaaggatgatgagatgtctaagacggtgcacaccgctattatgattgcactcataagtggtattgtgatgggtgtggtcggtgttatttttgcaaggggtgcgttggaaatcatgggtacaccggatgatgtcataggtctttctactatttatatgaggatttatttttgcggtatgccgttttttatgctttataactatggtgcggcgattttgcgtgctgtcggcgatacaaagagacctcttatctttttgattatttcaggctgtatcaatgcactgctcaatctgttttttgtaatagtgtgcaaactggatgttgcaggtgttgcaatcggtacaattgtttcgcagtttgtttccagcgtacttgtattatattgtttgagcaaagcagataccagctataagctctgctttaataagcttgcgattgataaggaatatatgcttcagatatttcaggtgggaattccagccggcatacagagcacagtcataaatatctcaaatgccatgcttcagtcatcagtcaattcctttggctcaatagcaatggctggatatacggcggcaaacaatatacttggctttttgtatgtatctgtcaactcaatcacacaggcctgcatgagcttcacgagccagaactatgcggtaggaaaacaaaagagaatggacagggtactgatagactgtctgtttctcacgacagcggtagcacttgtgatgggaagtgcttcatacatatttggaacacagatacttggtatatatacgagtaatagcgaggtaattaaatcaggacttgagattatttcgattacaacaatcccatatttcctgtgtggaatcatggacctttttccgggagcactaagaggaatgggatactcaactgtacctatgatactttctataataggaacagtcggagtcagaatcatctggatatatggtctgtttccaagccacagatcgctgtttttcctgtttatatcatatcccggttcatggatagcgacaatcatcatgcaggctatctgctatatgtttgtcagaaataaagtgaaagctacaataggagctcggaaattataattaaaatctatttgtatatgtgttaaattgtgatataatatttccagttgattattttggaggaatatctatgaaagcaaaacacacagatttagagaaacttgagcagctctataaagagtcgggtaaccagctcgtagtgctctacggaaggagaggctgtcaaaaggaggagctcataaaggaattttgtgacggaaagaaattcttttactacagatgcagacaggcatcgccagagcatcagcttgagatgatgggggaggagataagccgtcagtacaaggtgagcctgagcagacagacatatgaggagtacttcgcgagaatcaaatcaggaggcccttccaagctcgtcgtgataatcgatgaggcacagtttgtggcaaagagggatgcatcatttatggaagcagttgcaaagctaaaaaagcacaagctgtatccgggacctgtacttataatacttgccacatcatctacagtctgggccacacaggaggcagcagagcagtttaagggagccgaaatgaagcttgaatcgctcaatttccttgatgttgtaagacattttgaaagtcttccggtcgcggaaatcgtgagaatttacggagcaatcggtggagttccggcatatctggataagtgggatgcagctaaatcctttaaggataatatatgcaggctcgtattgacaccatcgggagcactgtatggtgaggcggatgctgttatatcatcagaacttcgagagctttctgcatatagcacaatacttgcagcaatcgcaagaggcgagaacaagctcaatgatattttccatgcgacaggattttcacgtgccaaaatcagcgtatatttaaagaatcttgccgccttcaatatcgtggaaaaagtagtttcatttgagaccggcggatgggaaaatgcaaagaagggcgtatatcagataaaagacacatttgttaatttctggtttaagtttgtctatccgaatatgtctaatctgtatctgctttcaccggaagagttttatgatacatatatagaaaaagagcttgatgcgtatcttgagagatatttcagggaggtctgcacagagtatctgcttatattaaatcagatgggacagcttccgtttaccataaagcgtgtgggtacatggattggaaagacaggccgcatagacatcgtggctcagagtgaggatagaaggagtatcatcggcttctgcaactgggacaagccaatgatgaccatggatatgtgcgagaatatggctatggctatggagcaggcaaggcttacatctgatgactattatctgttttcggcaacggattttgagcctgcactgcaaagctatgtggtcagagaccctagattcaagctcatcaacatgaatgaattatagaggagcttatgggaaaatcactgataataacagagaagccatccgtggcacaggaatttgcgaaggtgctgcgggtgagcggacgcaatgatggttatatagaaaatggagaatatgtgatttcatggtgcgtgggacatctggtcgggctggtctaccctgagtcctacgacatgaaatacaagaaatggcgtcttgaggatctgccgtttctgccaaaggaatacaaatatgatgtgatagacagcgtgcgcaagcagtacaatattgtgcacgctcttttgcagagagaggacattgacagagtttactgggcaggtgatgccggaaaagaaggacagaccatcgaggagaatatcagaaactttggtggtgtcagggaaggcatggaggagcttcgagtctggatagattcgcagaccgaggaggaaatcctaagaggcataaaagaggcaaagccgatgagtgcgtatgcaaacctcggaaagagcggcatcatgcgtaccatcgaggactatgcgatgggcatcaacttttcgcgtgtcatgtcggtcaaatacggcaatctgctaaacgatgcagcgggtacacgctcgtacacggcaatcgcggtcggacgagtgatgacctgtgtgcttggaatggtagtaatccgtgagcgcgaaatcagaaactttaaggagactccgttttacagggtaatcggcaggtttacggatgccggtgtagaggcagagtggaaggctatagaaggctcaaggtactttgaatcaccgcttttatacaaggaaaacggcttcaaagaggaaaaagatgcactcgctttaattgaagaattaaacggtaaacaggcaaaagttaaatctatagttaagaatattactaaaaaaagagcaccgcttcttttcaacctggcggagctgcaggcagagtgctcaaagaagtttaaaatcagccctgatgagacattacaggtggctcaggatctgtatgaaaaaaagcttaccacctatcctagaacagatgccagggtgctctcaagcgctgtggcaaaggagattggaaaaaatataagcaggcttaaaggttttgaaccgacagcagactttgtggagcatattatgcaaaagaggctatatgccaacatagctgatacgcagtacacggatgacagcaaggtaacagaccactatgctatcattccgacaggtcagctaacagagctttcggggcttacatcgcttcaaagagcagtatttgagctgattgtcaggcgtttccttagtattttttatccaccggcagagtatgagaatgtgaagcttgtcgtagatgtggataaggaaagtttttttgcatcatcaaaggtactaaagagcgagggctatttacaggtggcgaatccgccgaaaaagaagtcgtttgaggaatcaaacgcacgaatacttggtaaaaacagtgaaactgcagatagtacagatgaaaacagcacagcaaacggcagcaatgatgagatagtcgtaaatcccaaggtgatgcttgagcttgccgataagctaaaggcgggtgatgagatagcatgccaaggctataatatcaagtttggtaagacatctccgccaaagcgctatacatcaggctcaatggtgcttgccatggaaaatgcaggacagcttatcgaggacgaggagcttcgtgagcagataaagggctcaggaataggcacctcagcaacgagagcggagataatccagaagcttgtccgtataggatatctgaatctgaacaaaaagacacagatactcacacccgaaagccttggcgagatggtgtttgaggtcgtatacatgacagttccggcacttcttaatccaaagatgacagccaactgggaaaagggactggacggaattacaaggggcacggtggatttctgggaatacaggggaaagcttgagagctttatccgcaaagagacagaaaagatgattgagcagaatctgcgccctgagattgcagaccgcatcagcagctttgcaggcaaaaatgcaagaggtgcagcggccagacgaaagataggtgtcaagtgcccggtttgcggcggcgagatagtgactacaccgtttggttacggctgtgccaattacaaaaatgataaatcaggatgtaattttaatatcggacaggtggcaggactggatattccggaggaacaggtcaaaaagctgattgaggatggaatcaccgatacaattagaggctttaagtcaaaaagcggcaaacgctttgatgcatgcttaaagctcaacaaggatgaacagacgaacaaggtatcagccacctttgattttgaaaatgtaaagccgcaaaaggtcgagggcattgtatgcccggactgtggaggcgatatatatgtgtcgccatacggctaccgatgtgcaaactataatagacagacagaggatggctgccatttcttcgttggaaggatagcagacaagcagctgtcacaggtacagtttttagagctcatggcaaacggcagaacagagacgataaagggctttaaatcaaaatcgggaaagcgtttcaacgcatgccttgtcttaaagaaagagcctgtcacagagggcagtgagaaaatgcacaccgtcgtggcttttgactttgacaatgtggaggacgaaataataaaggatgttgtctgtccgctttgtggtggtcagataaaaaagacatcgtttggctatggctgtgtgaactacaagggtgatgagccgggaagctgccgcttttcggtgggacagattgcaggaaagacaatcacagccgcaaacctaaagcagcttcttaatgataaaaagaccgagactatacgaggctttaaatccaaaagcgggaaacgcttcgatgcgtgcctggtgcttaaggaggatgaaaacaagaagctctctgtccagtttgattttgaccatgtagagccaaagacagtgaaggatgtagtatgtccgaagtgcggaggcaaaatccaggtggcgccgtttggctttgtatgtgagaacaacagacgtgatgatcctgagagctgccgctttatggtgggcaaggtcgcaagcgtcaagataaaggaatcagtccttaaggagcttctgacaaagaaaaagacagaagttatatcaggatttgtctcaaagacaggcatgaagtttgacgcaccgctaaagctcacagaagacggagatatagcctttgatttccccgaaaaaccaaagccaatcgagaccaatgtactctgtccaaagtgtggcagacctctcaaaaagacacagtggaaatatgagtgtgagtgcggcttcaatgtttggcatactgtggcaaaggtggagctttcagaggaaattctcacggagctgtttactacaggaaagaccaaaaagaaggtcacaggcttcacctccaaggcgggaaatgtattcgatacatgccttaagtttgaaaatgaccagatatcatttgatttcgataacccaggtgaggaagaggtgcagagcacggctgaagtacataacaatgctgatgcacagaataatgctgatacacataacaatgctgaagtacagagcacggcagatgatgcgccggatgagacaaccctgaatgagatgggaatccccgaggaatttctggctggtcttgatatggcagcagagggcgcacaggcagatgatgtgtcggaggcggcacttgcggccgcgcatgagctgttcggtgagtagttctactgataattaattattaaatctataattaatatgaatttttatatttatgtttaatacttatatttaagtttaaatattaaaatgacagttaaaacaatagtcaataattttcacataattaaaagaaaggacatagaaaaatggaaaacgcaaaaataacaaacctctataatctggatgaaacaatcgcaaaggagtatttatcacagttcacttatccatgggaggcacttgccggaataagtgatttcatcaaggagataggaccaacactcgaccctgaaatctatgagaaaagaggagaggatatctgggtggcaaagagcgcaacagtatttgacagcgcatatctgcacggtccgctcatcatctgcgaggacgcagaaatcagacagtgtgcttttatccgtggcagcgcaatcgtaggaaagggttcagtagtaggaaactccacagagctcaaaaatgtaatcatcttcaattcagtacaggtgccacactacaactatgtaggagattcaatcctcggctacaaatcacatatgggtgcaggctctatcacatcaaatgtaaagagcgacaagactcttgtagtagtaaaggatgtttacgatacaaaagaggagattgcaacaggtcgcaagaaattcggtgctatgcttggtgaccatgtggaggtgggctgcaactcagtgctcaatccgggaacagtaataggaagaaattcaaacatttatccgctttcaagagtacgcggagtcatccctgcaaaccacatttttaaggacaaggacaacgtagttcttaaaaaatagtaatgttgtttgaaaaaatattgtatttttgttgttttttgtcgatgatactctagacttatgacaaaaaatatgagagaataaatcgggtatgttaaaaccataacgaaaggagtcttaagatgatttacactaaggaagttgaaaacatgtgtcctgtagctaagggcgcaaaacatgagccagctcctatcccagaagaaggaaaatgggttcattctaagaaaattgaggacatttcaggatttacacacggtgtaggctggtgtgcaccacagcagggtgcctgcaagctctcactcaatgtaaagaatggagtaattgaagaggcattagttgagactatcggatgctcaggaatgacacactctgcagctatggcagcagaaatcttacagggtaagacaattcttgaggcattaaacacagacttagtttgtgatgccatcaatacagctatgagagagttattcttacagatcgtttacggtcgtacacagtctgcattctctgatgatggacttgctgttggagcaggacttgaggatttaggaaagggacttcgctcacaggttggtacaatgtacgcaacaaaggcaaagggagttcgttaccttgagatggctgagggctatgtaacaggaatcgctcttgacaagaacgatgaagtaattggataccagttcgtttctcttggaaaaatgacagattttatcaaaaagggtgatgacgctaacacagcttgggagaaagcttcaggatcatacggtcgtgtaactccagagcagggtgctgttaagatcatcgatccaagacaggaataagaggaaaggagaacgacaatggcattatttgaatcatatgaaagaagaatagaccagatcaatgctgtacttaacagctatggtatcagctcaatcgaagaagctgaaaagattacaaaggacgctggacttgatgtttacgatcaggtaaagaaaatccagccaatctgtttcgagaacgcttgctgggcatacacagttggtgcagcaatcgcaatcaaaaaaggatgtagaagagcagcagacgctgcagcagcaatcggagagggacttcaggcattctgtattcctggatcagttgctgatcaccgtaaggtaggtttaggacatggtaaccttggaaagatgctcctcgaggaggagacagagtgcttctgtttcttagcaggacacgagtcattcgcagccgctgagggtgctatcggaatcgctgagaaggcaaacaaggttcgtcagaaaccactgcgtgttatccttaacggacttggaaaagacgctgcacagatcatctcacgtatcaacggattcacattcgtagagacacagtatgactacaaggcagctaagctcaacatcgtatctgagcatgcatactcagatggactccgtgcaacagttaagtgttacggtgcagatgatgttcaggaaggtgttgcaatcatgcatcacgagaacgttggtgtttctatcacaggaaactctacaaacccaactcgtttccagcatccagtagcaggtacatacaagaaagagtgtatcgagcagggcaagaagtacttctcagtagcatcaggcggtggtacaggacgtacacttcacccagacaacatggcagcaggaccagcttcatatggtatgacagatacaatgggacgtatgcattcagatgcacagttcgcaggatcttcatcagttccagctcacgttgagatgatgggacttatcggaatgggtaataacccaatggttggtgctacagtagcagtagccgtttctgtacagcaggctgctgatgagggcaaattctaaatagaaagcttgattttataggctttttggagactcatatcatttttggtatgagtctcttttttta

SEQ ID NO: 1483 - DNA, 13772 bp, Unknown
  gut microbiota DNA sequence
taaaaactttgacatggtgactcctttccagccgccagaaatcaaagcataacagaaaagagaccaactatccagtcagtctcaattcatttgtaaaagaaaacccatacctttcttttacactgataactattaacttttacacttatccaagatagcgggtatggaatcttggattacaattgaggatcaaaaaacatggacagaaataaataacgacattgcacaaaaaatagtacgcttgcgcaaaagaaagaaaatcactcaaaagcaattagctgcaaggtcaggtgtaagtcttggttcacttaagcgatttgagcagagcggcgagatatccctgcaatctttgaccaaaattgctatagctcttgatgtggagaacgaacttgaagacttgtttaataatgtgccttttgcgtctatcgaggaggtaattaatgaacagactaaataagctggaagtcttttatcatgaaagactcgtcggaacgattgctttgtaccaaaatcgtctggctgcgtttgagtatgacagtaactggctggcaactggattttccataagccctttttcactgcctttggagaaaaaagtttttataccaaagatagatccgtttccgggcttttagaaacatctcacagaataccaaatctcgattatgatattctgatgcagcttacactccagcttaccaaatctatggaagaatgtgaaaaattgtatagacttatgtgctttaatgtgtatgcgcataacagggatgaccattcgaagaattttacttatctgtatgatgaagatgaatgtagctggaaattgtcaccggcgtatgacctcacctacagtaattcaatcggtggagagcatgctaccacggtaaatggaaatggtgtaaatccggaactggatgatattctcgcggttgccaaaaaaattggattaaatatgacaatggcaaggaaaaccgcactgaatataagagattgtgttagtgaaatgcttggggagtatctatagtgcagtgataatatgttatcacctataaatacccattttccgttataactatattctataatggaaaatgggtattttttactctattcctaattcgaaaaatgacgtatcttcagatgaatacccctctcatcagcaatctgctgacaagtctttatatcctcctcggggagtacatccacgatagaaagctgtgtatgcttgatcatgcggttgcattcctcagcaaaatccagcatagcctcataagcattgtcaaaggttggtcttgtgaccttattgtattcctcggcatttgcagcattcaagcttatggaaaccgaatcaatatactcagaaagctccggcacgatatcccttccgtgatagagattgcctagtccgttagtgtttacgcggataggaagcttatacttttccttcacatatttagctgttttctcaaggatatccagcgcgcaggttggttcaccgtagccgcagaagacgaattcctcatagcctgtaaaatcaaatgcatcgattgcagctattatctcatcatatgttgggtccaccgtatgccataatgatgtcgcattgcctatagcgtccttctgagagcgtatacagaatgtacaagcgcagtcgcatttatttgtgatatttgcataaacttcgttcttgtatgtatagattatatcagccattatttagtctcctccaatgtgaaaaatcttctcttgaatccgattttatcaagtaccagtccaagaataacaaatattatagcacttccaccgctttgtatacagcttcccggaacagaaaccggaattattgcgatgagaccggtgaaggcatgctttgtgaagccatatgtgataaatgcctctgcaatggcatagccggttgcggaaattgcgaaagctatgattgtcgatactacatttctcacggtcacaattttatctgatttgttggtaaacgggatggatatgagtgcctttatgatgattgttgcaggcgcccagataggtgcggtcagcaaatctgccatgccaccgccgatagctgcggctgtcattgcatacggccatggaaggaggcacgctgcgatatagataaggctatcgccaaaatgaatatatccgccattctgtccaaccggaatgtggcatatatatgctgtaaaaatagtaatcatggctgccatgagggcagtaaatgtgagttttttaacctgtgagttcataaaaatatgttctcctttgttttgtgttaagcctaacttaagaggtcaattgacaattcgataaattttctgcaaagggtgataagaatcacataaacatcacatcagctcccgcaaaaacttctcgaaattcactccgtcattcggtgcggtgtcatcattcatggtatctgcgatgctgtcatacaggaattttccggcgcgctctgcggcctcctctgtggaaaatccgttcagcctgcttccgcatataacagatgcaaacagatcgccggtgccggaaaagctcacgtcgaaaaagtgtgatctgtgggttgtagtaccatttgcggtggtcacgagattgtagataaagggtgacttatcatccctgcatttgataccggtgatgattacatcctgatttttgccggacagacatcgcagcttctcacttatctctgtcgcaagaggcaggagcacatcctttctcgtgtcactgtaaaccttctcgatatcatagtctgccaaaaggcatgcctcggtcagatttggtgtgatgacatcggccttcctggaaagcgccttcatgccatccaaaagagcggcagagtatatgccgtaggttctgccgtcatcgcccatcacagggtccacgagcagcatggtgttttcctcataaaatacattcaaaaaatccataaaaagctcaatctgctttgagcctgtcatgaaaccgctgtaaatgccgtcaaaatgggcattgtttttctgccagttgtcgatgtagtccttaatcatggctgtcaggtctgtgcatttatgatattcatatcctgtctggtttgtcagcactgctgatgccatgggacagcactgtacgccctgcgcggacagtaccggaattgcggcggtcagagagcattttccaaagccggacaaatcgttaaaaacggctgctttcttcatatatcctccaaatttttttgcttaattttctcatacaaaatataggataagtatacatgcgtctgaccatatttctatgaccagaaagataaaaaaataaatgccagataaaatgtttttgaaaaagaacgctgtctgtgatattatagatgtgtatgtaaatacggaggtaaaagcatgtttcaaaagaaacagattatatatagtgaaacccttggcgtatgcgtggttgacaacatagtatcgcttgcggcatctaagagagaaaaggcggtgccgtactatgtgctgaagcctgtgtttgaggacaaggtgtcatatataccggtagagcatcaccgggtggtactgcgtgatatgttcaccagagaagaagctctaaagcttaaggaaactgagcagtataagaatgataagcaccttaggcaggcagttgactatgtactggacaaggtggctataaaataaaattacaacaaggaggacaggattacatgggacagcagcatgcaatacacaaatttgtgctgggaaccaaggacttcgatgataagcagtcagagttcatgtacgataaaggctggtacagcatcacagatatagtaggtgaggagaaaaatatcatctacaagtcaagaaatgcccaggaggcatatcttaagtggaatatctatatcggcaggaaaaaggaacgcctcacacctgaggagaggaagaggcagcgtgaagaacgctatgagaaaaagagagaacaaaacagagagcaccacaggatataggagggcattatgggcattttcaacatagacaacaaatttttcagagcattaaacaaactggtagatatggttattttgagcttttgctggatcatatcatgcatacctgtttttacaataggagcggcatccacagcactttacgatacatcgcgccgtgtcatccatcgcgatgagggctatgtgtggagaggctactggcatgcgtttaaggtaaatttcaagcaggccaccaaggcatggctggtacagcttataatacttatcgtgcttttgggagatatttatattacatggtcaggtcttaagacaggcaatcagtggggaaccttctccatcgtgttcatcataatggcacttattgccgcagcctgggccatatacacatcagcgtatatttcacgatttgagcaggtcacaaagataacccttaagaatacaatactcattcttatcgccaacctgccgtggacattattggtcatagtgatacttgtggtatcacttatacttgcatggattattattccactcattttcatacttcctgtcggcgcagcactcacctatgagtttatttttgagcgtattttcagaaagctcatgaatgaggaggataggctccgcgaggaggagaaggataaggagtacagggattagcataataaaagacaatcataataatgcataaggaggaagcagcaatgaagaaaattggaatgcttaccagcggaggagactgccaggcacttaacgcagccatgagaggcgtggtaaaggcgctggcacacaatgtcgacgagcttgagatttacggctttgagaacgggtacaagggactcatatatgagaactacagaatactcacatcaaaggatttttcgggcatcctgacaaagggcggcacaatactcggctcatcaagacagccttttaagcttatgagagtgccggatgagaacggactggacaaggtcgcagccatgaaaaacacatacaagaagcttggtcttgactgtctcgttatcctgggcggaaacggcacacaaaagacagccaatcttctcagggaagagggacttaatatcattcatctgccaaagacaatcgacaatgatatctacggcacagatgtgacctttggcttccagagcgcgatcaatatagctacagatgcaatcgactgcatccacaccacagcagcatcccacaaccgtgtatttatcgttgaggttatgggccacaaggtaggctggctcacactgtacgcaggtgttgcgggcggtgcagacatcattctgcttcctgagataccatacgatattgacaaggtcgtagatgccatccacaagagaacaaaggagggcaagggctttaccattcttgcagtagcagagggagccatctccaaggaggatgcagccctttccaaaaaggaatacaagaagaagcttgcaaagagcaaatacccgtcagtatcatacgaggttgcagaccgcatcagcgaaagactcggtcttgaggtcagagtggcagttccgggacatacacagcgaggcggcagcccatgtccttacgacagagtgctttgtacacgtcttggctcagcagcagcaaaggccatcatggatgaggattacggctgcatgatagccatggtaaacggacagacaaagagggttccgcttgccgacgtagcaggaaagcttaagactgtagatccaaagagccagatgatcaaggaagcaaagcgcaccggtatctgcttcggagattaagcagcaatattagatataaggaaggtgaaaaggcgtgtcttatcaggccctataccgtaagttccgtccacaggagtttgaggacgtaaagggacaggaacacattgtaacaacactgaaaaatcagataaaagctgacagaatagggcatgcctatttattttgcggcacgagaggtacaggaaagaccactgtggccaagatatttgcaaaggcagtcaactgtgagcaccctgtagacggaagcccatgtggcgaatgtccgtcgtgcagggcaatcactgagggctcatccatgaatgtcatagagatagatgcagcgtcaaacaacggcgtggacaatatcagacagattcgtgaggaggtcacataccgcccgacagagggcaggtacaaggtctatatcatcgacgaggttcacatgctttcggcaggagccttcaatgcacttttaaaaacacttgaggagccgccgagctacgttatatttatactggcgaccaccgaggcacacaagatacccattactatcctgtccagatgccagcgctatgatttccacaggatttccatagatacgattgcatccagactcagcgatttgatggagcaggagcatgtggaggtcgaggagcgcgccataaggtacgtggccaaggcaggagacggctccatgagagatgcgttaagtcttcttgaccagtgcattgctttccatctgggtgagaaactcacctatgaaaatgtgctcgaggtgcttggagcggtggacacagaggtgttttcaaggctcttaaggcgcatactcgacgaggatgtgacaggtgcaatccgcatactgggcgagctcatagatgatggcagggagctgtcgcagcttgtcaatgatttcacatggtatatgaggaatcttttgcttttgcagagctccgacgatatggaggaagtgctcgacatctcaaaggacaatcttgaggcacttaaggaagaggcagcgcttgtaaagcctgagacactcatcaggtatatcagggtattttccgagctgtccagccaggtaaagtttgcatcgcaaaagcgtattatggtcgagatagccataataaagctgtgcaggccgcagatggaaaagagctatgattcggtgcttgaccgcataaacagcatagagaaaaagcttgaaaagggtatacctatagcggcacaggctgcgcagacacaggatatgcagcaggccgcagcaagcgggcctatagtgaaaaaggagcttcccaaagcaataccacaggatatctcagagctcatgaagcactggaaatccatactttcggagatgggagcaacatcaaaggtttatctgaacaaggctgtgacatcgctgggaaattcctctgacttgattttaatgtttgatgatgagaatgcatatgagtatctctctgaaaaccgtgcaggctgtatggatacgctggcttcgcttatagaaaagcgtataggcaaaaaagtcgaggtgacggtcaagaaaaataattccgcagtcagcgcaaaggaagcggttgtggacttgacagatatgataaattttgatatagaggaagaaaactaagttataaacagggctgggattagcccatcaaaaacaaggaggacgccagaatggcaagaagaggtggattccctggaggaatgccgggaaacatgaacaatcttatgaaacaggcgcagaagatgcagcgtcagatggaggaggctcagaagcagcttgaggatgctgaggttacggcaaaggcaggcggcggagcagttgaagtcactgtttctggaaaaaaggaaatcacaaaggtcaaattatctgaggaggtagtggatcctgacgatatcgagatgctcgaggatctcatcatggcagcaaccaatgaggcgcttcgccagattgatgagcagtcacaggcatctatgtccaaaattaccggtggcctgggtggcggtctgttttaatggatttttacagcagtgagatatcaaaattaatagaggagctgtcacagcttccgggaatcggagccaagacagcgcagagactggcatttcatatcataaatatgccaaaggagcaggcaaaatcgctctctgacgccataatcgatgcgaaggagcatgtcagatactgcaaatgctgctatacactcacagatgacgagctatgccccatctgcaaggatgcggcaagagaccacaagaccatcatggttgttgagaatacgagggatcttgtggcatacgaaaagaccggtaaatatgagggcgtgtatcatgtgctgggtggcgcaatttcacccatgcttggcataggtccggcggatatccgtctgaaggagctcatggtacgccttgaaaaagatgtagacgaggtcattatagcgaccaattcaagcctggagggcgagactacggccatgtatatcagcaagctcatcaagcctaccggcatcaaagtgacacgaatcgcaagcggagttcccgtaggaggcgatttggaatatattgacgaggtgaccctgcttagggcgcttcagggaagaacagagatataaatgatagaaggagacatcatgaacaatcttgaacttgagaagatggcgaatgaaattcgcaaggacattgtgacagcagttcacagtgccaaatccggacatccgggtggatcactttcatcagcagatatttttacatatctgtattttgaggagatgaatgtagaccctgccaatcctaaatgggaggacagggaccgtttcgtgctctcaaagggacacgtagcaccgggactttactctacactcgcagagaaaggatattttccaaaggaggatttaaagacactccgtcatacaggctcatatctgcagggacatcctgatatgaagcacatccctggcattgatatgtcaagcggctcgctcggacagggcgtatctgtcgcagtaggaatggctgcagcaggcaaatatgacaagaaggattaccgtgtatacacactcacaggagatggcgagattcaggagggacagatctgggaggcagccatgtgggcaggccaccgcaagctcgacaatctcgtagtcatcgttgacaacaacaacctccagatagacggttctgttgaggatgtatgctcaccatacccaatcgacaagaagtttgaggcattcaatttccacgtaatcaatatcgatggtaacgattttgaccagatcagggcagccttcaaggaagcccgtgagacaaagggcatgcctacagccattatcgcaaagactgtaaagggcaagggcgtatccttcatggaaaatgccgcaggatggcatggaaaggctccaaatgacgaggagtatgaaatcgcaatggcagacttagaaaaggcaggtgaagcattatgtcagaagtaaagaaaatcgctacaagagatagctacggaaacgcactcgtagagcttggaaaagcacacgatgaccttattgtacttgatgctgacctggcaggtgccacaaagacctgtatcttccagaaggagtttcctgagcgtcactgggactgcggaatcgcagagtgcaatatgactggtatcgcagcaggacttgctacatgcggcaaggtgccttttatcagctcatttgccatgtttgcagcaggcagaaactatgaccaggtaagaaactcaatcggatatcctcatctcaatgtcaagataggtgccacacatgcaggaatctctgtaggtgaggacggagctacacatcagtgcctcgaggacctttcactcatgagagaaatccctggcatggttgtaataaacccatcagacgatgtggaggcaagagccgcagtaaaggcagcatacgaccatgtaggccctgtataccttagattcggcagacttgcagtgcctgtaatcaacgacacaccggactacaagtttgaaatcggaaagggtatcgtactcaaggaaggcaaggatgtatctatatttgcaacaggacttgaggtatcagagacacttgaggcagcaaaaatgctcgcagcagacggcatagatgctgaggttatcaatatccatacaatcaagccaatcgacagagagctgattgttaaatctgtatcaaagacaggcaaggcagtcacagtagaggagcactctatcaatggaggactcggaagtgctgtggcagaggtactctgtgaggagcagcctgcaaagcttctgcgtatcggtgttgaggaccgcttcggcgagtcaggaccggcagtggagcttatccacaagtatggactggatgcagagggcatctacaacaaagtaaagaattatatgaagtagtggattttatgtgcttcgcacttggaggctgtgttcaccggtgcagcatacagtatattcctcagaaaaatatgaagtcagccgcaggatttcgtgtggatagcgtgtggaatgagtttagtcattcttgctattttacataatggaaccctgcggcagttcatattgtttcttcggaacatgctgtatgctttccggtggtatgtagtttgttgagtgcgaagcattttacttcttcatatgtgtgaaaagtcgggcgcatgggttcatgcgcccttttttcgttggggattaactgcaaaatacctttataatcgcacaattttgcataaatttacattttgcaagtgctatgctgaccgaaaaaggaggctggcatgatagatattgtgacgaacaacgtcaggcagattggcacaccggcggatgagggccgggtttacatatcggagaaagcgtacaagcgcataaagacagagggctttaaggataaagaggtttttgtacttatggggcatacggagagcagcggaggcaggtatgccacatttgtggaggcggcgattgcagtgtatgatatggagtttgacaaaaatgcgcctctttggaccaacaaggtatggagcagagtgtttgcggagataaagaaaagctacgaggaactgattatcgtcggatgggcattcaggcaggaggattttccggctgagccaacacccatgcttgaaaatatacacagggagcactttggcggtgctcatcagcttatgttccttttgaacaggaccgaacaggaggaaaacttctttatcaaaaagaataatcatctgaagaaaaagacaggattttttgtatattaccgcatgaatgagcattgtgatagtgctgacagctataatgaaactgacacctgcaataaaacctacagctatagtaatgcaaacaacaataataaaatcgacagttatagtaatgccgatgacaataataaaagcagcagccggtatgaggacactgacacagcggccaaaagcagctacagccggatacatagaagcgcttcggcagacgacagaatcaatgtgtcgtttcctgaggaatttggcagcatatcgaaagaacgcggccggtacagaaaagccatggaggcaggaaaagaaccgcgcaagggttcgtttgcatctgtagtgatgattgcagcgatagcagtgcttatagtgcttatcgggcttaaagccggcgctggaatgagtggcacaatagacaaaaaggagacacttcctgccatgtccacagaagaagatttaattccagtggaaaaaatatccggtgaatggtatactgacaagtaacaaacactttggaagtagacaaaaggataagattatggcacagaaatcagactttaaaactgtcgagaccgatttggacgagctcgaggagaaaatacgaaagcatagaagaaaaatagcaaaaagaataataatagtcgtggcagcagtcgtggctttatttcttatagtatggttgtggatggcgctgcgcacctacaagtcatttgatgtcaaaaacagcgtggagcagaaggacaagagtgcggtgtcgttcgtggatttctgcggagcggtagtggagtacagcaatgatggtgtattgtatacagactcagacggaaaccgcatatggaaccaggcatttgagatgtcatcgccacaggtagtcacatgcgaaagctttatgactatctatgacaggggtggaacagacctctatatcatggacaagaagggagtaaaaaaagaaataggaacatcgtggcctattataaaagcctgcatagcaagccagggcacagtggcagtccttgtcagtgagaatgaaaattattatgtaaagctgtatgatgtaaacggaaaagagctggcaagtggtgagtttttcggagaacagaagaacatacctgttgatatagctctttcatatgatgctaaaaaactggctgtagatatgatagatgtctccggaggaaagacggacagcgttatatccttttacaattttggatcagtaggacaaaatgagatagacaacaatgtcggcacctacaagtatgagaatcagctcatacctgaaatagcatatgtttccgacagcaggatgatagcagtttcagatcagaatattatggtatttgacggaagccagaagccaaagctcaagcagactattaagctggaaaagctgatagacagcgtattttacaataataaatatataggagtagcatactccaacaatgataaaaattgcaccagtcatatcaagctttatgattttaacggtaagatgcttatggaaaacgacacagctattgcctacaatagtatagagtttgacagcaataacgaggtgtgcgtcacaggagacacagcctgtgagatatacaccatacacggagttaagaaattctatcatacatttgacaacaaactgtacaaggtgatgtataaatcgggtatgaataactatatcttcatctatgacggagcaatggacgaggtgagactgaaatgaattggctgttaattgcggtaatatgtattattgcgtggaatgtggtgagaggctacacaagaggtgtgcttcgcatggtatattcgcttgcagcctggatagtaatgcttgctgcatcaaccatggcagccccatatgtcagggatcagatattatcacagacaggaatagagcccgtaattttaaacggtattgaaaaacaaatagctgcacaggggcaaaaagccacaggcgattttgatatggcaaacatattgctgcagcaatccggagcatacgacaccatatccgcacagcttacaaatgccattatgacaggtttgtcattttttatagtattttttttgttgggaatagtggcatacatagtccgtcacatcatcagaaaaatagaaagggtgcctgttattggcactgtgaaccggattgcaggctttgcagtaggttttattaagggaatggttatagtatggctgctccttgccctgacatcattatttgccgcatctgaaataggacagacaatgacagcatatataaatgattccatgatgcttaagtatctgtatgaaaacaatcctgtcataaagctgatagaaaatatactgtagattaaaccggtgtaataatgcataaaagagaaaagtacataagcaatagatggtatgtggataagtatgtaaatacaatatatagttgtgtaaaaacaatgagaaaaaaatatatataaaaagataaaaaatgtgttgactttatgcgacacagatgatattatatcaaagctgactcgcgggacacattgagttgtagagcttgtgagttacaatttacagacatgactttataatattgctttgaaataagctgattaaaaaagtcgtgaaaaaagttcttgacaaatgaaaaacattttgatagaataaacaagctgtcacaagacagagaacttaaaacagagttcaaaaaataaaaaaagtgcttgacaaacgaacagcgatttgataaaataatcaagctgtcgcaagagagcaaaacaaagaacattgataactgaaca

SEQ ID NO: 1484 - DNA, 2483 bp, Unknown
  gut microbiota DNA sequence
ttgattgatgaaaactttattcataatgcgataacatcaggaattagaagtgtctgtttaagtattgatggtcttgaaaaaactcacgattttatacggagatcgggatcattcaataaaagtattaaagcattgaaagaattaagaaaaaataatatttcgacatcagtaataacttcaataaataaagaaaatatatgtgaattggaagaactatatcaattattaagtgatttgggagttaatagttggcagttacagattgcattaccaatggggaattttgcaaaacgcccagaatggcttatagaacctcaagatattctttctattattgattttgcatataataaaattggaggtaagttgttaattgttttggcagattgcataggttattatagcaataaagatataaaagtaaatgagaattttcttaatgataattggtcttggacaggttgtggagcaggaaagcatgtaattggtattctgcataatggagatattgttgcttgtacttctattagagataaaacattagtagcgggaaatattcgtgaaaaatctttaaagtcgatttgggaaagtccggactcttttaagtggaatagaaattttgatagtagtaagttaaaaggattttgcagagaatgtcgttatacagaacgatgcttaggaggatgtagtaatagtcgttattgcattaacggctcatttgaaagtgaaaatagatactgtgcatataatgttgaaatgaaaaaatggaaaaaatatttggaatcacttaatgatatatcagaaattgataatgttatagaaaaagcagcggctttaaaacatcaggatctttataagatagcttgcgaaattaaacaatctaaattatgattagagaggtaacaaatatgaataaacatgagttatatcataaccacaattatgtttatctgctgacttctaatattattaaccgctgtggtgattcattagatacaatactttttacatggttggtatatttacttacaaatagtgcagggtggtctgcgattatttttggtattaatcaagctacttctgtaattattcaaccatttataggtccattagtcgagaatatgaataaaaagaaagtgttagtactttcagatatagctcgagttctgttagttttgtatatattatatgtatatacacaaaacatgctttcaccattaatattggtttttatgacaatatccatttcattaatagaagcatttcatatgccagcaggggtagcagttattcagcatgtacttcctaatgaacattatgataaaggtgtaagtgtcaatgtgtcttgtaccaaaatagcagtattagttggaactggcttgtcaggcatagtgattagttcatttggaataggtatttctttagcgatagatgctttgatatttttaatatcagcgttgcttatagtaaaaatagaattttctgttcaagaagaaaagaagacaaaccgaataattggcagagaatatttaatttcgcttagagatggatttagttatgtatttgaccataagaagctattaaaactatgttttttatgtattctaattaattcagcagtggttccatttgatgcactgctagccccgattgcaagagaaatgtttagtggagatgccaaaattgtttcattactaagtgtaagcgtaactattggtactattttgggatcattgacttttgcaaaaatgaaagaggagaaaaaaaataatacacttgttacattttgtggaattgttttaggtgtatactatgtttttattgcatttgtttcaaaatatattgcaaatcctataactcaaaaattactgttgctaatcggttcgataataattggtgcagcattgggattaatgattacttatgtacaagtgaaatttgtaaaagaagttactaaagaatatataggacgtgtttctgcaattcgattttcacttacatacgcatgcgcgccagtggtatcttttgtgattagtattatatacaaagttactgttgttgatacaagttcactttttgtgggatttggtattgtaataataattctttttcttttggcaaataagattactctttctcctttgaagaaaggcgataaaagttattagaaattatttatatgaaaaactggctgctttttggctataaattaaagctgatagagaagagtataaacagcagaagagaagctttttgactgaggcttccggtgccaaaacggtgccaagaaatcaggcaaataaaaataaatagtacaaatcagtcgtttttcactgtattttggagagaaaaccataaaaaatatgaggtaaaatgatattaaagtatcgtgagggtggacgtacagtaggatctggacgtgttgctacagttatcgagtaattacttgttagtagtgtaaatatctagtaaattcaagggtt

SEQ ID NO: 1485 - DNA, 22649 bp, Unknown
  gut microbiota DNA sequence
gctaatttatggttgacttttcatagctggtcttgtatgagcaaagtcaatgagaatatacgatttaaactcttttttgcaaattcctctgcaatagttgatttaccaactcgtcttgctccctttatcaagagtgcatatttatcgcttctgttctctttccactcatatatttcatcgtatatttttcttttaaaaactggtttatccatgcataaatccaccttttcgccacaattataacgcaaatcccctttcatgtaaatctgaattatagtcaaatccctattagttttctcgcgtttttaacgcatatccccctttgattttcctggctattaaatttacatctatttcttcatcttctcattatgtacatatatcacagttcttacacaaaaatagtatcacatatttttattaaagtatcctgtctcttcccacaccttcttatctggacaataataactatattctcttgaatttccaactttcattgctgttccaaattttaatattccttgttgtatgccaattcttatatattatgcatcctttccaattgctttagcaatctctgcgataggcacatttctatgtgttacctgttagttaccggaacattttcgtgtgttttgaaggtgtctgatagattttcagaatataaagaaaaccccgaaaatacaggattttcggggtctgttgctctttttcgatattcggttgaattatctctttgttaacgttttgatatcctaaaaagcccataaataggggatttgtgtgtcccagtgttgcatatatgttgtatgcgattgactgcccacacattccctttttgctttattactttgatatgctgtgattacattctatctatcccacttatcacacagcgcatttatctggtctgcaaacttgctcaaatccttatttgccataccctggcacttctggataacagatacaagcctctgacctgctgccacaagacggtcaaatatagtcttctctctgcttgccatgccatatgcagcctttttctccacaagcttgcgggagccatctgccaccttctgattcgtgataaggtcatatgcatcaccactgtacggtgccactgcatcatagccgaaggtctcatgcacgtggtttgcaaaggactctgctgtggactcctctccatggactataaatacatgctccggcttgttttttattgcgccaagccactcggtaagctgatttttgtctgcatgtccactgatacccggcagatttactatgcttgccctaacttctatttcctcaccaaaaagcttcacctttttagcaccgtttaaaagtgcatagccaagtgttcccggaacctgatatcctacaaacaaaactgttgaatcacttctccaaagattatgctttaagtgatgcctgatacgtccggcctcacacatacccgatgctgatattatgaccttcggcttcttatcgaaattaatcatctttgactcatccgatgatactgccacacgaagtccggggaacttgattggattgatgcctgccgaaataagctccatagcctcctcatcaaagcagtccgatacattctcatgaaatacatttgtcgcctcaacagcaagggggctatcgatgtaaacctcaaaattcggatgctccggcaacagattctcagtctttatacgcctgataaagtatagcatctcctgtgtcctgcccactgaaaatgccgggattaccagattgccacctcttgtaaaggtcgcattgatgacctttgcaagctccaccgcatagtcaggcggcgtatcgtgcagacgattgccatatgtagattccataaccacataatcagcactgtccacatattgcggatccttgatgagcggcctgttgtgatttccgatatcacctgaaaagacaatctttttggtcacattctcctcagtcacccacatctcaatagatgatgagccaagcagatgacctgcatccacaaatcgcaccttaagccccggacatatctcatacacactgttgtaatcacacggtgtaaagtgctgcatgacattctgggcatcctccacattgtacataggagtcacctcaggtcttccggctcgtcttgcctttctgttcttccactccgcctcaaattcctgaatatgtgcagaatccttgagcatgatgttacataaatctgttgtcgcctttgtcgcaaaaatggtgcccctgaaaccatgattgtatatgagcggcaaaagacctgagtggtcaatgtgtgcgtgtgtgacaaacacatagtctatgagtgaaggattgaccggtatctcctgattcacgtacaaatcagctccctgctccattccacagtcaataagtatatgtgtgtccccaaatgtcagatagtgacagcttccagtaacctctctgtcagccccaataaattctaataccatactaccatctcctattctgttttataatagaatattataccacacttatgccattttctgtatttctttcttcaatcttgccattatttttttttcgagccttgatatgtatgactgtgaaattcccagaatatctgctacctccttctgtgtcagttccttattctccacacggtttactccaaatcgaagctctattatctgcctctcacgctcgttcaatgacagcatggctttttttagcagtgaaatctcaacctcagtctcaagatccttatatatgacatcctcatccgtccccagtatatctgataaaagcagctcatttccgtcccaatccgtgtttagtggctcatcaaaggatacctcaagcttcactctgttgttgcggcgcagatacataagaatctcattttctatgcatctggatgcgtatgtggcaagctttattttcttctcaggattgaatgtgtttatcccctttatgagaccgattgtgccaattgatataaggtcctccacgcatactcccgtgttttcaaatttttttgccagatacaccacaagccttagattgtgctctataagctgcttttttgcctgttcctttgacattgccacatttttatccaccagtgcaatcagacagcacttctcctcatctgtctcaagcggaggcggcagtacctccgtccctcctatgtaaaacacctcatttgtgtgcggcttgcttccccagagtattttccatacccgttttattactaaaaacagcttcattcaaaatcatatcatatgcattgtcctcaaataaactatccgatgctcttcccaccagcacattatgtaaaatcagcttactatttcccttcatgactgtcatctcatcaaattcacacactttaatgcttccaccatcatttcccagactcttatacggcacatcaaaaaagctaacatcttctcctacaatatcaaacaatgcactcccgcctatgtgcaccggaatctgctgtggctgtttttttagcagatttcccgtatcatacaaggctgtggcacaagctcttttaccatcctttaaaagtgtgaccctgtatagccttctgctctcattacttcgctcacagaagcactttaacactatgtatgatatgacaaaaccaaagcatatcataactgtcgcatcagagcaaaaaaagctgtccagagctgttactatgcctccggtcagcactgttacaaacatacatagtgcaaaaagtcttagaaacgggatttttctgccagcctgtctgcctactgcaagccttgccgcaagcggtacgaccaccagaacagaggtccatttataaaacgcatagctgcctgccaaaagaagcagtacacattcacataccgatgcacccatcgcagaagcaatcagacgtaccaccttcccgatcaacgggatttttagcatatatatgacaaatataagtatgagacaattggtgataaatgtacgaagaagaaaaatatcgagataaaatgcatagataatttttcacctcactttcacagacaagaatagcgtaaaagcaggtttttaagtgccgtaatatgtcgacaataagtaaaaaagacatgcagcccaaaagctgcatgtcctataaactatcgtcttgaattcttaaggaaatccggaatattaatctctacaggcttaaccgtgctctcaggctggcgtggcttctggatacctgtatatgcatgtgcaggtgctgtctgctgtggctgggcagctgtatgaagtccgcttgtggctgttgtgtgaagccctgctgttgctgtggattgtgttcccatgcctgaaacaggtcttgcagctgtctgattcggatataccatacggttttgcataccgcctgccattcctgcaccaggcgctgcctgcttacccggcatatctatcttctctgaaacatcctccagtcctgtagcaataacagtaattgaagcctgatcagtcatgctctcatcaaacttggcaccaaagataatattggcattctctcctgccagatcctgtacatagcttgctgcatcgtttgcatccataagagagatatctcctgagatattgataatgacatgtgttgcaccatttatctttgtctcaagaagaggtgaagcaaccgcaagcttaacagcttcgatagccttatcatccccctgtgcactaccgataccgatatgtgccatacccttgtccttcatgacagtctgtacatctgcgaagtcaaggttgataagtgcaggaagattaataagatcagtgattccctgaactgcctgctgcaatacctcatctgccttcttgagtgcatccggcattgttgtgcgacggtctactatctcgagaagcttatcatttggaatgacaataagtgtatcaacgctctccttaagtctctctattcctgaaacagcattaatcattcgctgctttgcctcaaatttgaatggctttgtaacaacaccaactgtaagtatgccctgatcctttgctatctttgcaacaacaggagctgcacctgtaccggttccgcctcccataccacatgtgacgaataccatatcagcgccctttactgctgcctgaagctcctctgcgctctcctcagcggccttctgaccgatctcaggctgcgcacctgcgccgagtccctttgtaagcttctctccaatctgtataagtgtaggagccttacaaagctgtaaagcctgcttatctgtattgataccgataaactctactccaccaatattctcatcaatcattctgttaactgcattgttaccggctcctccgactccaatgacaataatctttgcgctgttatcagcctcgttacttcttatctcaagcaaggtgattcctcctctttctttcccaaaatttaattttctatataaaaatatcgaatattcttaaactcatttattctataatataatttttctccaaaataatcaactataaaatatgattttttttatttagttttacattattctgacttgtcaaacacaatatttgtggtttcttccgtccagctctctaaatgtagtgtaccggactgtccctcaagcgatggcatgatagccttaagcctctctattttacgtgtaagctttgtcgtgtcaccaattatcacactcacattaccatacttgactaccggtgcattttgcgcaccataatccacagaatccggcacaaggtcctgcctttttaatccctgggtaagctcaaggatatcttttagcatagtctgctttataggcagcttctcataaagcactaccttgtcacagcttatgccgtctatacatggcacacccggcaccgtgtctgaggatgtttccaccacaaagccatccttatcaaaatatgcattctcattaattcccggaatatatatgtatccaagcattcctttttcataaactgatatatgaagagtatgcggactatccaggcttatgctcattgtatcaataaacggtatttttttagtatcctttaccttatatttcagatagacatacagtgagttccatgagtacttatcattaagcaccgcatcctctatagtcttttggtcgtaaagctcattaccctcgacaactaccctttttaccgtaaacagcttaagtgcaatgagaaacagtatcgcgagcactgctatcgtaattagcagtcccataaaaaaatgctttaatctctttttatgttttctttttttcttaatcattatatttcacgccttaatctacacattttcaagcctgatgcctcttgacacagacaaaacaagccctatttccgccatcaggaatatgattgacgtacctccatagctgataaacggcagaataacaccggtattgggaagtgaattggtaactaccgcaatattcagtatcacctggattgcaatatgactcatcacaccaatcactaaaagtgagccatacaaatcccttgcattgtttgcaatgaccatcatacgccatataagcagtataaaaagcaaaataaggcagatagctccaaacagtccaagctcttcacaaataattgtaaatatcatatcattttgtgactccggcacattgccaagcttctgtaagctctctccaagtccttttccaaacaatccgcccgagcctatcgcataaagtcccatcatagtctggaatactgcgtctgttcccgcagtctccggatgcagccatgcctcaatacgtgtacttctatagcctgccagcatgacaaacgccactgcaaacacaactaccgccactgctacaataataaactgcagatactttgggcttgcgacaaacagcatgcagaccgaaatgcctatgatgataactgcggtactcagattgctgattgcaacaactattatgagcggaataagcatagcaagcacctttaccagacttaaaaatttatcaaactgcttgggtatcttgtctataatcatagccataaacagtatgaccgcaattttagccacttctgaaggctggaactgtattggtcctatgccgatccatctcgatgaaccatgtgagcttgagcctattttcggcacaaacacaagcacacacagtataagcgatactatatacgcaaaaaagccaagctttttccaatatctgtagtcgacctttgccagaaataccataggtataagtcccagtacaatatttcgtatctgaagcttaagatagtgcatgctgtcatgatttttgatggccgatgtgtatgcactcgagctatatagcataacaagaccaaagcagagcagaaatataactataaacaacaggttgtagtcgaaataaggtattcctttttcttttttttctttattcttgctacttcttctacgctttcctgccaaaatatttactccttaaatccttttactatttccttaaagatacgtccgcgctcctcatagttaggaaacatgccccagcttgcacatgcaggtgataagagcactgcatcacctgaaacagcatgctcatagcaataatttactgcttcctcaaacgtatccttctttacagtattcatgaacccgtgtctgtgtgcacactcttcgattttatctgcagtctgaccgataagcacaagctcctttactttgccgtcaaaggcctctatccactcatcatactcagactgcttatcatatccaccgccaatgagaagtgtcggtctgttcatggcacgtataccctgaatggctgcatcaggattggtgccctttgaatcgttgtagaatctgactccacgcttttcggtcacgtactctatcctgtgctcaactgccttaaataccttaagcacctcgacaatcttatccatcggtaccccaaagcttatagacatggcacacgctgccatcacattctcaaaattatgctttccaaggagattcagctcgtttacatcaattacctcatcgcgtacaccgtcgtgtgcgtatatgatgatgtctccgtccagataaaagccctctgaaagctcagacttactgctgaaaaatataaccttagccgggcactctgctgcaaaatttctaagcacctcgtcctcgtagtttaacacgcagtaatcatctgctgtctgattttttgtgatatcctcctttgccctgatgtaattttccatagtatggtgtcgattcaggtgatcgggtgtgatatttaaaattgcgcttacatgtggcttaaatgtatctattgtctcgagctggaagcttgatatctctgcaaccgttactgtctcacctgtgcttcctgtgaccattgatgtataagggattccgatatttcctaccactctcacatccttaaagtaattcttcattatctcacctgtcagcgctgtagtggtcgtctttccgttggttcctgtaatagcgatgatctcacctgccccaaatgtgtatgcaagctctatctcaccccatattttaacgcccctgtcacgtaaggaattgaccataggaatgtctgttggtactcccggacttagcacagccacatcaaactcatcaatctgttcatctgtcaggtcgcctaaaataagcggcacctccttaagctttggtgctttctcataaagtgtttttgaatccagttctttatttccatcaaacaatactgtatcgataccatttgcgcacaaaagctctgtcgctgcaatgccactctttcctgttccgacaacaagtaccttttttccttgtaagctcatttttattcctccatcttttattgcagccatccgtatggatatgtttaacaaatcaatttctccaaacgactgccttaatcattaaattatagtatacgttatttagttctatttcgcaagagcccgtaaatcagttacacactcctatctcctgtgcatacggtatgatttccctaaatatttcagctgcaaccggtgcagcaattgttcctccatagtatgcaccgccctttggattatttattttcacaagcaccataagtgccggatcatccaccggataaaaaccaaggaacgaggctatatatacattgtcacttctcggaagtgtctgcgatgtagcagtctttcctcctatcgcataaccttcaacctttgcattttttcctgagccctctgctaccacgccctccaaaagctttcgcagtgtatcagaggtttcttcactgcatatacctgacgtctgttcaaaggacagcacctcttttaccgtgccttcagtgccatgaatctccttacctatatgaggagtaattctgttaccaccatttataagcgatgatactgttgtcataagctcgatgggtgtgagctggaatgactgtccaaatgaaattgttgcaagctccacctggcctatcttatccggctgatgcattatggtggcggcctctcccggcaaatcaatacctgtcttatcaagcagaccaaacctcttgaaatcagcataatacctctcactgcctattctaaggcctaaatcaataaagaccggattgcatgaattctgtattccctgcacaaaggtctcacttccatgtcctgttctcttatggcagtgtatgcgtctgtcctccacagtaatatatcccgggcagtaaaagcggtcatcaaggctcaccacatcctcctccagtgcgattcctgccgtaattatcttgaatacggaaccgggctcatatgtatcacttacacagccgtttctccagacttcatcatggttttcacatgaaaaaggatcattcaaattatactccgggtagtcggtcatggcatatatttctccatttttagggtttaaggcaattatgctcacactgtccgccaggttttgcgcatatgccatcattgcatttttctcacatactctttgtatatttatgtcgagtgtggtgacaagtgtgtctcctttttttggtgcttttcttctctccttgtagccctttacctccacacctctgccgtcacatacagtatatatgcagcccggtgtgccacgcaagatatcgtcatatgtggtctcaagcccaacaacaccctgaccatctgctcctgcaaagcctataacctttgaaaacaactcattaagcggatagtacctgacacttgactcgtcaacctttacccctgccaggccatatgatagtattttatcgcctgtttttttagagacattgttctttattttttcaatggatgtaaccttatccaccttactgcggatagtcttttcgtcaatcgaaagctcactgcttaaaacagagatgactgcttccttgtcggttatctgattgtgtataacgcttatgttatatgcagtttcatttgtcgctattatcctttcatttctatccactatatctccgcgtattcctgcaatatcacgctctctttcctgaagcgcacttgcctttttactgtaataaccgccttttactatcatgagataaaacagtctgaaacacaaggcgataagaacagctgtcagtatactgcaaaatacgcatatttttcttctgtagcgcgtattgttaagtatcataaacaaaaatacctcaatatttttacactaatatatgcaaaaaatattgaggctattctctattcgccctgctcaccctcctgggtgaccttttctcctgtcggaggatttgcgcctgttatcgtaaggtcagcatttataccggtctgctcctcatcagggtatatattcatatacggaagtacttcctttaatatctctctggtcaggttctgtgcatagttactgtgaggctgatcctgtacattcggctggtcgattacagtgtaaataacaagctgcggatcctgcgcaggcacacagcctataaatgatacaagatagcagcccctctttctaaggtgcgttgtctcatcatacatctgcgctgttcctgtcttgcctcccattgagtatccgtcaacctttgccaccttaccggttccgtttgcaactacgttctgcaggtagtttttaagtgtcgcacttgtattctctgacactgtcttttttagcagtgtaggctcaattgtctttactgtattgccgttgtcatctgcgattttctttactacgtgcggctgataataattgccgccattcaccagtgaagaaaatgcactgaccatctctatcatggtacagttatagttctgtccgaatacgtttgtcgctaaatcgacaggctttatattgtcgagtgtatacatgagcgttgatgtatttgcctcacccggcaggtcaacacctgtcttttgaccaaagccaaatacactctgataatacagaaaattttctgcaccaatcttatatgacatctgcatgagtgcatcattacatgaatccatgagtgccttttcaagtgtctctatgccatgtccgctacggttgacgcatgataccttttcaccgccaaacatctcgtatccatcacataaaaatgtcatatcagtagtgagcgtgcctgtatccagtccacatgccacggtaaagggcttctgtacagaccccggctcatatgtatgtgtaacacagaagttctgccacagcttattcagagtatttaatgtatcatcatcactcattgcatcaagctgctcttgtgtatagtaattcttcatattcttcggatcgttcagatcaaagttcggataattcgccatggccagtatctcaccatttttagggttttctataacgactgcaatattttctgcgccaagtccttctcttgcattatttgcataagtatctgagaacagttttatcttatcctcaacaatcgactggatatttgcgtctatagttgtgtacagtgtatttccgttttgtgcagcaattactgttttctggaaatcattgtctgcattcaaataaccgtactccctgccatttacaccatttaaagtgtcattgtaatagttttcaagtccggttgtacctacatttccggcggaggtaaagccgataactgagcttgccagtgttttaaacggataatttctctgatactctgtctcaaaccacacacccttgatgttcgggttcttcagattgcccttttcgtctgttgcatcctgcagctgtacaaatggctgaattgcatcatatgacagcttttttaacagtacaatatatttgttatccttgctgttatttgcataatcctcaattgttgccctgtctaaatccggaaagcactgtgtcagtgcatctatcgtcggagttatatactctttcttgctggtcataaccgagcaatcaagtacaacattataaacagccacactcgtagcaagcactgtgccgtttgaatctacaatatttcctctctgaaacggtattgttttgctgtcatatgactgtaatgatagtacctttttagtatatgcgtctccgcttgtatattcaataaacatcagcctgccaatgagtccaagcatggctacaactattaacataaacaacgcaaacagctttgttttcattttgcgtccgatttttcttaccggtctttttcttgtcctggctgccaatatgattcctccaatttattcagggatatcactgtactgatccatatagttgttcttatcaattgagtaataaactatctgatcctgtgaagcatatttcatgccaagtctgttgatagctgcatccttgattgcatttaaatcgacagatgtagtaatctgcttgtatctggcatcattatcagccttcatatcatttatccggctctcaagtgctgcaacctccttcatctgctgtgtcacatttgaccttatctgaataagtgaaacagatacaagggctgaagctgccacacacgctgtgagaaaggctacaaatgccctgttcattgagagtgctctctcctgatttcttcttgcagatgttcttctgtttttctttcttcttatttcctcaagctctcttgtcgatttctgtggtcttctgaccggtgctgcctcgtcaagctctcttacggcattcccatttatataataagtagttttattcatttagctgctccttttgctgtcattctacaaatcattcttttcaaacacacgaagctttgcactcttcgagcgtgaattctcttcaagttccttttctgacggaaggataggttttcttgtgataaccgttcccttcgatttattaccgcatacacataccggaaaactcggtggacatgtacatggattttcgttttttttgaaattggattttactattctgtcctcaagcgagtggaatgtgattatacatatcctgccgcccggattaagtaaatctatcatgtcatccaggttgtcccttagcacatcaagctcatgattcagctcaattcttatagcctgatatgttctcttcgacgggtgcccaccggtagctctgaccttttggggtatcgctgcctttattatctcgttgagctctcctgttgttgttatctcttgcttttgtcttgctgctgcaatgtgctttgcaatattctttgcaaacttgtcctcaccgtaatccctgatgatacggtacagatcattttcgctgtaggtatttactatatcccttgcagtaagggaattcctgtcatccatacgcatatcaagcggtgcatcctcacttctgtaggtaaagcctctctttggtgtatcaagctggaaggatgacactccaagatccagcataataccatccaccttttcaattccgagtgaatgaagcacattcttcatatccgaataattgcttctgactatcgttaccctgtctccaaactccgcaagtctctctcctgctgcctttatggcatctgcatcctgatctatgcctatcagcctacccttgtccgaaagtctcttggctatctcatatgagtgcccagctcctccgagagtaccatccacatatatcccgtcaggacggatgtttaaattttcaattgtctcgtcccttaagactgaataatgcttaaattccatgtggtctctccatttaatatcaaatgcctataccaagctctgccatatgatctgctatctcatccatatcgtcaaaatcagagttctcaaggtatctgtccttgctccagatttctactctgctgtatactccgacagatactacttccttatctatacctgcgtattctcttaagttcgccggtaagaggattctgccctgcttgtccacctcacaggtggccgctcctgcaaagaagaatctcataaattttcttgcttctcttgatgtgagtggtttgtcgcgaagattttcctcaatgcgatgccattcttcgttggaatacacgaacagacagccatctaagcccttggtaactacaaactcattaccaagctgttcacggaacttcgcagggacaatcatacggcccttggcgtctattgaatgattatattcgcccatgaacatggcatccatcctccttttcctcattttgaagctttccaccactttactccacttatatggtatttcactccactttccaccacttgaatacaatattacacctaacagcccacaaaatcaaggctttaagctaaattcccataaaaaagcaataaaaaagacgctcagtcttttcgtggactttgcgtcttttttataaaatacatatgaaatttactctttagtggtggattgtggtggagtgtccaccattttacccattttcatctgcttatatctgacaatacctatccatatggctgatactgccaccaaagtggcggcaagtgccatagacaccggataattgatatgtgggatgagaagctggtctgtacgcaggctttctatccagaatcttccgataccatagcctaacaaatatagaagaaacacctctccgtcaaaccttctgtgcttaaaataaagcatcaacaaaataaataagcacaggttccaaaaggattcatacaaaaatgtaggatgcaccgagatatactccactccgtctatcacagttgtatgtgacataagcttttcagtcagatccgatgtcctgacagctgataccggaagctgcatggcaaaaagtccgtcataataatcgccaaatgcctccctgttgcagaagtttccccatcggccaatcgcctgtcccagtatcagtccaaggcccgccgtatcacacaacagtggaaaagacagctttctgacctttgcaaaaacgaatgtggtgataattgctgctatcactcctccgtaaattgccagtcctccctgcctgatattgaatatgctaagcaggtcgtccttgtacagttcccacctgaataccacatagtatattcttgcgcctatcaccgagcatatgattgccacaagtgccaaatcaaagtatgtatccggattttgtcctgattttttagccacatagcaggccacgcccagccccgcaagcataccacatgctattattatgccgtacatcgcaatatcaaagcttcctattgatatgctctttatcacatgctgcagatatatatgaagatgtgggaaatttatattataatccatatttttcctttcctgactgtaattgctgtctgtaacaccataatatatacggcagcaatcacaaattacgaaaatatatgtacccggagcaccataaacctgatactccgggcaactgtcattatgcgcttcttagtctacgcctgacactcaaagcttgcacactctgtactgcacttgtttggtgtacagtttttcttgatgccaatctgattggccatgcagctattgtggtcattgtacttacactttgccgcatcacagtgcacatccgtttccttgtgaatagctaactctgcagatacctcacagtcacaggccttatttgaaaagctgccacactgtgtatcgcaggctttctttgccttagttcctttcacatcgatttctctgagcttacagcagttatctgcattatacgcacatttttcaacattacaatcaagtcttgtcatacttttgcctcctttgcttatgcataggctagtatgtcctgattgattttttttatactttttaatcgattatctgtgtttttcctcttccggaagctccactctgatttcctttgtacggatttccttgcaaatctggtcgatgaaatctgaaagtggcttaacaccctcatttccttcaaaacggcttcttacagatactgtgccgtctgcctcctcgtcagctccgacaacaagcatatatggaagcttatccatacgagcctctctgatcttgtatccgatcttctcagctctgttgtcaactgtcacatcgacatcattgcgcttaagctcatctgctacctttttggcataatcagcatacttctctgagataggaagtactcttacctgctcagggcagagccatgtagggaacttgcctgcgtagtgctcgataagccatgcaagtgtacgctcatagcagccgagtgatgtacggtggatgatgtatggacggattttatcgccgttttgatcaatatagtacaaatcaaaattctcagcaatagcacagtcgagctgtattgttaccatggtatcctctttaccgtatacgttcttggcctggatatcaatctttggtccgtagaatgcagcctcgccgtcggcctcaacaaaaggaacattttcctcaataaggatgttacgaagaacctcctgtgttgagttccagtactcatcatctcctaaatacttttctgtgttctttggatcccattttgaaagacggtatgttacatcattctcgagtcccagcaccttaaggacatatctgttaagactgaagcacgccttgagttcctcctcacactggtcaggacggataacattgtgaccctctgagatagtaaactgtctgacacgtgtcagtccatgcatctctcccgaatcctcgtttctaaacaatgtggaagtctcacccattctgtaaggcagatctctgtatgagtgctgctttgccttgtatacataatactggaacggacatgtcatcggacgaagtgccataacctcttcctcgccgtccttctcaggatctccgagaacaaacatgccgtcaagataatgatcccagtgtcctgaaatcttgtacaggtctgattttgccatgagtggtgtctttgtacgcacatagccccactccttatcctcgaggtcctcaatccatctctgcagcttcataatcatctttgtgccctttggcatcataagcggaagtccctgtccgattacatctactgttgtgaaaagctccatctcacggccaagcttattgtgatcacgcttcttagcctcctccattctctcaagatgtgcctttaaatcttcttttttattgtaggctgttccgtagatacgatggagtcttgccttgtttgaatctcctctccagtatgccattgatgatgctgtgagcttgaaagcctttacgccctttgtgctcataagatgtggtcctgcacataaatctacaaagccaccctggtcatagaacgaaatctcctcaccctcaggaagctcctcgataagctctaccttgtacggctcatccttttccttcatgaatttgattgcttcctctctagggagtgtaaatcttgttatctcatgaccctgtttgatgattttcttcatctctgcctcaagtgcatcgagatcctctcttgagaatggctgtgaatcgaaatcatagtagaaaccatcgtcaattgccggtccgattgtgatttttgcatccgggaacagattctttactgcctgtgccagcacgtgtgatgctgtatgtctgatgacacgaagtccttcctcatcacttgctgtgattatattgagtgtgcagtccttgtcaagaactgttcttaagtcaacaatttctccgtcaacctctcctgcgcaggctgctcttgcaagtccctcgcttatatcttttgcgatttcatatacgctttttgcttcgctgtactcttttgatgagccatccttcaatgttatcttcatggttatctctcctttatttttaatataaaaatccccgacaccgcattgctgcgacatcggggacgataagctttgttaccgtggttccacccacattctttccgcctgaaaacatactgcttgtctgtatccgacagaaactcatttgactataacggtgtcaccgggctttattggagccactccaagctggtgttcggtatatcatccaccggggagctttcaccactctttggactttgattctcgtcttccaaggcttccctctctgctgcttttaatatacttactgtgctcttcaacgtattgttattatgctaatgttcctttcaaaaaatgataatatacttatttttctaatctgtaaagtactttatgcattttttccgcaacattttttatatttcttgcctgaaccgcatggacatgggtcatttcggccgattttcttacctactaccactgttcctgacttcttctgctcgaggtaaagcgcatgctttgtctctgcgtcaaagatttcatcccatgccgggagattgtaaagccagtctgcctttgcatctaccatgttcttataaagcttttctttatcgaatgcaaggcttacctttgtgtcctcatccatctcctcgattgggtttggggtgacaaggctgtcattgattccgtctaagaagcctgtcatctccatgattgataactcatatttctcagcaagctctttgactgttccctctactgcctcatccggatttgcaaggagcttctcatatacacccttctccaagaggaaataatgctgccaaaaacgctgtaactctccctgatctgctttgtcattgtaggcaatcttgtgccactcttctaataaagccatttttactaccacctttatcttttataaactgatatgaggccaaacagcctcaacttcacatatggatgtattataccaaaataacagcttgacgtcaattttgtttttttatattataataaataaaaaactattcagaaccactgagaacaaaaaccacggagaacaattcatgaaaaagacaaaacgtattctggcactgattggcgccatccttttattacttttatatgttgtggcatttgttgccactgtgctcgatcacacaagtgacatgcgctactggaaggctgccgttgccgcaactatcattatcccggtgcttatctggacgtattcatttgtatacagacttttaaagggttctgatgataaagaatctgatgatgtaaccaaaaaaccatgaaacgcaaaatcacacctgaattatcatctaaagactggaaggaattctgcagccgttttcattttgataacgataagctgcctcttatccgggcaatatacacagcaatgcttccattggtggatgccttcgcatattattccataaaacaggatttgcccggggtatccctggcacactatgcctacggcctcgtgacactcggaaacggtgcagacgagctgtcagagctgtatttaaaccatgagcagcttgaggaggcctacatagctgactgtttaagcctcatgcttttgtcaaacgcatatgagcagtttgcaaaggctgtcgaagaagaaagctctctttatgccattgagctgtcatttttaggcgatgaatatccgcttgagctgctgcctgagatttttgagcacgtaagccctgatggtatacatctcaccggttcaaatatgctcaagccacttaagacagccgccctcataataaagcttgactcacaaaagcagaaaaatatcaaagagctctgtaatacctgcgcgaactgtaaaaatctgtcgtgcccatcaagaaaggcccctggtcctaagctgccacacacctatggtgccatgcagatttttaatatcagacattgaagcccttctttttctcgtatgagcctctcattttctcaaccagaagtgtcagattcctaaacagtgactcagccgcaaagccaaacactatcatgagaagaatacatatatttgacaaatctgtcagtgcaaacagtttctttaagaagaaacccgaaaataccagacctgctatatttccgataataacagcatatttcattccattgagtggctcactgattttaaagagaatcatgaagcccactaccgaaagtacaagcgtcgctatcgttcctatgcttgcatctgatatacaaaatacttctccgcatacgacaagcgctccgacagctattacatccgtaagtccacccggcagtgcctttagcatgacattggtgataaagtgcccctttatcctgtccttattctgctccagtgccaataagaatcccggtactcctatggtaaacatactgatgagcgatacctgtgccggctcaagcggatacgtaaccataagaataactgaaaacagtgaaagtaacagtgagaatatatttttcacaagaaacagactggctgagcgctggatattgtttaccaccctgcgtccctcatataccacatccggcatatgtgcaaaatcagagtccaaaaggacaacctgggctgcctgggctgccgcctcacttcccgatgccatagccacactgcagtcggcatccttcatggcaagtatatcgttgactccgtctccggtcatcgcaactgtatgacctttagcctgtaaagcctttacaagctgtttcttctgctttggtgtcactcgtccgaatacagtatatttatttactgcatcggctattttatcctcagtatcaagtgtagccgcatcgacaaagctttctgcactttcaattcctgcctgtatggcaatccttgaaacagtacgcggattgtcacctgaaataacctttatcgcaacaccctgactcttgaaatattcaaaggtctttaccgcattctctctgataggattggcaagtgccacaaatccaagcggagtaacgctgccatttatgccattctccacgttttctccatcataccttgcaaacaaaagtactctgtcacctttgtcagcgtatggtatgatttcttcctcaatgcgcgcaaagtcttcgtgcatgataaactccggtgctccgagcagatatgttccatcagaaaaggtaacgctgccatatttgaggctcgacgaaaatgcctgctgtgaaaccgctgtacgatgcagtgcagatgtattatttgtcaaagcttccgctgcatatgcttttagtgcgagcatagtcgcattgttgtcaaccgaggcatttgcataatctaaaataagactcttaagctcatctaatgtcaaagctgtctgtgtgccatctgctccactgtttttacagagaaaaatttccttaagcttcatatcaggctcagtaattgtgcccgttttatccacacaaagcacatccacacgcgcaagcgtctcaatacttttcatatcatgaagcaaaacctttttccttgcaagcttcatagtgcttaaggcaagcgccactgtggtcagcagatataagccctccggtatcattcctataatcgctgcaactgtcgatgtaacgctctttgtgatagactcgccattcacaaaatggctctgccagaacaatataagcccaatcggaataataactatgccaacccatttgacaatcaaattaatggagcgtatcatctctgactgctccttgccgcccattgattttgcctcaaggctcagctttgagatatatgattcattaccgaccttttcaagccgtgcatagcactctcccgatacaacaaagcttcccgacatgagagtgctgccctctgtcttttctacctcatcagcttcacctgttagcagtgattcatttacctgtatatttccggatatcacaaccgcatccgcacaaatctgctttcctgcggtaagtaaaatcacatcgtcctttacaagttcatccgtactaatctgctttacgctgccgtttctgatgacatccgcatgcggagcattcagtaaactcattttttcaagagtcttttttgcgcggatttcctgaacaattcctattaccgtatttccaataattataggcagaaatgtcagatttctgaaagaacctaccattatgagaagtatcgttataacaagaaatataaggttaaaatatgtgaaaacgtttgaaaccacaatttcctttgtcgtcttgtctgtagatatatctgttctattggtaaatccttcctccactctctgccttacctcttcatcggtaaggcccgtgatatttatgctgttgctgtctttgttcatctgattcatgctattcaccgtttgtccattattattctacacaataataatggtacaacataagcatgatttcaatacctatttcattaaaaaaggatgaactatttcttaatttcttttcaaattgtaacttatcaatccgttgctactcacttt

SEQ ID NO: 1486 - DNA, 41172 bp, Unknown
  gut microbiota DNA sequence
aaaacttcctaatgcactttcatcaaatgccttatctaccctgctgcaccacttatcatcactgcttagtgcaaacatagctatcactactgcagccagcgtgacactcacaaattttccaaaaaacttccgcatactattacctccatttggattagtatgctcctgtaatttttcttttattcttttaatatcttattatctcattctaactattccaaattattttgagcaaaagccggtatagtttgacagtttaggtgttttcctatataatttcgatatatttatatgattattatagatttcacatataattcccacgttgtcagttacaaataaatattgtaatagctttataattcttaaatcaccatttaataaaggagggattccatgaatacatacctgctcatcacatccatagtaatcttcttatgtatcctgctaaatcgtgtctccaaccgcataggcattccggcacttttagcctttatcgtgctcggcatgctttttggctctgacggaataatgaagatagatttcgacaattacgcgttcgccgaacagatatgctctaccgcgctgatttttatcatgttctatggcggctttggcaccaactggcagcgtgcaaaggctgttgccgttaaggctgtgctcttgtccaccatcggtgttattattacatgctttctcacagggctgttctgtcactttgcccttaatatgagctgggaaataagctttctccttggtgcgcttatttcatcaaccgatgcggcgagcgttttctccattctccgttcaaaaaagctgaacctgaaatataatacagcctctcttctcgaggtagaaagcggtagtaatgacccatgtgcctatatgctcaccgttgcttttatagccatatcccatggcaacgcaagccctggaaatattgccatactcatagtaaagcagcttgccttcggcataatcttcggtgccttgattgcaaagctttccatcatactccttcgatatatacgcttcaaaagcgcggggtttgatgcgattttcatggtgggaatagcactgatatcatttgccctgcctgcttactttgacggaaacggcttcttaagcgcctatattgtcggcatcatactcggaaacactgaaatagaaaataaaaagaatctggtaaatttctttgatggcataacgggactcatgcagatgcttattttctttctgcttggtctgctttctttcccgtcaaggctgccacaggtcatagtacctgcgcttttaatatttatatggcttacctttgtggcaaggcctctttctgtagcacttgtgctcacaccatttcgcagcaaaataaaacaacagctgcttgtctcatggtccggcttaagaggagctgcatccatagtgttttccatcatggcatataccgccaccaatgatgacctcgacaccttccacataatatttatgatagtacttttttcaatactgcttcaaggctcaatgcttccatggatatcacgaaagcttgacatgcttgataaaacagccgatgtaatgaagaccttcaatgattactccgaggaagcagatatccagttcatacagcttaccataccggaaaatcatctgtggtgtggccacaagctaaaggatctgacgctgccgccggagacactgattgtgcttatacgaagaggtgagcagaatataatacctgacggcgaaacaataatacttcaaaacgatgtgctcgtgctgagtgccatcacacctgatgaggtgcatggtataaaactggtggaaaaaataatagaaaaagacagcagatataacaataaactgctgtctgaaatatcaaaaaaacacaatgagattataataatgatccaaagaaatgggcaggtaatcatcccaaacggaaacgtacggctgaccaccggtgatatactggtaatcaaccgcgccgtaaactgataatgtcagatttttttctccatggcaagctctttcatctctcgcgcgctctccatcacggtatctgtgatttttgcaccgccgagcattctggcaagctcagccacgctgtcattgtcagttagtcttcgaatccttgaaaccgtggatttgttctcgactgctttttcaataaggaaatgtgcatctgccatagctgctatctgtggcagatgtgtgatacatataatctgatggttgcggccaagctcattcatcttctcagagaccatctgagctgtacgtccactgattccagaatcaatctcatcgaaaataagtgactcgatgtgatcattttctgccatgattgtcttgatgccgagcatgatacgcgacagctctcctcccgatgctaccctgccgagcggcttaagtggctctccggggttagttgatatgagaaactccggcgcatcgatgccgtttgctgtatagtccgcaagtctgtcaaagtgcatatcaaactgtacatcgagaaaattcaaatcattaagtgctgatttaatttctgacacaagctttacagcactcccttgtctgatttctgatacctcatccgatatctgtgccagctccttttcctttttcgcaagctgctgctctaatttctgtaaataagaatcataatcattcaggacactgatacgctccctcttttcattgagtgctatcagtatatcgtcaattgagttgccgtatttgctctttagatgatttatctcatccagacgcttttgtgtctcatagaaggtctcctcgtcaaactcagcctgtgaaatataccctgatatctcgtgattaaaatcagaaagcagactgtctatctctgacagctgactctccagagcttccacatccgtatcatagcctgatacctgcgacagctctcttaccgccctgccaataagctctgaggcactctccatctcgcctcctgtggcagagtatgcagcatttacgccctccatgattttctttccgtttgaaaacttcctaaactgcgcctcaagctcctcatcctcccccggcacaagggaagcttcttctatctccttcacctcgtactcaaggaatgacagctcacggcttctttcctcattgtcgatatttgacttttcatactcatccttaagcgccctatatgctttgtatgtgactgaaagctgctgctttttatctccaagcgactgctttgcatactcatcaagtatatcaaggtgttttttctttgataaaagtgactggtgctcatgctgaccgtggatatctatgagatatgaggctatttccttcatccgcgaaacagatacagcctcaccgtttaccctgccgactgcgcgcgactgtgtgattttacggcttaaaatcacgcatccgtcctcgacctccacatcaagctcccttaaagcctctataatctttggatcttcaactgaaaaaatcagctctacaaaagcaggcttttcattgtctcttagcatctccttttgcactttttcaccaagtgccagattgatagagcctatgatgattgattttcctgctccggtctctcccgacagtatatttagtccgtcggaaaactcaacctcgcactcgtctattagtgccagattctttacatgtagattttgtaacatattttctccttcctctcccaggcatgacgatatatgttatttactgttacagtgcagatatattctgatattcatgtaacattattccacaattctgcggatttttttcatcaccgcatatgtatcatcaacagtccggattgcacacatgattgtatcatctcctgcaatcgaaccgacgatttctctcatcttcatggcatctattgcagcacatactgcgcttgccattcccgatactgtctttataacgagaatattctgagccatgtccattgacaaaaagccctctctgagcactctctcgtatttttttgaaaggttctcaggtgcatccgttatcacagcgtacttctgtctgccacctgcagtagggatcttcgtgagcttaagctccctgatatctcttgatactgtggcctgagtcacgcgaaaaccatctttttcaagaagcgcagagagctcatcctgcgtctctacctcattcttttggattatctctattatcttggattgtctgtttgttttcatgtcctgtcacctcataaatattattcgtaactattcattataacaatccttatatgtgttatgaataatttcccatctttttgcgtagtatttccaaaaagcttctctggtgaagcttgcaaatctttgtataattggctgccttggaaataacaaaacggtctcctacagcaagctctgccgtggtgtcgccatcatagctgacacatgccagctcatcgttttgctccctacggcttagaatttctatctctatctcatcatcgcctgacagcacaatgctctttgaagtgagattgtgagcattgttcggtgtgagcagtatcatatcacccttcggatccacaatcggacctcctgccgacatactgtagcctgtagagcctgtcggagtcgcaacaatgatgccgtcggcatggtaattgtttaaaaactcaccgtttacatacacattgaggcttaaaatctgcaaattgccctttctgtggatgacaatatcatttaatgccactctcgaggtctcactgcctcttttgtgccctgtgagcatgatgcggtcctctgtcatgtatttatcagccatgagcgaatcgatagcgtcaaataccgtagcttcctccacctcacacagatatccgagtgtaccgagatttactcccataagcggaatctcaagtgtctccacccttgtagccgcacgaatcagggtaccatcaccgccgagcacaagaatacactgcgtatcctgtggtatatcctcaagctcaaactcattgtcggatattgcctcgacattgctcataaggccctttgccgtgccgcctttttgctctatgtatgtcactattttatttgtaagtgcaaaattcctgtccttataggcatttgctatcacaacaaaatgtttcatagtctattttttgtccagctctccatgtgcagcctcaaccacactatgaatatccactgattcctcctttataggatcatctgtctttttgatatgtacgaggtactctatattgccctccggccccttgattggcgaatactcaaggtctaacacgctaaatccatttgaaagtgcaaaggatatgatattgttcactacctcctcatgcacgctcttgtcacggaccacgccctttttacctaccttttccctgcctgcctcaaactgtggcttgataagacaaaccatctcgccaccgtcctttaacagtgctcttgcaggacctaacaccttggtaagtgatatgaatgacacatcaaccgatgcaaaatccagctcatcatctatatcattgggcgtcacatacctgatattggtcttttccatgcacaccacgcgctcgtcctgacgcagcttccatgcaaactggccatatccgacatccacggcatacacctttttagcaccgttttggagcatacagtctgtaaaaccgcctgttgaggcacctatatccatgcataccttgccatccatcgtgatatcaaagtgcttcatagccttttcaagcttaagccctccacggctcacatactgcagtgtctttccatgaatctcaatattgcagtcatcagggaacgtacttcccgccttatcctcacggttgttatttacaaaaacattgccctccataatcatagtctttgctttttcccgtgatggtgcaaagcctctgtttacaagtaatacgtctaatctttctttcatactgtatgttacctctatctataatgctgctattatacgcttagccaccgattcggcatccacatgcagctcctttttgagcacctctacattgccatgctccacatagcagtctgggagcgcaacagtcaacacctcaagagctatgccgttagtcttgacatactcagtcacatgctcaccaaaaccgccactttgcacattttcctccatagtcacaagcaggctgtgctcacccggcagctcatttatcgcttccttgtcaaaaggcattgcaaaacgtgcattgataagtgtagcagaaatcccctctgcctcaagcagctttaccacatcaacagcagtctttaccatactgccgagtgccatgacagccaccttgcttcctttttggattagctcactctttgcaagctctatcggctgtctgatttccttaagaccgtcataggctgcacctcttggatatctgagtgcaatcggaccgtcatatgccactgcaaatttcatcatatcggacagctcccacttattcttcggagccatgattgtcatattcggaataaccgacaggtatgatatgtcaaatatgccctgatgcgtttctccatcgctgcctacaagccctgccctgtcgattgcaaatatgacatgcagattctgtatgcacacatcgtgaagtatctggtcaaacgctctttgcaaaaatgacgaatacaccgcaaaaaccgggataagtcctgactttgcaagccctgccgcaaatgtcgtggcatgtgcctcggctattcccacatcaaaaaacctatccgggaaattgcggtgaaacctgcgaagccctgttccctctgccatggctgccgttatcgcaactacctttggatttctctcgcccagcttcttcatgactgttgagaaaacatctgtgtaattggccttcgtgcgcttattcttcggaagccctgtctctatgacaaatggctctgcaccgtggaatctggaaggataacgctctgccgggccatagcctgctcccttttttgtgagcacatgcacaagcaccggaccatccacacgctttgcctcgtcaaacacacggcacatttcctttatatcactgccatccacaggtcccaaatagatgatgcccatctcctcaaagaacatacccggaataaaaagctgctttatgctgctctttgtattcctgatatgctttaccatacgctctccgtagattggtatatggtttagggaattcatgacattattctttaaacccctgtatgcatccgctgttcgaaatcctgaaagatactggcttatgcctccgacgttctctgaaatcgacatattgttgtcgtttagcactataatgaaattgcctttcacgcttgaagcattgttgagtgcctcatacgccatacctcccgtcagtgcaccgtctcctattacagaaaccacatgatagtcatctccggtcacctgtctggctgtcgcaagtccaagccccgctgaaatagatgtggagctgtgtcctgtattaaaacagtcacagtcgctctcatccgcctttgggaagccgctcattccgccatactgtctgagcgatgaaaatccatcctttctgcctgtgagtatcttgtgtgtgtacgactgatgccctacatcccacactatcttatccttcggcagatcaaagcacagatgcaacgccatggtaagctccactactccgagatttgatgcaagatgaccgcctgtcaccgatatgctctctataagaaactgccttatttcatcctttaacagctcaagctccttatgtgtcagtttttttatatcattttccttttgtatcttttctaaaaccatcctatttctcccgatggatcagatattcaaataactccttaagaaatgcatcgtcgtatcccaaatcatcaagcagcttttctgcctccttagagatgcgctccacatcagaaactgccttatccaatccctcaaatgtgacatatgtcgctttattatttttctcgtcactgcctaccggctttccaagcacctcaagtgagcttgtgacatcaagcacatcatcctgtatctgaaatgcaagccccagctttaccgctatctgctccacgcgtgatacctcatcagacgatgcccctgcaaggattgctcctatcatcatcgagctctctataagtgcgccggtcttaagcctgtagataaagtccagcttttcccttgtgatagggcagtcatcggatttctcactctccacatcaacaacctgtcctccaaccatgccatgcacgcctgccttttttgcaagcaccgcaaatgcccttgccacacgcgcatcagccacttccatgccaaaagcctttgctgcggtctcatatgccaggtttaaaagtgcatcacctgcaagaatgcccatagcctcaccgtacacagcatgtgtggtcttctttccacgcctgtactcatcattgtccatggcaggcaggtcatcatgcaccagcgagtaggtgtgtatcatctcgattgctgccataaatggctcaatcactgcactgcttccgccaaacatatggtaagtctcttccatgaggatagggcgaagcctttttccaccggctctcacactatagttcatggcctcaaaaataatcctctgctgtccctcctcagcgggaagaaacttctcaagcacgttatttatatgctctaccttttgctgcagctcctccatgaattgtgacttatttaaattcccatttaagctcatcagaattcctccagttgtccatcgctgtttagcacaagcatggccttttccatgccctgtaccatatcattggcactctttacctcatcaagccccttcttgtagagctcaaaggcctcatccagggatacatccgcatcctccatcctcgccactatctgctccaggtgtgtaaagcgctcctcaagtgtcagtgttttttcattttctttgctcatcgttaataacctccgaaactacggcccttgcatgaccgtctatcagatatatatttatgtcatcgcctgcattgatatcggatacactgtgcagtgcacccttcttttccacctcgacatacgcatagccctgtgccagctttttggccggtgaatatgcatccagtgtacctgaaagcagtgccagacgctgtctgcaatccgaaagcctctgcttcataatcctttcaagtgcatcctcgatatctgccagacgccttttattctcatttagtttattctgtggactaaggaaattaagtcttgttttaatatgtgacagcttttccctgaaaaaatcaatccggcctgtcagatttctgtccatcctgcggcgcagattgtcaaggcgctccaacgtctgcctgtagtcactgactgcaagctctgcagccgctgaaggtgtgggtgctctcctgtctgacacaaaatccgctatcgtccagtcggtctcatgacctactgccgagataattggcgtgtggcagtcaaatatggctctcgccacaatctcctcattaaaggcccataaatcctctatggagcctccgcctctgccgactattatcacatcaagattcatcgcatccaatgtctgtatgccctttgctatgcttaaagccgcaccctctccctgcacaagtgccggataaagtatgacctgtacatatggattcctgcgcgatgatacattccttatatcctgcacggccgcgcctgtcggtgctgtaaccacaccaatacggccggcataccgtggaataggctgcttgtactctgcggcaaacatgcccatctcctcaagctcatgctttagctgctcgaatttgagatacagattgccctctccgtcaagctctatctttttggcataaagctgatatgcgccggtcttctcatacacctcaacggaacctgtcacaataacctggtctccctctttcatgtggaaagaaagtcctgccgccctgctgcccgcaaacatgatagcgttcatggctgctcccgcgtcctttattgtgaaataaatatgaccgctcgtgtgatacttgcagttgctcacctctccctttatgctcacctgtctgagcataaaatcctgagcgaacatatttttaatatagctatttacttgcgctaccgaatatatatttctatttgccatgttcaatgctctatatcgctgttcctcttaagctatgcaaactttgcaagcactccgtttacaaatgcacctgactcatctgcaccatacttctttgcaagctcaacagcctcatttattgaaacctttgtaggaatatcgtcctcaaactttatctcataaactgccaatctgataattgccagatcaacctttgccatacgattggtcttccagcctgtagacttctcatcgatgagtgcatcaagctctgccatatgctcaataatcgcactgcatttttcatcaatatactgtctttcctcgtctgtaggatttgtaagctcatcatttaaaagctccatctgctctgcaagctcagacttgtcatgaaactcaaccctgaaaagcatcttaaaaacgttttctcttatcttgcttcttgtcatttaaattcctctcgtgaatagtattttatataaattaaggatgtctgtacgacatccttaattatactacatttgtgatcatttaaaaagaattatttaattctctcccatatcaacacttgctatacgaacattgatagtagccacagaaagccctgtcattgtctcaattgcagacttaaccttctcctgtacctttgtagaaacctcagggatgctgtatccataagcaatattgagtgctacatcaaccactacctcattgtctgctatctcaatctgaattccctttgagagattcttcataccgagcctgctgacaatctcgtttgtgatattgcctgccatggagcttactccctcaacctcagtagcagcaagacctgctatgatagctacaacctcatctgctaccttgatctcgccagactcatctgatttgatatttattgtgtttctattctctgccatgtccatgttcctccttaaccggctatacggtctgtccctttgccacgtaaacctggaatgagtcatttcccgtaagtgatctatttcttgatacgcgaacattcttgtctgtaatcacgtactccagattggcgccatcctcaattaccgtatcctgtagcaggatgcagttcttgacctttgcattctttcctatcttgacgcctcttgataggatgctgttttccacggtaccctcgatgacacagccatcagcaaccatgacattcttggcttttgagccatttatgtatcttgtagggttatcatccctgatctttgtatagatagaattgccactcttaaacaatgcttccctgttatcctcatcaaggagcttcatattctcctcgaaatagctcttcatatctgtaatctgtgaagcataacctgtgtactcatatgcctggatattgagtgaatcagtgtttgtagccatcagatcccttgtaaaataagaataaccatgtacaaaagcgtcatccactattctaatgagctgctccttctccatgatatagatattcatgccaaagtttaccttgcccatatccctgtcattgatatatatctttttgatacgtccatcatctatatcaaatgtatagtacatctcatcattgttgccgtttggtcttaagaataccttcggtacctcctgcttgcggtacattgcagtgatatcagcccctgtagtcttatgtgcttcaatcagctccctgaaatcaaaattgaatacatagttggcatcagccatgataacatacttctgagtgcactttctcagatagcccttaagactttcgattgcctcaacacggccctcatacaccttaatctgcttctgtgcataaggcggaactatattaataccaccattttttcttgcaagatcaaactcctgacctgagcccaagtgatccatcagagagtgataattctttttaactatgagagatatattgtcgattccactatgtaccatgcttgaaatcaggaaatcgcagagtctgtaacgacctgcaaacggaatggaagccataagtctctcggataccatctcaggaatgagggcatcgtagctgtttgcaaaaataacggccaaagcctcttcgttgttcatgtttagcattgttcctggccctcctcaacatcattatataccatagcctttggtcctataaccgctctgtcgccaattgtaactcccggtgcaattgtagcaacatcacctgtcacatcatcctcaggcttttctccaataactgcatcacagcctaccgtaacaccctctgcaactatacagtgtgtaaccttagctcctctttttatcacagtatcgcccatgacaactgcatcctctaccactgcgccctcttctacgacgacacctccaaaaagaattgaatgctttactgtgcccttcactacacagccatcggtaatcatagagtctgtaacctctgcattgttgccgatgaaatgtcctgtatgaccgctgttacggctgtatatcttccagttctcatcgaacagattgataccgctgtgttccggatcaagcacctccatattggcttcccataaagccggaattgttcctacatccttccagtagccattgaaatgatatgcatacatcctgcggtcatccctcaaaaggtttggaatgatattgttaccgaaatcattctctgaatccggatcattttcatcctcgataagatacttcttaagtatatcccaattaaagatataaatacccatggatgcaagattagacttaggattctttggcttctcctgaaactctgtgatcttgtcgtcatcatctgctaccatgagaccgaaacgtgatgcatcctcccatggaacctccataaccgctacagaaaactcagcatttttctccttatggaacttaaggaaatcactgtaatcctgcttacaaatctgatctcccgaaagtatgataacatactcaggatcatatctctcgataaatgcaatattctgataaatcgcattggctgttcccttgtaccagtcagagcctgaagccttctgatacggtggcagcacatgcactcctccatataatctatcaagatcccatggctgtccatttcctatgtactcattcagcacaaacggctggtactgtgtcaatataccaactgtatctatgcctgaattaacacaattggaaagcggaaaatcaataattctgtatttgcctccaaacggaactgccggctttgcaagtttctgtgtcagtgcataaagtctggagccctgaccaccggcaagaagcatcgcaactagctcttttgccatattaaaatcccccttgtttaattttattaaatttttgttagcttttgcaattattttggttttttataatggtttatagttatattttaccacactttggcatttatgcaattcaaaattaactaaaaaaaactataatttttgtcattattttccaattatctcgcggttgtttatgaactcgtacggcacttcctggtacacatagtagttaagccagttggaataaagtatattaccgtgcgaccgccactgtaaaagcggcttttgtgtgtcatcattatccggatagtagttcaccggcatatctatatcaagcccctttttcttatccctctcgtactcattgtgaagagtatatctgtcatactcaggatgtcccatcacaaaaatctttttaccgtcctgatccatcagaaggaatactccggcatcatccgactccgcaagtatggtaagctcaggatgctttaatatatcctcctttaagacctcggtatgccttgagtgtggtgcgtaaaacacgtcatcgaagcctctgacaagtgggatttttctgttctttacgtggtgcgcatacacaccaaatttcttctttggaagcacacgctttggtatgccatagtgataatataatcctgcctgtgcaccccagcacagatgaagtgtggagaaagcatgtgtcttgctccactccattatactgcatatctcatcccagtagtctacctcctcgtattccataagctcaaccggtgcccctgtgattatcatgccgtcaaagtatctgtcctttatatcatcaaaggtctcgtaaaatttgttcagatgactgagtgatgtgtgagtggcctcgtgagtagatgtggtcacaaacgttacattgacctgtataggggtatttgacagtgagcgcagtatctgaagctctgtgtcctcctttaatggcatgagatttacaatcgcaatctccagctgtctgatgttctgatgtgatgccctgttttcgtccatcacaaatatattttctctctcaagtatttcctttacaggtaaatcattttgtgtctttataggcattttataacctcttttctaacgcccaaacatctctataaatgtatcctccgagatgataggtattcctaattcttttgcttttttattttttgatgaagtagattcagtgtcgttgtttaccagatagtctgtcttttttgacacgcttcctgttaccttgccgccctgcgactccacataggccttaaactcgcttctgttggcaaaatcatgcacatcgcctgtgataacaaaggtcttgccgtttaagcttccctcggacatatcctttatatcgaccttttctatgtcaagctccttaatcagtgcttcaaacatcgcgctgttttttggatttgcataccattcaagtatggagcctgacttttcctggcctataccgtctatatccacaaaatctgtggcatttctcattctgtccgcgaagccatcaaagcctattgcgttgacaatcttcttgcctgcatcggtacctataagaggtatacagagtgcaaatatcagatttaccgggtggacatgtctgcttttttcgatggcagtctgcatattcatgcatgatttttctccaaagccttccatgctgcttatcttatcaaaatgctcgggcagatggtatatgtcagggaactgttttatgaatccctcatttataaattttagcattgtctgtaccgaaagtccatctatatccattccgcttttgctgacaaatcttgaaaactttttgacattcttggctgtacagtcaggatttgtgcaatgcagcgtcttcacaccgctgtttttacttacaaatatgcgtgtcggatgatgacacaccggacattccttcggtatctcaactgctcccaccgcatcctttacagctatgcattttggaataatcttgttggcttttatcacggaaagtgtacactcttttcccactccaagcctttctatttcagtcagattgcaaagcgaagctctcgaaaccgtcgtaccctctatctgcaccggctcaaaaacagccaccggcgatattgtcgaaaccgcacacgaccattcaatataacgaagtctcgtatctacagcctcatcctgccacttgaaagcaaaacctgctctcgtagcatgatgccctgtgacgcttccgcctgcagcgtaggcagtgtcatcatagcatatgacaagtccgtccacaggcacatccatcctgccactctcgacatcccttgtccagcgttttacagcctcatcaaggcctgccgcatctgttgcctcccttttgacaacattgaatttcatatcactaagatagctcattctatccccccatgatatgatatcatcatctatatgcacgagtgtaaacgcataaaacactacatgtctgcgcttcacctcttccacatcatcgagatttaatgtaccggatgcaaggttccttggattggcatatttctcatcatcgtcctcgattgtatcatttaacagcttaaaatccgtgtaggaaattgtcgcttcccctcttacaaccatatgtcccttgtatggtatctcctttgggaagccgcttatggcatcctgcaaaaaggtgatgttacttcctacagttccatttcctctcgtcagtattttcacaagcctgccaccgtcatatgtgagcacgagtgtcagtccgtcaagcttccatgaaagccagattggcatatcacctgcccatttcttaagctcctcaatgctctttgtcttggcaagtgaaagtgccggatactcatgcggctcacgatttccagcctctgcctcatagcctgcattctgtgtcggactgtcatggcggatatatcctgtctctttttcaagctgtgtaagctcatcaaacattgcatcccactcgtagtttggcattatttcatctgtgccgttgtagtaagcttttgacgcgcggttaagactttcaacaagctcatctatcttatcttttattttgttattctccatgctgtaataatcccctgtctgctttactttgctcttctatcctgatatttcttatccgtatgtttcttatccgtatatttcttatcagaatgatccttattcgtatcaggcataaccggctgattcgaggaatccgcaatcagtcttttgagccccttgtattcaagtggtgtcactgccctgtactttcctcttggcaggtcaccaagctcaatattcatgattctcactctctcaagcttaaccacacggtagccaaagtattcacacatccgtcttatctgtctgttgtagccctgtgtcagaataatcttaaactgctttgaggacagctttttcacatggcactttctggttgtcacaccaagctctacaagcggtacgcctcctgcgagccctctgatgaaactgtcagatattgttttgtttactgtgacaatatactctttttcgtgtctgttgccggagcgcatcatcttatttactatctcgccattgttggtcagaagtaaaagtccctctgaatccttatccagcctgccaatgggataaatgcgctttgggtaattaagataatctatcacgttgtttttttcccttttttctgctgtgcagactatgccggccggcttattgagggcaatcagtatcatctcttcttcctttgatactacctgtccattatatgtgacagtctgtccctttagaactctgtcacctgtctttgctgtcacaccgtctattcctactttgccggcttctatctgcctgtctgcctcacgccttgagcacacgcccgcttcactgaggaatttatttattcttacaccattttcttccataccatatcctctttttagattgctttatccgatatacataaaccaaacagcagccttttctactctttacagcagccatttgctatgtagattaaaacacggagacctttaagcctccgtgttgcttcttatgattgtatgcacatctgttactttgtattgcttttactgtcctactgtctggagattctctgtcttgatataagctctgccatttgttccggcgctgtaggatactatagtccagtcgccctctgtgccatatgctgtaagtgttacctgttcctttaagagaccaagctccttggcatctgtgcttgcaccgtcacgtacctttacaacatcctttgtcactacctgatactcagccggtgcctgtggctgctcggctgtctgctgattggctgcatttgtatctgtggtctgttggtctgtggtctgtcctgcatttgcatctgtggtctgctgatctgtggtctgtcctgcatttgcatctgtggtctgctgatctgcggtctgtcccgcatttgcatccgtggtctgctggtcaccactttgtgatgcatcatcggcctgctgtgtatccgcctctgtagtctgtgtgtctgcatcagacttctttaaattggcaatgcctgacgatgtgtaccactgctttatagcacctgtgagtgttgtctcaagcatagtctttaaattggcatctgaaccgaccgcctgctcatatgccttttgtacctcctcatgcaggtctgcaaactcagatgaagcagtatacttagaaataagctccataatatcgtcatcgagtgcattctcgcagtatgttctgttgaaattactgtatacattatttataaagagctttccgtccttatctgtctctatataaaagaagtcaagtgtaggtgcctgtgtatcaactcccgtaaactttatgctgtttttaacagacacaaagtatgttccctttttcaaaccgttcttggtgtaaggtgtaatgtcattgactgactcatagtactggctgacaacaccaatatagctcttctcattgtcgctcataggtgtcgcaagcttgccaagtgtatcaaggtcatcacccacgtatgccttgtaataatcagcaagtaatgtgctgatatcatccttggcgtcatttgtgtaatccttttcaaactcaaaatccttcaccgaaatctctgtctgtgatccggcttcagtattggattgtctgccattattgcctcctgcgacaactactataagtataagtatgagtcctacaagtacacctgctactccaacgtattttttattttctgtgcaaaactgctttatattatccaatgtttccttgttaaaaaagtccttcatatggttcctccattaacccaacatatcaaaatcaaagtatgtgaccgacgcgaatcgaacgcgcactcgccggagtcggagtccggaattttatccattaaactacggtcacaaaaaaagttaccaactatttatatcacatcttttactttttttcaatgttacttttttcttattatagtcttttagtgttttattataactttttatgcatactattataattgataaaaatttgacaatatatttcatttatcttattatttaactgtttgggcattatatattggaaattttttccgatatgccataaaaatataccattttaattaatacaattactatttatataaggagcagtattatgagtttcacatttttaaaccagcttccaactcctgcacagattaaggaagaatatcctctgtcaaaggagcttaccgagcttaaagcgaagcgcgatgcaatgatttcagatgttatctgtggaaaagatgatagatttctcgtcattatcggaccttgttcagccgacaacgaggattcagtctgtgactatgtcagccgtctgacaaagattcaggaggatgtaaaggaccgcgtaatcatcatccctcgtgtatatacaaacaaaccaagaacaaccggcgagggctacaagggaattgcctcacagcctgaccctgagaaggctcctgacatggttgagggtcttatcgccatgagaaaaatgcacatccgtgccatcgcagagagtggactcacctgtgcagatgagatgctttaccctgagaactggggctatgttgaggatcttctctcatatgtggcaatcggcgctcgttctgttgaggatcaacagcatcgtctcaccgtcagcggcttcgatgtggccagcggcatgaaaaaccctacaagcggtgatttttccgtcatgctcaattctgtttatgcagcacagcacccacatcattttgtttacagaggctatgaggttgagacatcaggaaatcctctgactcacgttgttttaagaggtgctgtcagcaagcatggcaacactacaacaaactaccattacgaggacttaatccgtctgcacgaaatgtacgacaagatggacgttgtcaaccaggcggctatcatcgataccaaccattccaactccggaaagaagttcaaggagcagattcgtatcgccaaggaagttatgcacaacagacagctttcctctgatatcaaatcacttgtcaagggtcttatgattgagagctatattgaggagggcagccagaagattggtgagcatgtctacggaaaatccatcaccgatccatgtctaggatgggaggattcaaagaagcttatctacgacattgcagaaatgaattcttaaaccacaaattatacacacattttttacaaaacacaagccacaggagtatatatcctgtggcttgcattattttgtcgatttattatttaatcatattactataagcaagaactgcactgactgttttggaatcctggatttttccggcataaatcatgtcgcacagctcctttagggtgtatatttctacatcgattgactcggcatcatcgagatgctgcttgccctttttcaggtttttggcaagatagacatctacttcttcgtcgcaaaaggcaactgttgtgcgaagtgaaagtaaaaacgagatatcatcagagctgtagcccgtctcctccttaagctccctttctgcacacagtctggtatcttctcccacaaagtctctgcagccggccggaatctctattgtctctctctcgagagcatttctatactgacgcaccatgattatcctgccgtcatcaagcaccggaagcactgccgcagcgccctttctgtgtgagacaaaatcccattcctcagtcttaccgtttgcaaactgcattgtatccttgtatatatcgagtattgagcccttatatacaagctctcttttttgccgtttcatttcatcaatcatttttcctgtttaccttctaaataatttaaattcagagttaccgttttgattagaaatccacctctgtatcataatagcaacatttgagaagcttctccatctcctcctggcttggctggcgaggatttgagcctgtacaagcatcaaggatggcatttgcagcaatctcaggaagtctctcaaggaatacctcctccggtacaaagccctgctctgttggatagctgtctgctccgtaattcttgatgcagtgtgggatgttcagatcatcattcatgccacgtaagtatttgataagaagctcaaccttctcatcaagtgtctctccacccagtttcatgaaatctgctattacgccatagcgttccttcgctgtctcatcctttgcattaaaagcaataacctttggcagatacatggcattggctgctccgtggatgatatgtgcaccataatcagcaaaagctgcgcctgtcttgtgtgccatggaatgaactattccaagtagtgcgttggagaatgccattcctgccagacactgtgcattgtgcatcgcatctctctttgccatatcaccattgtatgaatcaatcaggtcatgctgtatcatctctattgcatggagtgcaagcggatctgtaaagtcactgttggctgttgatacatatgcctcaatagcatgtgtcatggcatccattcctgtgtgtgcaacaagcttctgtggcattgtctctgcaagctcagggtctacgattgcaacatcaggtgtaatctcaaagtctgcgattggatacttgatacccttctcataatctgtgatgattgagaacgcagtaacctcagttgctgtgcctgatgtggatgaaatagcacagaaatgtgccttctttctaagctttggaataccaaataccttgcacatatcctcgaatgtgatatccggatactcgtacttaatccacatagccttagctgcatctataggtgagccaccgccaattgctacaatccagtccggttcaaactcagccatggcagccgcacctttcatgactgtctcaactgacggatccggctcaattccctcaaaaagctttacctccatacctgcttccttcaaataagcctcggctttgtctaaaaagccaaatctcttcattgagcctccacccacacagataatagccttctttccctcaaagctctttaatgcctcaagcgcaccctttccgtgatataaatctcttggtaatgtaaatctctgcattgtaaaaccctccatatgatattttattatatagtttctcccttgtaatatttataaatattgcagccatcaaatactgaatagttgctaaatattacacttaccattttataacattttactaattttgtcacgtaccattatctgtttttgtgaatacaagatattttatacatatatttttatgcaatatatacaaatttctttagtagtaatgaacagttaccgataatttatttcataccataagcacaacattgtaaaaatcggctgcatttacgttttttttgcaaaaaagaaaaggcttcataagaagccttttcaaatgtacatgttattatgtcaaaccgacaatacgctaatgctctactttgcgtaatccactatacgtgactcacgtattacattaacctttatctgacccggatactctaactcagactcaatctgcttagatatgtctctggccatgataaccatgtcggcgtcgctgacctgctcaggaactaccataatacgaatctctctacctgcctgaatagcaaaagatttctctacccctttataaccatttgtaatgtcctctaactgctgaagacgatttgaatatgtctccaaagtctctcttcttgcacccggacgtgccgcactgatcgtatcagctgcctgcacgagacatgcaataagtgactccggttcaacatcaccgtgatgtgattctactgcattaatcacaagtggtgactctttgtatttcttacataattcggcaccgagctggatatgtgaaccctccatctcgtgatctactgccttacctatatcatgtaataagcctgcacgctttgccattctgacatcctcaccaatttcagcagccagtaagccagtcagctgtgcaacctcgatagaatgctttaacgcattctgaccgtagcttgttctaaacttcatctttccaagaagacgcacaagctccgggtgaataccatgtatgcccacctcaagtgtggcagcctcaccctcttcacgaatcatattatcgacttccttttgagccttctcaaccatctcctctatacgagccggatggattcttccgtcaacaataagcttctcaagagctattcttgcaacctctcttctaattggatcaaagcttgacaagataactgcctcaggtgtgtcatctataatcagatctacacctgtcatagtctcgagagtacggatattacgtccctctcttcctatgatacgtcccttcatctcatcattcggaagcgatactactgaaatagtagtctcagacacatggtctgctgcacatttctgaatagctgtaaccacgtaatccttagccttacggtttgcctcttcctttgctttgttttccatttccttaatcatttttgcagtatcaagttttacatcttcttcaatggtctttaagagatattctttagcttgctcggaggttaatccagagattctttcaagttcctgtaaacgctgctcgttaagctttgatatttcaatcttctgcttcttgagttcctcttccttaactgcaaatccggcttcacgcttctcgatagcttcgagcttcttgtcgacattttcttccttctgaacgatacgacgctcattacgggaaatctcgtttctacgctctttgatttccttatccagatcattcttagccttaatagactcttccttgatctcaagcatagactcgcgcttcttttcctccgcagtctttacagcctcatcaatgattcctcttgccttctcctcagcatttccaatcttggagttagcagatttcttctcgtatgaagcggctgcaaaccatacaatcaatgcagtaataataatagaaactacagcagtaatgatatacggtagcattacaggagcacctcctttattaaattttcattgtatttcacaaattacaacaattaaattctatactttttggtgcaaattgtcaaggtaattgtgacctcattgcggaaagaatctggctgctcttaaagcccctgcgcataagaaactgatatatcctgcgaaactccttttcatcacagttgtcaggatcatagtgtttcttttcaagcagctttgctatatgtttcttttcatcagcagtgtattcgctgtctatggcacaatttatatcatctctgcctatgccctttgtcataagcttctgctccagctgcctgcggcttaagctgtcctgatgatacctgacatatgtggaagcaaatctgtaatcatcaagataatgaaagctcttaacataatctatcgctgcatccacacagcaatccggatatccgccctgtgtgagcttttccctaagctttctttcactcctgtccatctgttcaagcagatgcagtgctctctttttggctctctttcctaccacctcagttatcagcttttcgtaatccgcttcactgataaaggctccctccataatagagtaccgcacggcctctgtacggtacagcacacatgtcgtgccattatcaaaggtcgtgcggtatttgcctttaccaatattctcatatccggtaatctctatcatatataaccctgctcacttattattcttctgcttcaggcttttttgagtcttcctgtactgcagcctcttcatcctcaggctgtgtaaagtaaaaatcccttacctttgcctcaagcatatcaaaaaatgccggattctcatggatataagtctttgcattctcacgaccctgtcctatcttgtctccctcgtatgcgtaccatgcaccggatttgttgacaatgcctgcatttactgcaagatcaagcacatctccttctcttgagataccctgtccaaacatgatatcaaactctgcctccctgaaaggaggagctattttattcttaacaacctttacgcggacatggttgccgactatctcaccgccctgcttgagtgactcagttcttctgacatcaagacgcactgatgaatagaactttaatgcccttccacctgtggtagtctcaggatttccaaacatcacacctaccttctctcgaagctgattgatgaatataacgatacaatttgacttgctgataactgccgtgagcttacggagtgcctggctcataagtctcgcctgaagaccgacatgggaatcacccatatctccgtcaatctcggcctttggtacgagtgccgcaactgaatcgacaaccacgatatccacggcgccggaacgtaccatggtctctgttatctcaagtgcctgctcaccgcagtccggctgtgaaatatagagattgtcaatatcaacacctatatttctggcatatacagggtcaagcgcatgctccgcatctataaagcctgcgataccgcctcgcttctgtacctctgcaacacagtggagtgcaaccgttgtcttacctgatgactctggtccgtacacctcaataatcctgccctttggaaggcctccgagtcctaatgcaatatcaaggcttaatgagcctgtaggtactgtctctacattcatattggctgaattgtcaccaagcttcatgacagagccctttccgtattgtttctcaatctgcgcgatggcagcgtctaatgcttttaatttatcttcctttgccataataatctcctatcctctcgcgaacaaacgttcgttctgttattataataatacacttctattcaattgtcaacaaataaattggaataattacagaatcagatagctgcccgtgctgctgtttgtgcctcacactatactctaaaacagctatagctaaaatactcaaaattatacaaataaaacataattaaaaagacagttgctttcacaactgtcttcattatacacataatctctcactaacgtcaagtccaaattcaaccttgaaatccttacctaattttttccaaactcagtaagcacaagtccgtcatttctatcaagagtcatgccgatgctccactcattgatgaacaggagaagcggattgcccttcatgtcgacaaccttcttcatgtcgcttgttccgttaattgtatctacattgacctcatccttgttctcaatccatctgatatgctcatatggcagattctctagtctgatctgcacattgtactcattttcaagtctgaatttaagcacgtcaaactgaagcacaccgaccacgccgactataatttcttccatgccgcccttgtactcctggaacatctggatagcaccctcctgcgctatctgtgtgacacccttcacaaactgctttctcttcatggaatcaacaagtgataccctcgcaaaatgctcaggtgcaaatgtcgggatgccctcaaactcaaatttatcctttgctgtcgtgagtgtatctcctatagagtatacgcccgggtcaaacacacctatgatgtcgccagcatatgccttgtccactatttttctctcatctgccatcatctgctgcggctgtgaaagctttaagctcttacctccctgcacatggtatacctccatgccggctgtaaactgtccggagcagattcgcataaatgctattctgtccctgtggtttttgttcatgttggcctgaatcttgaatacaaatgcagaaaaatcctctgaaaaaggatcaatcattccgatgtcagattgtcttgctgtcggtgcatatgtcatcttaaggaaatgctgtaaaaatgtctcaacaccaaagtttgtaagagcagagccgaaaaatacaggtgaaagctctccctttgtgacaagctccatatcaaaatcggcactggcaccatccagcagctcaatctcatccatgagctggcttttaaattcctctccgatctcatcggaaagagccggatcatctatatgaataatcttctccgagccctcttttgtaccctttaaggtatctgcaaaggtcatgacctccttgctgtttctgtcatacacacccttaaactgctttcctgagcctatcggccagttgataggacatgtcgcgatgcccagctctttttcgatgtcatcgagaagctcaaacgtatcgttggcatcacgatccatcttgtttatgaatgtaaaaatagggatatgtctcatgacacagaccttaaaaagctttctggtctgtgcctcaacacccttgctcgcgtcaattaccatgaccgccgaatcggctgccatgagtgtacggtatgtgtcctctgagaaatcctggtgtcccggtgtatcaaggatattgatgcaatatccgtcataattaaactgtaatacagatgaagtaaccgaaatacctctctgcttttctatctccatccagtccgaaacagcatgctttgccgtagcctttccctttaccgaaccggcctggtttattgcccctccgtacaaaagaaacttctctgtcagagtagtctttcctgcatccggatgggaaattattgcaaatgttcttcttttttctatttcctgtcttaagttatccactgatatttcctccaaacaaaatcagagtatagtatagcttaaaacggtttccatttcaagacactaaaaatttatgtatcagtccatcgtcgatattacaatatttgatgccccgatattggtttttcgcttgataatgtcctctatctgagctctcttttcatcagtcacatcgtcctttcccacaatcacatcacagcattcatcactgagacttaccacagcattcttaaagccctttgcctcaagcatcatctgggcatcctcctccatctgtgcattttctgtcagcttcaccatggcatcgactgcgctcttcttctcttcctctgacactcctgcatcatcgataatcttctgcagagcctccttgttctttgaacgcacctgctcacgtcccagcttcacctgtgccacacactcctcactctctgtggatgcacttgtcagtaccgtttcaccggcatttaatatctcctctgtcgagtctgtctcaagtgccacctcatccgatacctgtgtatccgcttcgccatttacagcttcgatttcggtggaaagcacatcctttgcattcataaaggtatccctgttatcgtagcttatgtatccgaccactgccaaaagaagtgcaagcgtcgtaataattatctgatttttatggctgcctttcttcacttttattcctccctggatatcatttttgctatttttattttatgcatgggcacatcaaataatgcagaaaccgcattagaaatatcattgtttatctgtggttttcctccgccctgcgctaccacaagcactcctgaaacagtcggtttgtccgtgctcgtgacataaggcacgcttgcatcctcatcatcgtatatgaccgttgttttttcaatgctctccgaggtctccttggtatccttatccactatccttgtgccgtcgtctgacagcgtaatcatcacagacacctcgcccacaccgtccatcctctcaagaatactctcaagctttttttcaagcagcttctcatattcttcatcatcgcaggtgctttcacttaccgacttggctttagccttcttttgcgaatcactacaggtctttttttcctcttttaccggaagcactacaataagaagcagcactccaacaagtaaaatcactatgtagtcagttttcttcagcttcgaaagccgtaaacaaatctgtcgtatccgcgtcatattcatacgaaatcccctctattttctttgtaagctcagcaaatctcatgtcatattcataccctgccgcaagaggctttagaataatgaccgccaaaaacaccccaagcataaacctaaagtacctcctgtactgctcctttggcgttaaatatgtcattaccatgaaaaaaaacgccagatacaaataactcttcatgccctatcaacctcccataaagcttgtagatgcacatactatcgcaatcactataaaaaacaatatagatgcatctcttatcacgatataatacagatttcctgccctggcaacggcttctatgccctccacaatcctgttgtctgaaaccggctgcagcgcagcggaaagcaatctgtacatcagcgaaaagattagtgtttttacaagcggggtcagcacaatgaaaaaaagcacgataatcgccgccataccaacactgttttttatgagcatcgcacagccaagcataatttcacctgccccctgcccaagcctccccacacccggtatcgcctgaaaactttttaagataaggctttccgatattttgtcctttgcgggagcaatcatagcctggactatgcctatgcctgccactatctttatggatgccttcattatttttgtaactgctgattcaataaactcggcaagcttttcaagcttcttttcactagatacgtgattgagcacctcaagcaccagaaacagatgaattcccggtatgagcaccagctttataagccattccactacataaatgagcacaaatgccagcatgtaaaagcctgatgccgaaaatccttttccggacgcaagaagtactgtcgcatatgccggcacaagcgctgtaagataagtcaaaagcacatcaatacagctctttgccacatcagacagcacaaaaaaagatgccataagcattgatatgaccgatgcatacataaacagaaagcttacattgtatacataatcctgccgccagaaaataagccttgaaaacaccataaaaagtatcgtatagcacagcacatttataataacaggcttcaccgcggctatctcataaaaaaacagctcataaatatactcacagattttttcaccggccttttgatctcctgccagaatggcatccactatatccgaaaacgatagtctgtccggcagataatcatttgaatatttttcaatctctgacatatcaattttttcaagcatctgctgttcaattttatctgtgatttcggtgtccgacgcatacacaaaacactgtggcaaaaaaactacagccaatatgattattatcaaaatatattttttacaaatcaaaacagctctccaatcagctctatcagacaagacatcaccggaattgacatcacaacaattgctcccttcgcaaaaagctctatctgcgatgcaattgcgctatgaccacagtccttacagattgaggatgaaaactccgcaatatatgcaatcccaagcatctttaccatagtgacaaaaaatgccggttccacaggaagctttgaaataagtcctttaaaaaactcaattgttgtgccgagccgctccaatgcaaaagcaaaaattatagtgccgcaggccactgaaagaagcattgaaagctcaggtctgtcacgctttaaaagcactgcaaaaaatactgccgcaattcctattatcccaatcttcaacatattacaaagaaaacatatcctgcattgccttaaacagctcacttatatatggcacaatccagaacaatacaataacaagcccggccagactaagcaggaaagtcatttcctcccttccactgtgttttaagacctgtccgagcaccgtaatcactattccaagtgctgctatcttaaaaataatcgaaatctccatcatcaagtcctttcatcgcatacaacaatatgtttaatcggattaccacatttttatacaaacatttttatataagcattattgatatcataatccctcccaaaatccccaccggacaaatcaccttcattttttcaacataatctttcctgtaaaaatctatctgtttatgtatgtccaaagcacattccttaagccgctgctccatcgcagctgcatttttttcaaagaacgcacctcccatttcaactatcattttatttattttttcatcagataccctgccccaaagcaccttctcccacacagccttccagccctcctctccgcttttacagctcctgtttgaaagcacttctcccattctcctgcatccctcattaaacacctcgctctttcctcttatgctgttaaaaaactgtggtgccttcattctttctcctgccagataaaatgcccccttttcaagcaaaagcataaaatcatacagcatcgctatatctgccttttttcttttgctgtaatcgtttatcagccccgataccgcaaacagtactatacaaaagcctgtaagcttcatcataaatgctatagcgcctcacccctttttcatcatggtctataaacacaaaccgttctatggcatgtggcagaattttccttcgcagatcatctgcattggtgccatgtacactgccaagtatccttattccacaactcacaagctggtttagtgcctcgatatcgctttctcctcccagctcatccactgcaatcacatccggtgacatagagcgcaaaagcatcctcatgccaagtgacttcggacagttatccagcacatcactggaattgcctatatcgttttgagccactcccaagtagcacgctgctatctccgagcgctcatcaaccaccgacaccttaagagctttttttccgtcacagccatctgaaagtatccttatgcagtctcttaaaaatgttgtttttccttctcccggccgtgatataaccaatgtattgtaaatgctgttttcatcccggatataaggcatcagtggcattgcaacgtcccttatctgatgggcaattctgatatttaaggacgctatctcactgactgctgtaacctttcctccatcgcagcccatctgccctgcaattcccacacgatgacctccctccactgtaaaatagcctgctgcaagctgcggtgctatcgcgtggaatgaatatccgctcagataatttatcatctcctcaatatcgctatgtgagatatacactccggctctacatcctcccgcaaacatatactgcacctgctttccggcgcgcaccctgatttcctccagaccacacggcatgtacgcttctgcctcagtcctcatcttttgtggcaaatagtcaattatatccatatttttcactccttatcgccacttcagtggcaggtcgggatgggcttatgcgtatggctgcagtgtcgcagaagcgtatagcggagctatttagagtctgttaaattatgctttgaagcacagaaatgccgaggcatggacgccgaggcaaggagatatcgagcccggacggcgagtatcgacggtttcgtcaggcatagaagtacttactgcataatttatacagagtcttaatagcacagcgtagcttctgcgacactgcagccacacgcgtgagcccatcccgacctgccaccgacagttattcaaattaaaaaaaggacacagacgattctgataaatcatctatgtcctatttatattacatgtccaattgttttagaacgtgaaaattattattttttacatcctgtcaggagctgagaatccaagcatatcgatacaagcctcaagtatctcctttgtgagcacaagcagtgaaatatatgacttcttaagctcttcattctcctcagaaagaatctttgtgtcatggtagaagccgttgaatgcgttggcaagctcgtagatgtatgcacatatcttgtgtggtgcagactcctcgtatgcactctcaattgtagcattgaactttgccagagagagcatgagattcttctgtcctgcattgactgccggcataattgcatccttcagtgcgctgatgtcgccaccctttgcctcatactttgagaggattgacttgatacgcacgattgtataaaggatatatggacctgtgttaccctcaaaggatgtgaatctgtcgatatcaaagatgtaatccttgctcgcctgattagacaaatcaccatacttgactgctgcaagcgctacagttttggctgtctgctcagcctccgcctcgtcaatatttaagttctctttttccttctggttttccttaatcttattgagcatctcatcgtcaatttccttgaggaggtactcaagacgcattactccaccgtctcttgtcttgaaaggcttgccgtccttaccgttcattgttccaaagccgatatgtacaagctctgtagtatccggtactatgcctgtctttcttgcgcagcggaacacctggataaagtgcattgactgacgtgcgtctgccaaataaatcacacggtcagggttgttctccttcatacgcataacaagtgttgcaagatctgtagtgctgtaaagtgaggctccgtcagactttaggatgatacatggcggaatctcctttgtatctgtatcctccttcacatccacaaccaaagcgccctcactcatatgtgcaaagcctttttccttcatcatttcaaccatctcaggtacatatggctgtgcatccgactcgcccttccacagctcaaaatgaacattcagattctcataatttctcttaaggtctgttacagagacattcatgatgtgtgaaagcagtgcctgatagcctctcctgcctccctgaagctcctttgtggcaagaagagctgcttccttgaagctctcatctgattttgacttaccgctggctgtcggatagatgtcctcaagctctgatatggtaaacggtgcctccttcgggtactctcctgtatagctctcatcaaaataaacgaggtcaggctttctctcgcgaagctctgtgatgataagtcccatctgaagtccccagtcaccgagatgcacatcaccaatcacattgtgtcccatgaactttgcgatacgcttaacgctctctccgattactgctgagcgaaggtgtcccacatgaagaggctttgcgacgtttggtccgccgtaatccactactatagtgagtggctttttggccttctccaagccgtatctgccctcgtcatccttcatatcgttcatatattttgccagaaaagcggtatccattttgatattaagaaatcccggctttactgattctactgactcaaacatctcatctgactcaaggagcgccgctaccttgtccgagatcataaatggtgcacacttatactcttttgccgctgccattgctccgttacactggaactcacaaaggtccggtctgtttgaaagtgtaacctttccgtacttctcgtcatatcctgcactgacgaatgcctttgtcacttcctctgatatcaaattaatcagttttttcattgtattcctcctgatatatagctgttttgcttcaaacagcgaatatacttatattagcacacaaatgaactgctttcaatatcaaccgtcatttttgccttctgagtaaatattaaccggcaacgtaaccttgcatttgcacccccaaaggagtatgatttcatatgaaaatttaaaggaggtcttatcaatgaagataaaaactaaacaaataaccgtcactgcaattatgcttgcaatctgccttgtcagccagttctttaagaacttaagcgtatacatcacaggttcaatcattaatgcagctttaatacttaccgtactctatgccggaatggcatgtggcattatcctaagcattatcacacctgtcacatcatttttcatcacaggaagtcctgttatggcggctatccctgcgatgtttccgtgtatcatgataggaaatatcattctcgtggtatgtgtgggactgcttcgcaaaaaatgcggtaaagctgccggttttcctgtatcaattgcaataggtgccatactaaaggccgttttcatgggaatagccattgcacttatcattctacctgcatttctgcctgctccaatgcacaagatgctgccggttttacagcttcagttttcagtgacacagcttatcaccgctgttatcggaggtgtatatgcagtcataattgcagctgtgcttaaaaaaacttctttagcacaggcagactaaatattcaattatctgcttatgcttccagatatccgtgcatatttttaagcgcatttttctcaagccttgatacctgtgcctgagagatatttatctcctctgccacctctatctgtgtcttgccctcgaaaaaacgcagcttaataatctgtctcgctctgtcatcaagcagctttaaggcatcgtcgagaaccagattttttacccatgtttcctctttgtttttcttgtccgatatctgatccatcacataaagtgtatcaccaccgtcagtatatacaggatcaaagagggaaagcggtgtctgaattgcatcaagtgcgtatagtatatcgttttcagggataccgcaatcctttgatatttccgctaaggacggatcatgcaccagctttctcgatagcttttcctttgatttaatagcctgataggctgtatccctgagggaacgcggaatacggtatgcactgttgtcacgcagataccgtctcacctcaccgataatcatcggaacagcataagtggaaaacttaacacctatagtcggatcaaaattatcaattgatttcataagtccgatgcatcctatctgaaataaatcatccatattttcattatggtttgaaaaccttctgattaccgaaagcaccagccttaaatttccacgaatatacttttctcttgcagccttatctcccttttttattttctcaaacagttcttctttttcttcatccttaagtatcggcagtttcgatgtagtcacaccgcatatatcgaccttatatacagacatgggaatcctccggataaatttctttatctaaagcattcccatttacagtaattttattcaattaatatgcgtatatattctacagcactgccgctatttttatatccttttcatccttcagcgtcagcacactgttgtcatcaagcaatgtaaccgtaggccttgaatacttctgtgtcacaaaaattattttggcctttttgccgtttgtcaaaagcacagtgcttccgatatatgagcttgcaatcttcttcaaaaacatccctatatacttcggatgatactttgatatgccatcatactcaaaatctgctatcacatcaaaaggacacattccatcccggtaacagcgttttgatgtcattgcatcgtatacatcagctatcgtaataatagctgatatatcgtcaattttatcggatttatatccaaacggatatcctgagccgtcaaacttttcatgatgtaaaagtgccgcacgctttgtgctttcaagaatgttgaagctcttaagtatctcatagccatatatcgtgtgtttctttatcacctcaaactcatcctttgtgagctttccgggcttcaataatatctcatcgggtatcttaaacttgcctatatcgtgcaacagacctgccattgaaatctcatccagcttttctgtatcgagcccttcccatacaccaatgagacgtgcaataattgatacattcatggaatgtgccatcgtagatacatctgtctgctttaatacctgaagtgcgtcaaatagctcatatgaagtctcaaacctgtcaaaaatctctaccgagtccctgataagcgtattcttatccgggatgatattcctgtatagtatgtcattcatatattcatgcaggttatcgatggaatcacggtatttttccttaatgatggcatattttttattccattcttctttttcctgtgctgagcttccctcaacataaaccgaagctatattgtagaatccaaactttgctatatcaaatgccgatacagcctgatgtcttttaaggataagctgtccctttggcgaaaacacatctattgccgtagtcattccctcttttagttcattaacctttatttctctcataatactgtttccctcttgtcatttatcttctcacttgcactcattataccacaacttctctaaatgggcactgactttatgaacttcttgacattcaaagcattttttgttaacatagcaaggcgaaaataattgcgtcagttcgaaaccttcctgacgtaaaacaaaactaaaggagaactaaatatgagaaacaaaaaagtattatttgcagtacaggcagctatgattgcagcactctatgttgtgctcacgtatatcaccaatctgcttggtctcgcatcaggcaccattcaggtacgcttttctgaagcgctttgcatccttccggttttcacaccggcagccattccgggtcttttcatcggatgtctgatttccaatcttatcacaggcggcatcatctgggatatcatcttcggaagtatcgctacactgctcggtgcacttggcacttacttcctcagaaaaaagaagtttgtatacacgcttccacctgtcatcgccaacattattatcgtgccactcgtgctcagatacggatatggttttacaactatatacaagggtgttgatatctctcttcttttcaatgcagttacagtcggaatcggtgagattatctcaatctgtgtacttggaagcctgttaaagggaatactttcaaaatacagaaatgtcattttcaagcaggacgaggcgtagttacatacatagcacttttaataagctgcgcgtcataaaataaaaaaggggccgtaaaataagtccctaatataagaaacgccaattccggcaaatgtcggttttggcgtttctttgtattaacttttctatttctaagcaagtatgcatctttgggtataaaaaatggtgcatttaataaagctcggctaatcacgtccgcttaagttttatgcagctttcgtctgtcgttgctttttattatgatatttataaagattgaatccacatgaaatcagtgtgagctcgagaattacatttttctcgcctctccggaataatcttttatacgatttgtcccactttaatacaccaaaagctccctccgattgaatacttcggttcattctcaagagagcaccatgtatggattcaagattttgcagcacttcctgatggatagaagttaattcctgattcattcggatcgttcggtttttgtgcgctttcggacaacattcttgtttatgctgacacccttcacaagattcacattcgtataattcttccgttcttccatatttattatatttcacatgctgtgttctcttgaagaggaattttcgaccatttgggcataagagatttccatctgcatcttttgcaaagtttacagcacgatacggattctcatgatactttttgtccgtcgtttcttttttgtacatggtaaatttcatgtatttttccatgccgtgttcttcacaataaagataattattgtaagaaccgtatccggcatcagcaaccggatatttcggatagtgaccatatgtgcgattgaatttttccatcaaaggcacaaagcattccatatcggatgcatatggttttacgtcgattacagctatgtattcatcacagatggctgcctgtaggttgtatgccgggagtagctgatcgtttcccatgtaatcacgctttaaacgcatgaaagttgcatcatgatctgttttggaataactgtttctttcttctccacaggtctcgatgtaatatgcataggatttcaaacgttccagatattcatgcaattcttcgtattgtttttgtcgaatgctttttctacgaccacgtccggaaacgaaagaagtttcatccagtccggttgtttctttgtacatcgtaagtaattcagagacataatcaaccgcatacgcttcacgcttttcaaattttattccgagatatccaagtacttcctgattcatagcatcaatcaagagtgaaatcttgtcaaagactttctgccggtttttcacacacgatttttttcatacccaggtatatcgattggcatttgcctcaatttttgtcccgtcaatgtatgtatgctgcagatccacgtgatctttggcaaaaatatatgaattaatgtcttcaaatatctgctcgatagaatcggttagttcgtttcggattaagtttccaaatgtagcaaaagaaggagttttcatgccatcaagaagatacatgtaacgaatgtcattacggcagagcttttctatttctcgtaaggagcagatgccattttccataaaggcaaaaagtattactttaaggagtttttgagcatcacatcttgggtgacctgttttatagcctttctctacaaaatatctggataggtcaatgtgatccataacctcacaaaaagtgtataccggatcggaaatatcgatcaatttttcgatttctaatggtaatttcagctgacgcatagtataattaccattggtattattatttagtagcataattaattataccaaaaaatcgctcagacctcacggtctgggcgattttctgtcaggggagtttttttacagccccttttgttttttaccagacctaatgcagctgtcagttaatttttgtaagttattcctccctaaatttccatagcatctaccattatacttatttctctcttgcctgtatcctgatttgcatttgccacaaactcataaaccggacgataatatcccttcgaatccggtgtgtaacttatcttcactgattttacaactaaatcagataattgttcatctttatcataatccgggaaataaaattttcctgcacatagcctgtcataagcctctttttctgaaataacatctacctttttataaggcgtatattttatcatggagtctctgaaatttgcaattttacctgacgaattaatacaacattctatcgttcccttataatacaagccatcgtcaagaatttctccatcgtttgtaaacctatagtttcctgcatcatattcctcgattggtgcaaaaactgcgttttcgggaataaccactcctagattttccagcttttctctgacaaattcctctgaaagtccagcgtcagcatacgaattttcatcatctatatttgaaaaatccgtgaaacttactgttggtccttcgtaatcgcaccagatactcaggttactgccctcatcatcaaggctggtactgtaaaaaataatagtatcatcatatatgtctgtttttgagtcatctattaaaacaccatactttgaaaagtacccgtcggcaagctccctcgcctcatcttctgtagccctgtgaattgtgtatacatcaagcggatctgcctcatctgccagactcacaccatctgccatcgagacatccacattttgatttgaaatattatcgattgaaagattaccatattccatactattgtatacaataaaaacagctgcaaaagctataattgtaaacgcaagcggaagctgtgccaccagacattttcttatggaaatgttctttctttcacaaacattttcatcatgtgccactccactgacttcatttgtattatcttggactttcttccttgaacagactgccacaaatatcagtcttgcaaccgaaaataatccatatccgatcattgcacctatcgtattatttatgatatcgtcagtttcaaatacacctcgtcccgtgataagctgcacaacctctataaacagtgcaaacccaaacccgcacaaatatattttccacgctcttttaatctttccaaaacaaattggtagtaaaaatccaaacggcacgaacatacatatattaagtatcagatttctccattcctgtgcactaaaattgtaccaggcctctttgtaggaagaaaatggtttaaagttagcccggtactcaaatcccccaaaaccaatacctcctcttagcaatgtcacataaatgacaacaacaatgtatactgcaagtacacacaccagtcctattctgccaattgaaatctgttttttaccatgcaatatttttttataaatcattttgtagcctaaaagccagattattgccaaaaaagccactacaatagtggcaaaaataatggcagactttcctaatctcataatatctgatattctcattacattcttgtatgataattaggaagttaattatcaca

SEQ ID NO: 1487 - DNA, 34266 bp, Unknown
  gut microbiota DNA sequence
aacgaataaattcgtccacagcctcctttttatttctactccgctcgtagcctatccgactatttaagagtaacttttgcaccctctgcctcaagtttagccttagcatcctctgctgaagccttatcaagctgctctttgataacctttggtgcgccatcaacagcgtccttagcctctttaagtccaagacctgtgatctcacgaacaaccttgataaccttaaccttgtttggtccaacctctgtaagctctacgtcgaactctgtcttctcctcagctgctgctccgtcagctcctgctgctgcaactacaacacctgctgctgcagaaacaccgaactcttcttcacaagcttttactaaatcatttaactctaaaacgcttaactctttgatagcatcaataaactctgctgttgttaactttgccattataatttcctccatttaaaaatttaattatgataataaggttcaaatataatatttgaattattctgctgctggagcttcctctgcagcttcctctgcagcttcctctgctggtgctgcctctacggctacatctgcagcgccaccctgctctgcgatctgattgagtacacgagcaagatttgtgataggtgactgaatgcttccaagtaattttccaagaagctcatctctgctaggtacagcggcgattgccttcatagcctcagcatcataaaatgttccctcaactacacctgctttaatctctaaagccggagctgttttagcgaacttagctaagattctggctggtgctgttgcatcctctgctgatacagcgaatgcgcttggtccttcaaggacatcctttaatccctcgaactctgttccctggattgcacggtttactaaagtattcttgtataccttgtaagttacaccggcttctcttaactgtttacgtaactgagtatcctctgctactgtgagtcctaagtaatcaacgactactactgactgtgcaccattgataacaccggaaatctcatctacgattggctgtttaagttctacctttgccacgattcatttacctccttttagattttcgcataaaagacatgaggtatttgatttattaatcaaagaaaccctcctgcctgtcgacagaagggtacaagtcaaaattcaagataaatctcgaaaattccctcggtaggttctacgtttacgccttgcggcacctactgtcttcggcaatatgcattgcaattatatcaaactatattacggatgtcaattactttccgcaaaacttttgcttggcgtttgataggtcttgtaaattgttttactgtaactgtttaactatcttactgtgtaatcttaaccacgtttaacttaacgccaggtcccattgtagatgtaagagttgcgctcttaatgtactgaccctttaagctagcaggttttgctttattaattgcacccataagagactggaagttgtcgtttaactgctcgtctgtgaaagatgcttttccaactggcacatggataatgtttgtcttgtccaatctgtactcaatcttaccggctttgatatcgttaacagcttttgttacatccatagtaactgttcctgcctttgggtttggcattaagccctttggtccaaggacacgtcctaaacgaccaacaacacccatcatgtcaggtgtagcaactacaacgtcgaagtctaaccatccctcgttctggatctttggaattaactcctcgcctccaacgaagtcagctcctgctgcctgtgcctcgtcaaccttagttcccttagcgaaaactaaaaccttaactgtttttcctgttccgtgtggtaatacaaccgcaccacggatctgctgctctgcgtgacgtccgtcgcagcctgttctaagatgaagctcgattgtctcgtcaaatttagctgtagcatttttctttacgatagagatagcgtcagcaacatcgtactgctctttcttatcaaatgccttaacagcgtcttgatacttctttcctcttttcatgaaaaaataacctcctggtggtaatatcgggagagggccctcccacatttacgtttctttgttattattttgagttacataaatttgtaacttctttaggggtatgttctcttcgctaagttcaagcttcgcccaaaaggcgggctcgctttcgctaatctcagagaacggttgcacactaacctcaaccatcgcgttgcacgctcggtttcgctaagtgttagtcaaccacttcaacacccattgatcttgctgtaccagcgatcatgctcattgcagactcaagtgaagctgcgtttaagtcaggcatcttaagctcagcgatttcctgaacctgtgcctttgtaatcttagcaaccttcttcttgtttggctcacctgaaccagactgaatcttgcaagctttcttgattaataccggagcaggtggagtcttagtaatgaaactgaaacttctgtctgcatatacagtaataactacagggataattaagtcgccctgatcggctgtctttgcattaaactgctttgtgaactctacgatgtttacaccgtgctgtccaagtgcaggtccaactggaggagctggagttgcctttccagcagggatctgcaatttaatgtatccttctactttctttgccatttggaattgcctccttaatttgttttcttaacatctgcgaaacttacttctaccggtgtctcgcgaccgaacagctctacattgattgtaactgtctgcttgtgataattcatagctgtgataacaccgactgtatccttccagacaccgccgataacgactatcatgtcaccctcagcaaaatcaactaccacattttccgtcttaatacccaaaggtctcatctcggcttctgtgagaggaaccggtttgcttcccggacctacaaatccagttacgcctctggtatttcgtacaacgtaccatgtatcatcattcataatcatatgaataagaacatagcctggaaacatcttcttggaaacctgtttacgaacaccgttcttcacctctgtgacgtcctccaatggaacacgtacttcaaggatctggtcctcaagatgtctgttttcgattgttttgtcaatattagctttgactttgttttcataacctgaataggtatgaactacataccagttcgcttctgtcataatcactttgcctccgttttaaaaatgtaaaccaataaggaaatctacgccctgctggataccccagtcaagaagcgcaataataagaccggtaactactgaaaccgccagtactgcaacggtctgtctgatgaccgattgcttctcaggccagataatcttctgaaattcagctttcagacctgaaaaccagcttgtctttggagccttttcgactttttcattctgtcccataatgtactccttcactcagttcctagactattttgtttccttgtgcattgtatgagttctgcagaatctacaatacttcttggtttccattctgtccggatgagtttttttgtcctttgtcatgttgtaattacgacgctgacattctgtgcacgctaatgtaatctttgtacgcacgacttccacctccgtttaaattctttgttgtttgtacccttaaaaaaaggcataaaaaaaagacctatttccaagcctatatactatatcacagttgagccgtaaccgtcaatagctattttaaaatttattgtaaattcttttgaacagtgccgctgtctgcacctccttgcagggctgtcagcgatattcttttacatatattactaaatatagtacatttatctgaatttttcaagtattttgttgttgtaaatcctcaattatgacgatataatatatgtgtataagtagaatttgataattaaaggattaccatttaacggattaaacgattttcacggatgaaaggaggggtctttatggcaaagatagacagtgcctacgcttactatgccagcacttatgccaataaagaggtatcgcgctatgattcgcacaagaaaagcgacctgcgcaagatatacaacagaataataaagacaaataaagagtcccctctgtacaagatttccaatatgtccgaggccaagaaatatgctatcgatataaaggaaagctctaaggccatcttaaatgccgtggattcgctttctgataaatacgcaggctcctctgactccttccagaagaaggttgctgagtcatctaatgaggatgctgtaggcgtgcgatacgttggtgacggctcagagaataaaggagcagacggctttgatatagaggtcagacagctcgcagctccacaggtcaataccggcagctacttagacagcaaagccctgtcctttatacctggcagctattcctttgacataaataccaatgcatcatcctatgagttccagttcggagtgagcaccggtgaaacaaacggtgaggtgcaggacaagctcaagaggctcataaacgcatccggtcttggcatcgaggcagacatagtccatgatgactccggcaaggcagcgcttcagcttaaatcaatgcagacaggtctcagcgagactgaggatttcctctttagtgtggctccgtcagctaacgcagagtccataagcatgatgaagcatctgggtattgataaggtatcctcacctgcccacaactctgacttttcgctgaatggcatcgcgcactcatccttgtccaacacctttaccatcaataatgcctttgagctcacgctcaaaaagccaaccacagatacaggagccgcagccatcggttttaagaccaattccgatgcagttgccgacaatgtgcagactctggttgacgcatacaataagatgatagacgtggcagataatttttcaatgaccgactctgcagatgccacaaggctgcttcgggatataagctccatcacaaagggctcacagtcaaagctttcctacatcggtctcatgacagacgatgacggtaagctcactatcgaccgcgacatcctcgccggcgcgcttcgtccggacagagctgacgacaccttcaatacacttacagcactaaaggatgcaataggtgacaaagcaaactctgtgacagtcaatcctatgaactatgtacagaaggttgttgtggcatataagaatcccgggcacaatttcaacacaccatatatttcgtcaatttattcaggcatgatgcttgacagctacgcataaacggctgttgtaccaaatcagtacaacagccgttattttatattttttataatagtggctgcaaatctcccaccattttttcctccagcgtcctgagcctctctgcaattgccacactctttgaatcagcatcgcgatattcattgagactgccactgattgtctctatgcccatattacagccctccgtcagaagctttgctgcctgggactgatcatcattcactgccatcttcattgctgtctgcagcttcgcagccatctttgcaaacgcactcggttccttaatatctgcacctgctttgtcaagcatatccctgcaatccactgacagcccggtgtgctcatcatagtacttgtctatcagctcacgaagctgcttgtcatctgtgtgttctcttatatcgtccatgctctcaagtgccatcttacagcccgctatgcaatcctgaagcaagagcaccgaatcatgattttcaatatttctgctcataaaaacctccatacttcttttctatttagtatggaggttttcatgaggaaatattcacttaatgctttttaaatttttctgatacaagaaatccaataccggcaagcacaaataccaccgccagcacgaccattggaacactatctatatatccaatatcagtggaatatcccaaagttgccaaactgaggtaagccagatgtagattaatctgatccaccgcaaataataatgctgctgtcagccaacagattgatgctgcaattttttcactcttcatatgtattctcctttaattattgctttctttccacacatacattccgtcaggacatttaacgtttttatcacccaattgcatcgttactgttctgggactttcagaatatacctttttgctgctttcaacaacagtaacttttttaggtcctcttgtcacataatatttttgtgactcaccattaacaaaatttactctaggcttaaattcaagccaggtttttttatgaggtgcaacatttattgtcaacgtttctgaaaaacttttcgttccacaccaaccacttcctaccgctgcattaaacgcatctttatatccaccactcaacgatgcatttatgttccaagaaacgcttgctgacacggatacttccatagattgttttgaactcgttccattagcaagtattggggaaattctcctattactgccatactttgttccttttgagcttgttacaaatctatatttgtatgtgaacattccgcatgtatctataccgttattcgtgcttaatttgtacgtatcataattaaataaccccgacaaactattattattaatttcctcagtcatgttttctttttcaatctgattatatattttttgagcttcaattcccgtataaaaccgcaaattaccattctcatcaggtatagctatctgcgtgacttgttcataatttgaatataaattttcactttcagaaacagaactattttccgctgcaaacacattaactaaattactgctatttagtaatactatagtaaacagtcctatgcacaattcttttaatattttcttcatcttaatatcgtctcctttttatgtagttattataaagtatatattttacttggcgcctattaatatattatcgtcaaattctaaagattttactaaaataaatctgaagtattctgaagtttttctcattaaaaactcaaatacctgattttaattttatcctctattacgttaaataaaagagactcttttcctgcgcaaaaaaacagaggccactctctcgttactgcctctgcctactaatcagtattacattataatcaactatattctctcccccataccataaaaataaactttaatttttccttctttatcaattacagcttcttgaagctttatcttttccgttatattattattcactaaataccaatttttttcttccttatacaaactatatatcttatttctataaatcactttatcttctttagcgattctctttccctctgaatcaaaataatcagtatatctataagagattaataaagataaattttcattttgtctatacaatttaactataaatgtaaatagtacacttattgtaatataaaaatatattataatatttcttgtttgaatagcatactcaccatttaaaccaagtataacatcctgtataagctcaattaaaatcatgatattcagcaaaattttaataatttcatcaattgtataccatataggaattatgtttttattatattccgtctttaatttgacatatagtatttttattataggagttaagatcaccaagtagccaaaataaaaaataatacaaattactatgtatttattcaaaaaattacatactctttgcgatagaccaaattcaatattctctggaataattgttctgattttacatttatctactaagcaaatcatgcaaataattataaaggaaatattttgtaacatataaataattttccatgcaatatttttcccattaacaatatcatttgtatctttatatagttcctttaaattactgtaaatactcattacgtttctccaatctattttattataatctttataaaatattataataataaactaaagaaatcccttaaatatttcccaaaaaatataaatttttattaacaaatctaaatatatgtcattttacaatagggaactccaattttacccaaaacatcccatgctctcttgaatagctcatacttccattcatccgaagcatcatcatatccacgcttttaagtcctattcctgtactttcgagcaatgtcttatcatcgcatattccattaccgattttgacttcaaaaatatgtttatcaaaaaaggtttccattattactaacttatccttatttgcatacttacatacattatctgtaagatttgcaaatactcttgatacaagtcccatattaacagcaatttttaccttttcccatattatcttgtcaatgtcaatactatatcctctttcatgtagaactgcatacatttcagacagataatctcctaccgcatactcagcttctataggcttatccaattctatatttttttctgaacttgccaatgaaaaatctaacagtgtatccatctgtgtctttatatccattaccttatctgttattatatccagatatttctgattttcctcatccgattgattctcaagtttcattatatcaatatatgtcattagtccggttaggggagttcgcagatcatgtgccatgttgcgcattagttcatccttttcctgtcgcgtttttttctcctgtgactgtgtttcttcaagctctatttgataacccgctataatttttctaatccgtaaatacactagtgcaattcccacaaaaacagaaaatcccgcatccagtatcattaaaactatataatatttttctgtaaatcctgcatatataaatacatatgcctctgtatcagaaaattttaccggcatacgatatgaacctgttaatctgtaatcataccagtctttcgcctcagatataaatgtatctacatttactttactataaataactttaccatctttatgtatactataaaacgatatatcattttcaatcatccacttatcataatccgatatatcagatgtacttatattattttcagatacataattctgaaatttttcaatatatggtatttctctattatataaataatttgttgcggtaaaataataatctaaaattcccgttccaaaataatatataattccaaacagaatacatgcactaacaattgctattacaaatgatgataacaattttttctttacttttattaaatcatctttcaaacctgtatcctcttccccattctgtctgtatgcatgcctctccacatatttccagaagtttatttctaagatttttaacatgtaccataaccgtattcttagaattgtaagtaaaaatctctccccaaacattttcatatattaactcaatagtatatatctgatctggtcgttgcattagcaattttaatatctcatattcttttccggttagttttatttcgattccattatattcagctctatttcgatttatatacaccttaagtccatttgcttctatataagcatcttttcctatattgcttgtaccgcttttatcatatacttgatatcttcttattaaagcctttacctttgacataagttccatattagaaaatggtttagtcatatagtcatcaccaccgacttccagcccttccaatttatctacttcttctgatttagctgataaaaacaatattggaacactatatttttcccttatctttctacaggtttcaatgccatctagctgtggcatcattacatccattattactaaactaaatgagtagtctattttttccaatgccttcaacccattttgcgctacctctacataataatgctgtatctcaagtaatttctttattccgctgtatacagtttcatcatcctctacaactaaaattttattcataaaatatcctctatttcttctttaaataagatttatttagatacccatattttgtaccatactttatttttatccagtttccgctctcaccaattttcttatatagttcacctttataagcatactgtaagacagaatacgtgcttcccgctccacttctaatagctgtcctagtgactgttacctcataataagttaactttcccaaagcccgctcagctatttcttctgtcatttgtgagccatcaagaaccaagttattttccgcagcctgtaccgatgttgcatcaccaaacacacttgcagttccaagtaacattgtcattgctaaagttatcatttgttttttcatattctctccctcaccatattatattaaaaactctaacacataaaatttcctaattactccgtaatttgcgtaaacttttatgaacataaatgcggcttccaatcatagttattaaaataacgctaatttccaaaagtccgattctatacacaaattgccagatattcatttcaaagttccatatatcaagtgaaaaacttttttgaacattcgaaatctcacaaaattcaacaaaatatttgaaaatattgacagaaaatctattaagcagtccaaatgtcaatattcctgcactcacaagtgccggaacagttatcatcaaaatctcatataacagaatttgaattgtcctaacttttctctgtccaagtgtattgtatattgcaatcatttttgagtgtcctttaagccataaaacagtcagtaacgacataaccacaacacatacaatatacataacgctcaacgtcacacttgtcatactttttaacattgatattacatctgtcatttgcagttcctcattcaaaacctgattgacaactgccgaattcggaacattttgaaacattttactcatatcatcatataaaagtgatgtgcttttatagtctgtgctgaaaaaatttatcccataacagcttgcttcattgtttaattctacatatgaattataatctgtgaatattatactgttagccacttctttatagtagccatcgcttacctgtgtctttggtgtatttattacagtataaattccaatcacattaatacttattgtattattttcatactgtatagatatattactaccaattgacaggttattttcagaagcgagcttatcggatatcattgcccctttatcacctgacatcggatattttccttttgaaattttaaaaataccactactgaaatattcattataagaagtatttatgtttccactgacatatattttatttttctcaaaatcactttgtttttctgtatatggcacattttcaaaatttgctgcttcacatataatgtcacttgtaaatgcattattatatcctacaatatttttattattatctgcatattctaaaatatctttccaatcatctaaagtagaaaaatcgtctaattcaacaagaacacaacatcctgccatatctgcaaaagatttgtaaaaactctctattgccgaatctagaaatgttgcaattccgcaaaacagtgtcaggacaaatatgcaaatagcaattagtatattccgccccggtcgccctaataattctttgcacgcctgccaccatttattcttcatcgtcatctcccatatcatagcaaatatcacattttttctttacataatccgagtgtgttactactataacacatctgtcctgttcatgagctatctgctgcaacaattcgacaatttttcttcgattttctttgtccagatttcctgtaggctcatctgccagaatatattttgcatctgttatcagtgccctcgctattgcaactctttgctgctgtccacctgacaattccgtaacctttcgggttatctgactatcatcaagtccaaccagtacaagactgtctctacacattttaatcaattcttttttaggtacatcaggtaagcttatctgggctgcaaccattacattttcaagggaagtcatataatcaaataactgataatcctgaaaaaccaatgatatactattttggcgcagctttcttccaccaatgttttgtatattttctccatccagcaaaatctccccctcatccggtttttctaaaccggcaagtaacgataagcacgttgtctttcctgaacctgacggaccaaatattccatacatttctcctatttcaaatctgtatgtaactttatccagcacatgcacaatctccttcttagatttatatgcatatgatacattaatcatttccaacatatttaccactatcccttcgaatttaacagtttctttgcattttcttcaacagttgttacaacaggcagtaccataaatgcaacccaattaaccaacgaaattattaatagaattataatatttttcaaagtaaaaaaagcactcatttctatacgtacctcaaagccttgaaatattccgggtgtatcatatccacctatggctctgtctgtactattaattatgacattcttacctataccacttataatgctacatatgaaattgccaagcacacagtataatagcacccccaaaagcaaaccgctaattgtatatatcattcctataaatgcaaatctacctatacaccattttcttgatcttccaagtaccataaataggcctgtatctttttggtattggatagtataaaacgagaaaatgattaacaaaacaattcctcccattataattatcatccagcaaattatttttgatgtttttcccatcaatcctacgactttacattctgaatcgagataattagaagtattatcatatatttccacattatctccatacattttctttaactgggtttttaccgcatctatatgctctatcttatcaatatacacttcacttcccgttgacgctgtgtattctaaccctaataactctacaatataatcataatctacatatatagaattatatggactatgtatgtataccgaggttccctcttcatttgagtcatatatttcgaaatcactgtccactttataaattccgcatatttgtaaagacgttacctccgattggtctcctatagtatatttaacttcatcccctaccttaaggttattttttttcgcatatcgctgttctacaataattcctttatttttataggttggaaattccccttcaataagagatacatttttttcccatgaaaacaggctatattgctgcacatccatattcgcaacaatcaccattttgtcagcccgattgcgcacatctttattctccggatctattcctttatgttcctttacattctctgtatccaccgggtctgcaatcagctctctccatgccccaagtcctgttacatattttacttttctgatttcgtcataatcactctttgtaaagcctccgttatcatcctcaattactaatgcggctccattatataaatatgcatctctctcagatttttctgaggcattgcttaatagcagaccaataatttcacccaggattattgtcgcgataatcagtatgataatcaaagattttattttatttctttttatatatataatagctgtttctatcatatccatctcctcaattatcttactattgccgtttcagatatccttttaagtttttggatttcaacatcggcatcaaagaaaagatatttaccattcatatacactagatttgcaactgctttatcatcctgatacaaggtaatataaccatcatcgttccatttccagattcccgtttcaaccttatcagtattctctatctccatttcatattcaccctgtttttcatcgttatcatgtataatggctaatttactggtactcttaacattttgatactctgaaaaatcaaaagttccataatagagttccactgtcagatgatttttttgttgtaatatgttatatgtaattaatacactgattacatagacacaagcgacaatcgctgcgcagataataatctgttttctatttttttccactacatacttcccccttctttattgttcaatcaatgccggctttattctaaccgtttgatacttcttgctataaacgatatataataccacttttagtgaataaaatcctcatttatgtgaagttttcaaggtacaaatttatggttataaggtatctttaacagaataccttttgaccctcaaatcatatatataatagctgtttctatcatatcccatctcctcaatactaccaaacattaaaaaagccatagacatctatggctttacaatactatatacatataaagaataacctgaaaaatcatttaagaattataaataattctaaagaaatctaaagattcacatatccattttttatactataaacctgatcacacagaatttctatgtcttccttatggtgacttgttataaccataatagcaggttttttattcacatattccctaaacattattctcatatcctgaacagactgttcatccagtgcgttcatcggctcatccaagagcaataccttaggctcttccataaaagcctgagctattgccagcttctgcttcatacctaaagagaacttacgataaacctttttggaatccggctcaaggcccacctgtttgagaatttcattgattctttcttctcctgttttcttattaatttttgccagtaaaagtaaattttcctttgcagtatactccggcatgaagcctatgcagtccagcactattccaacatcctttgcatactgtccttttttcagagggatgcctccgtattttattattccatccgacggctccattaacccagtcattatcttcaataaaacactttttccactaccgtttcttccaacaagaccatatattttcccagattccaattttaaattgacattttccaacacggtctgatttttaaaattctttgatacattatccagctctatattcatatattttctgccttccacttacgtaaaattatatcctcttgtttattttttaacattacagcaacacccaatcctataaccagacactctgctatttgaaataccatacactcaagctgagttgtcatatgcgaaatatacagcccctgtgtaagcggcagccacaaaaataatgttcctgccacaatatggcatatagtaattattataaatccaatatgtttatctccggcttcatgtaaccagcataaaaataccagtagtaacaatactattgtctgtaaaatcatattactcatttcaattatcaaatttgcatttattaccattcccgaaataaatgctattactatcattcccactccgtaatacagataagtacataccagaaatattatcgccaaatgcttcatccagctaattgcatttccttttctcaaggcatactgaatatagtaaaacgaaaagttctttgtcaaaaaataatacaataaagcccagattggcatttgataaaacagatatagcagtaaaaaaatatcaagatttttaaatccggcaaaatagtctgttacgcctgacatatattgttttgaaacaaatccgtatatgctccatataacaactgctaccataaacgtaaacccataatatgacttaacacatattgcaatcagtcttttaagacagtttagtataacggctctataaaatataaccattattacaaacgcaatacttacaaaccaataaacaatataaaagctatatgtttttacatctgtaaccatcaaatgggcaatccatgattttcttccaacgaaagaatctttaaagcttatcctattgctgataacaacatttataagcagacacacaatactacagatattagctgcccatcctgtatttatcaatttgttaaataaaatggtaatacaaccaagcagccagtaaaataacaataagtttccaaatagctgatacacgtttgtcacatgaagcatctgtgacttaacattataaaaattatttacaacagcaatcatattaattaccacccactggataactgcaatgataaccgcgtatttgaatgcatacactacttcaatgacatttgccctatgttcacttccaatccgcaatttaagataaaaattattccgtgtaaccgccaataatccggcaatgctccatacaattaaaatcccgctgacaagcaatattaaatatctgtctccaacgatatttataactgcattggcatatgaatactcctgatatccggcatcacattccatacaataacgaacatattcaaattgcatatagctaaaaataatgaatatagttattaataaatgcaaccatctacttttcattattttttactcctaccgcaaacaaaatgataccggttaaaatcaatatacctgacataattaatattatcggaacagatgcccatgcatatccattaggcgtaaatattaaaagcagatcaaatctgttatccggtatcaatatcgccatggctatgcaaagaacaaatggcagtatcagcgtcagaaaagtgtttttaatccatgccgatatgccgattgcaaatgtagcaaatgtaactcctgccaataaaacaaacgtaccaagtaaacaaacatatgctatagtattcgaggctgccagttcaggatggaacataataactgtctctccctcttttatattcaagtaagccttagttccatactgaaaatataaatgcagacaatatacagcatacggaataagcaaccccaagccgccaagtattgcgttttgtattaatgttacaacaacatacctgtttcttgacattttttgcaggcgcagcttcaaatatccgcttctatattctctgacatatgatattcccataggaagtgctgccagtatcggaaagaggattccattccagccactgcttccggatcccatactaagtatcagtctgtatatcatatgatcagaataagcagttgcagctctatatgtatatgcgtaatttgcttcttcataaaggagcagtcctataacaatggaaataataaaccccgaatacttttttatatatagcatattttcctcttccgttttcatttatttattaattgttcctatagatatctacaaaaaaatcgtatcacaatattttaaagaaaaagaaaggaacttctgaaattttctgaaaatttctaaagatttctgaagtttgtagttcagttcgtaatcggaaatcgcaattttacataaaagcagtattcttttgtttcgtaaattgctctgccatgcatacgtctcatcaacagctcaacattttttagtcctaatcctgtactctccaataagcttttttccttacacaccgtgttgcttatgcatatttcaaatatattttttgaatatactgtttccatgaccacttgctcatcaatatcagcatacttgcaaatattattagtaaggttactaaatattcttgatagtaaacttccatttacagcaactttaaccttttcccaataaatgccatcaatattaacacaaaaaccattctggcttataatggtatgcatttcagaaagataatctcctattgcatattcaacgaaagaaggctcgtccaaatgtatattctcgtctgaacttgcaatagaaaaatccagtaacagatttgaaagatctcttaattcattaactttagatgtcagaatatccaaatttttgttaatgctctcatttgatttgttttgcaattttaagatatcaatgtatgtcatcaatcccgttaatggtgttcttaaatcgtgagccatatttctcatcaattgatctttttcatcccgtgctttccgttcctgctcatgtgccttaccaatatttactttataatcttttatgatattattaacacatctatagattacataagctccgcttaagattgatattacaatgcctaaaattatgactcctaaataatacttttcagtatatccggcatatatatatacattagcctctccatcagcaaaatttaccggtagttgatatttagcaatttttctactatcatacatgtttttcgctgatacaataaatttatctacattcaatttactatatacagcttctccatctttttctataatgcaaaacaaaacacaatgataatccatccattcatcacattccgatatatctgatgcggctatatttttctgagacacatactgttgaaattcctgaacatatggagattcatggtcataaatatatcttgaattattaaaaaaaagagtaagaccatttatccctatgccatatatccctccaaatatacagcacgataatattattgcaccaaatataatttgaactgcctttactgctttaaaatcacttttcaaatttgtatccctttccccatatagtttctatgacagccctgttgcatatttcatagaatttattccttatattttttatgtgtaccataactgtatttcccgaattatatgtatacagttcttcccaaatatttgaataaatcacctcaagtgtatatattctatcaggatgttttgcaagcaatttgattatttcatactcttttcgtgtaaatttaacacctatgccattcacttctactctattcttattttcgtatatccttatatcttttctgtctatatattcatttcctgcattgtcatcaattatttctctatcatatacatttctacgccttaataatgccttgacacgcgatataagctccatattggaaaacggcttcacaagataatcatcaccgcccacttcaaagccttgcattatatctatttctgatgattttgcagtaagaaataaaattgggacacttgattcttccctcaattttttgcaggcatctatacctgataacaacggcattattatatccataataaccaggctatatgtttcatcgaatttctttaaaccgtccacgccatttacagcaatatcgacataatatccctgtaattctaataatgtctttattccattacgaattgtttcatcatcctcgactattaatatcttgtacatcttatatcctcaactttgattaaattcagtaaaaatccatatatacttaaaaagcagttatccctctatcatttaaatattcatatatctgatcatatgtcaccagcgacacatttcccatttttccggcttcctcaatgcaccctggggtaaatccttttttcgcgaataaaaataaatggacattctcatatctaaataatctgcttctcttcttcagcttttcgagtacttttacatccacattttcatttatccacttacattctccaaacaatgcagtgcttttatcctgatcacccattatatcaatttctgtctgtattctctcttgcggatccgttccccaccatcgtccaagattgctaaattccacaggtgcttccccatcaagcagcaatttccacagatactgcatacatatttcttcaaatatcctgcccatataatctgacagatttggagcaattcttttatacgcaagttctgttgcacctctgctaatgatagaattattttcaggtataaaccgataccagaatctaaacatattatcagctattgcatatattgattttctggactccttttcgccatatggagtttctttccgtattaagccaagattaatcagatttttcatatactgtgagcatacacttgtcgtttcgcctatcttggttgcgatttccgacatacgggagctgcctgttgctactgctgttattattgcattatatacagcaggttcacggacttcctgctttaacagattttcaggttcctcgaagattgctgatgcggggttgaggaacacattttttatattatcctctacactcatgctgtcattcatctgtaaaagatattgcggagtaccaccaacaataccatatatcagagccatatcctctgctgaaaatccgttaaaatatttgcagctatcctcaaaatcaaacggaagtatcttcatctgggcagttcttctgccatacaaaggcgccttatacgccagcacattatcttccatgtaagacatagatgagccacataatataagcatcattttagaattatctttatttttatcaataagcatctgcaaggttgaagccatgcttttcgaagcttttgccacatatggatactcatctatgacaagcacaagtctttcattttcacataatttaaatacatattctattgcagcctgaaatgacacgaataaagtccccggcattattcctgaagcatattccatgattgcctgactaaagttctccagattctgcttttcgttgctctctactcccataaaatatattgcttttttatcctgtataaaatggcttatgagagctgtcttccccactcttcgtctgccgtagattactgcgaattcaaatttatccgaattatataatccgtttaaagttgcaagctctttttctcttcctataaacatagctcttctccctccatttctatacacaatattttattacttatatatggtttagtcaatcgtaatttagttaatcataaataaccaaatcgtaaatgactaaatattcatctttcatttcgcatacacaaaaaagacagccgtcccggtccccaccggttcagccgtctttataataaatttcaatgttatacttttatattttactcttatttatactcttttactaacttttatacttgttttgatttagcatctactgctgcgcaagcactgcctgtacctctgcctctgtagcgcatgccattaccttgtctgccaatgccttgcattctgccatgctgctgtctgcgatggtctttctggtcttgagcacacttgtggcactcactgagaactcatcaagtccgaatgcgagtaacagcggaatgagctttggatcagctgctgcctctccacacatgcctaccatgattccctctttcttaccgcactcgatgatacgcttgattgcgcgaagcactgccggattgaaggctgaataaaggtatgctacctttgagtttccacggtctactgccattgtgtagcctgtcaggtcgtttgttccgatactgaagaaggctgcctcttttgcaagcacatctgccatcatgcaggctgccggtgtctccatcatgataccgatttcgaggttcttgttgtatgcaatgccctctgcatcaagctctttcatgatgtcagctaccattgcctttacactgcgaagctcatctacgcctgtcacaagcggaaccattatctttatcctgccgaatgcactggctctcacaagtgcacgaagctgtgtattgtagatatctgttctctggagacagaatctgatagctctgtagcctaggaatgggttgtcctctttctcaagacccagatatgggatttccttgtcacctccgatatcgagtgtacggatgatgacaggcttgcccttcattgtctctgctactgatttgtatgcctcaaactgctcttcctctgtaggaattgtgtctctgtccatgaaaaggaactctgtacggaaaagtcctattccctctccgtcacactctacagctttctttgcgtcctcaggctttccgatattgcatacaagctctacctttgtgccgtctgctgatactgtcggcacacccgcaaatttctttaagagctctttctcttttttgtattcctcaagcagcccagcgaatttctgctctgtctcagcgtcagggtttacgattgcctctccgcttgttccgttgagtaccactctgtcaccatttttgacagctgtgcagattccgtcaatactgagaactgccgggatttccattgctcttgcaagtattgctgagtgggaggttctgccgcccacctctgtgagtattcctgcgatattctctgccacgatacctgctgtcatggatggtgtcaggtcatgtgccacgagcactgtgcctgccggagctgctgagatatcgtagtcctcgattccaagcagaatcttaaggattctggctttgatatccctgaaatctgttgctctctgctgcaaaagctcatcaggtatctgtgcaaatatctctgctgtctgctcaagcacctggtcgagcgccttctctgccgtgattttctcacttactatgagcgctgtaatctgctcctctatggtcggatcctgaagcatctggatatgtccgcgaaggatatccgcatcctttgctccgactgtcttttccattctgtctgccatggcgtttgtatcatttacaaatttctcaatggctccctggagacgtgcgatttcagcgtctgtatctgtaattttcttattctcaatcactatctcatgctcttcgataatgaccacatttccgattccgattccttctgagccggcgattcctttgtacatatcacacctccgattgactttgctggttgattaatctccgaagttgtctgcctcgagctcttccatctttgcaagtgctgcttcctcgtcagctccctcacactcgaatgtaatctccgcatccttcttgatgcatgctgcgatgatgtttacaaggctctttgcgttgattctcttgtcgccgaatacgattgttacgtctgaatcaaacttgcctgcctctcttgctataactcctgcaggtctcatgtgaagtccctctgctgcttttactaccattgtcttgcttaccatagttttgtcctcctgaatttaaaattattggtttgtttatttcgctcacacatatgattaactgtatcgctctctgctattcatcagcctgtcatatgtccgttgctttctatggttttattgtactgtgcggtatgagttttttcaatattccccaaaatgcaaaattgcaccatctctggtgcaattttgtattaatgtgatattcagttccaccccagctctttccggatagctgcacaaagctcatgaggtgaagcagcctccctgagcctgtcagtcgctccattttcattcagaagctttgtaaaatcatggaaaaatgcctttgtcgtgttgacactgtcaaagtttatcgcaagcagaaatatcatgtctgccatcctctcgccccactctatcggcttgtcgagacgtataacaagtatctggcagcggtttacatgctcaggctttccatgcggtatggctatattgcagcccacggcggttgcctccaccttctcacgctccagtacatccctcgcaaactcgctctgcactattcctttgtttatgagaaactggcacgcacgctttaaaacatccttgcgatttttcgcctttttctcaaatatgataaattcctccgtcagcatctgtgaaaactcgctgacctccgcgctctgtccggtcatgagctcaaagcacttgtttctgatatttttctcatcctgcgcactgattagtggagaaacatacaaaaatctcatatccttgtggatatctgcctgtgtgtctatggtcgagagtatgaggtcgcagtcatactcgtcaatatgctctatgcggtctgacgacaaaatgcttactatccttacatccggcaccctgttttctattttgcccgctattatgctgccggtcgcatagcccgctgcaccgattaacactgcgcgcactgtcataggatttctgtgcagggctccgcccacctgcaaggcaataaatgctatctcatcctcgctcggcatggcgcctgtgtacttttcgtagtatctcgatactgtaaagcataccgtaaagagactggcatacgattgtgtgatatccgaaagaaacggattgtctatctctatgccgaaatgagtcctcgcaatggagcccggtaaaaagctacgcatgctctcacgtagaagctcattttcaatcagattggctgcgagaagatttgacagatacactatcatttcatcctctatgctaagtgcctcctcacaggacatgacaacacggttttgtccctctgcacaggaaaaaagcattgccagatacatgatttcaggctgtgagaggctgatgccgtgatgtctgtccagaaagcctgctgcctcctttgccatgttctcatgctctgtcattacgaatccatttttctgtacctgctgctctgtttcggtgcccgcatcctcatcacttgcagcatcacatattcggtttgacaaatctaactcatccggcttcagccctttctccacatccaccctgaaaagtgcaatggctatgtactctgccagcatctgaaatgtgtaatccgtaaaaatgatatcaaagcgtctctccacatgatgtatcatgtcaattgccatcgacagatttacgcttctgaaattattggcaatcacctcggccgcgcatcttgaaagcctgtggtcatcggtcttgataacctgcttatcactgattggatatctgcagaaatgcctcatggcttttctgatatcaagctcactgcctgtcgcatatattccgtagcccgccgttctgtgcaccttaatgccatagagcagaagctctgcgtcaagctcatttatatcatccatgatgacatttttgctgacatttaactcctccgaaaaaagcgcatacgtgtatgtatcccagccacttagcagaatatacgatatgtagttctgtcgcttcttctgcgatactgctgccggtctccgccctgccacatccagaatctttcctatctgcgcatcactaaagcacggcttcatgcctttgccgggctttctgtcaagcgtcatagagttttgctcacaaaaatcagccacctccttcagatatgtcttcacacttcgctctgacatacctgtggacgcagcaagagcctttgatgtgacaagctcattgttgtgctctgccagcttttcaattatcaatagtcccttttctgaaagcataaatcaaagttctcctgattatacataatttaacaattcgaccggttcatctatcagatttgttgcaccatgctccttcaaaaactctacatcacgaaatccccatgtgacagatacgcactccagacctgagtttttcgctgtggcgatatccacatcagaatcccccacatagattgcctcatcctgtgtcactccaagctcctttagagccttctgcaccatatcaggtgccggctttttgcggatgccttcctcctccatctcgccgatggctgctgtcatgtaatccttaaaatacagcttgtccagcgattttactgcaaaatctatcttgtttgatacgatagccattttgatgccgcgcaccttaagctcctcaagcagatccatgataccatcatatggcgatgtattgtcgttacaatgtacgtcatagtattccttgaataatgcaaaggtctcctcaaactctggattgtctgcaccctgtggcactgcacgctccatcagcagtctgactccgtttcccacaaatctgcgcacttcatcgagtgtgcgctccggcatgcccttttgttttaatgcatagtttgttgcattttttaaatcctcaagcgtatagagaagtgttccatcaaggtcgaaaacgaccgcttttttacggttttctttctccccctttgctatatgtgtcttttcaaattctgtcttgcttatcatatatgcctcattcctatcatcatttggcagaaccataatatctccaggtctgcctgatatataactgctgtcatccttattcttaaatagctttaccttgtgctttagcacaaatgcccttgaaaaatcctcctcaacaggtatgcacactctggcatgtgccattccatccactatagtctccgtatccttattcttgaacttcggcacataatctgtctgtttcacagtaaaccgccagtccttatatatcctgaagcttttgttcagcctgtccagatttaaaatctgtacactgccgtcttctcctattatgaccaccgtatcctcaccaaccggtgtggagatatcccccttagctgtccgcactcccatgcagcagcccacaggcagtatatcctttgcaatgatacatcccatcggtatcgggcgttttttataatccacttttttgaagccactcgtatcaaaatcttctccgtaaattatctttgtatcgtttaaataatcaaaaatcctctcttccaataatgatttgattgcagaatccgaaggacgtttgtgtgtaccatcactgctgtactgaaatcttggtgtcaagtctttttctctgcagtagacattatagctgtctatcagcagatccatcggaataaatccaccggccttgtaataatgtcctccgccggagcctatgtccctgcacacttcctgcgccatttcgctcgcgctcacctcttttatgcagcttctaaacgaaagcttcactccattcttaatcactgaaaataccatacatatgtcaatagcatccacctccagcacaaaatcgcttatgatgccgagtacattcgggtcacatgcccctgcctttacgattgccagacgatattcctctatataatcgcgccccagcaaagctgttgcggctatgtccagctcctcaagtgacatgttggcatttcggaatttggccactatagtgctgtcaaaatccgcctcatcgcgcagatccctatcaagcgaatgtgttatctcggtaaattctccggtgtcggtgtaaagtccataatacagtgctgttgccaggcttcgatttatctctacgccctcctcacgcagcatatcccacacaattgtcgcacatgagcccatatagctcatgacacggttcatagcaggaagctctcccgatactctgtggtgatctatgacagctacattttctgccttgaaaaatgtgacattcccaccaccgtactgacaatcgacagtcacaagcagctgcggattgtctaaaaaatccacatgctctatcggtatgccaagactgtctaccataagcaccagattgctcttgtgtatgatattcctgcctccgtatacaagtctgggactttttccattcatcctcagatattcatagactccaaagccgcttgccagtgcatctgcgtccggattatcatgacattgcacaattatgttatcaaattgtaataaatcacttagcttcattattagctccctgaatagttatattaattcattttctcatatgtgtatttatggctgcttcaaataatcacattatttcaggtacggaaacagcagcgagcttctgtccttctcatcaaacatcgaattgtactgcaggatattgtatgcctttatccattttgcctcgtctcctgttgcgtcatccacatgcataaagcactcattctttttcgaataatagccccgtgaatttatggccggaatcttctccatcagctctgcgaggaaccggttgtatgccggcagatctatgttggctctctcaagcgtcagtgtggacaggtagttgaggctcgtcacatcaactttctgtgcatccgtctcgtaattggtccatatgaaaaacggcaccttgtacagattctcaagctcctgctccgtaagtccggaattgcccttgccatttaaaagcttgataaaatcattgcataatcccggctggtggtctccaaaaaacacaatctctaccggatcatccacacccttaaagtatgtgatgagattttcgagtgccttgtcactttcattcaaaagtgacagatactggttcgcatcggtgtatgacgctccaaccttgtaaacctcctggttgaagttgtcatatctctcaccgtagccaccgtggttttgcatcgtgactcccatgatgtaaagcttctcgtcatcgctctttttctcgtagcggtcaataatcttatcatagagctcctggtcagtgatatattccctgagtatttttgtctggtcaaaatcatctataaagtatgtctcatcatagcccagatgcggataaaccttgttcctgctccaacctgtcgcatagtacggatgcatcgcaaccgtcgtatagccgatattcttcagatttgagactatggaagtcgggtcatcatttatatactgctgataaaccaccgagccatccggcagaaatgccatcgagtttcctgtctcaaattcccactcagagttcggcgtcttcgcaccgtacacggacgaaagcgcatagcctttaagcgtattttcactcagagaatccataaacggtgtgacctgcgtgttggtctcaaaatctcccaccaccgacaaatcagcaaacgactcattcatgataacaatgattgtcggatttttcgcatcagactgcgaatatgagctgtccgtttccttgaaattgcccgctatcttgtcaactgctgccttgctgtagccatcaggtgccttcacaaagctgtcccttatgccgagcacaaagttcagcagatagccgtttctgtacgtgccctttttctcccaggtctcggtgttcagtgacatggaattcataatgacatacagcacgcatattattgtgagaagaatcgaaataattctcatatggatagccgactcgaactgcacttctatgcgccttaccagcatgatatacaaaacagccgccagaatcacatacaaaaatttgtagtctatgacgaatttatattttgtcacgacggaaagtcctgttcccgctgacttcaaatccgcatacgtaaactcattgccacggaattcatagacaaagtaatctataaatccaaacgcgagtatggcaattgatgctatggtacatgtcagcctcgtgttgtttgtgataaaaagtatcaccagatatatggcgagcgccagaaccacattcaccacgcataccatatcggtggttttcacaaagtcctcatccgtcagcagcacatactgcaccgaaaaaacagatagtatcgctccgatgacaagcagcatcgcagcccaaagccacgacagcttcaccggaagctcaagcttcacatttacaagtccaaaatatactgccgcaaacaaaagaatcacccaccagcttgccgatgtaaagtaacctaccagcgcggccgccactgctgcaattccaaaatgtatgttgttttgttttgttatctcaaatttgatgctcatttctgcctcttcatattgcctcttaatattgcttcttaatgttgcttcttaatgcttcctcttaatgctgcctgttaatgcttcctcttagttctttctcttaatgttgcaatttgattttaaatgatatttcctaattagcaaagaagtcctcaatttgactgtatataatgtgcatcagatttgttcttgcctcaacgcttgcccacgcaatatgcggtgtaataatcagcttgtttgaatcctttatcgcacggagcggattgtcctcactcataggctcctgcgccaacacatcaagacctgccgccgccagctctccatccataagcgcctgtgccagatccgcttcattcactataggacctctgccaagatttaaaaatatcgcagattttttcatcttttcaaacgcagccttgtccatcagaccaagtgtgtcatctgtgagcggcgcatgcaccgacacgatatcagacgtggtaagcaaagtatcaaaatccactctctcatagcccggctgcgaatttcttcctgatgtagaataataaaccacatggcagccaaaagcctttgcgatatcagccacgcgtcttccgatatttccaagccccacgatgccccaggtcataccgctaatctggtgaaacacattggaaaaatgcgtaaacgacgtatcacccacatatttctcgcttttcacataatcatcataatatctcagcttctcaagcagataaaatagcagtgcaaacgtatgctgcgccacggtctctgtagaataccctgcgacatttctccattcaatgcctctttttgccagatattctttatccagattgtttgtgcctgttgcagtcacacatacgagctttaaattttttgcctgtcctatagatttttcatttacctcaaccttatttaaaacaatcacatcagcatctcttgtgcgctccgctgcttcctctgttgtcgaaaaatcatatttgacaacctctccgagcttgtcatattcggaaaggtcgatgtcgtcaccaattgttttggaatctaaaaatactattttcatggtttgcttcctctgtgctatatatttattcgcttttaatttttttggtggggacttcgcacctgcaggctgtgagagtgcgccggacatatggtatattcctcagaaatatatgaagtcagccacaaaaaatgcatccggatagtctgttttatcagtctgctttttatcgtcaccgaaggttaatggaactttgtggcagttcatatatttcttcggaacacaccatatgccagcggtaatgcaggtttgcgtgtgcgaagtcatctcaataattatctatatttatcaatgtttatcactatttattgttatttgacaattttaatctttatttgccaatgtttatgattactaaaaatacagcttgctttaaatactaacaaattacctagcataatagcattaacataatagtattagcgcaatttataaatgtaatcatatgttcatttcatacatataaatatatttataccacatttccggaaataaaaccactgtatcagtatttgattaaacaaagcttaagaaagcccaccatattaatgataaatttcatcaatatggtgagcttttaatattctgcatcatacttgcatgcaaagcagcattttatctcacagagaatttgtaatcggtctctgtgtggtatgtatcgcctgcctttgtaacaggtgtactgaagttggtctcatttattgagtttggataaaactgtgtctcgaggcagaatgcatcgcggttattgtatttgactccacccttgccttcctgtcccacgataaagttggcagtataaagctggattccgacacagtcggtgtatacctccatctgtatgccactctcaggtgagtatgctgttgcgaccttttctactcccggagctgtcttgtctattgcaaaattgtgatcatatccacttccatagtgaagctgtgtatcatttgcctcaatatctcttccgattggcttagcctctgtaaaatcaaatggtgtaccctcaaccggtgcaatctcacctgtaggaatagccttggaatcctttacaggtgtgtaatgctcagcatttatctgcaatgtgtgagtgtatacacttcctgatgcatgaccattcagattgaaatagctatggtttgtcatattgaaggtagttgtcttatctgcctttgcattatatataatagcaagtgcattttcttctgttaccttaaatgtcacatcaacgactgcatttcccgggaagccctgctccaaatctgcatcctctatctcaaaggtaatctcatctgccttctgctccttaacagtccagaagcgcttagaaaaaccatttgatccactgtgaagactgttctcattgtcattagcctcaagcttatattccactccatcaatattaatctttgcatcggatatcctgtttgcatatctgccgacagtagcaccaaaatagctgtactccttctcgtatgacttcacattgtcatatcctaaaatgacatctctctcattgccatccttgtcctttacaaaaatagatacaactgaagcgccatagtctgtcaaaagtactctcaatccaccgccattgctgatttcgtaaagcgatgcctccactccttttgatgttgtaccgaaagtttttttactcatgccccatatcctcctttggttacattatgtctgttgcattttttgtaactttatgtttgttacattttgttttagtacattatgttttttacattatgttctgttactctttgcctggtagcatttcgattgcataatcgcgtttttcttattctacgcattcctttgtattttacttcttttgatcgcataagtaaactttttcgtgcaaatatccgataaaatatttataacaaatatttaagtgcaattatacgttcaaaataaaatctaaaataatagtaactgcatagttataattaaaaataataagaggattaacatgagtacacgagtaagttcagcaacaaatctttcagcaacatattttatgagaaatttttattcaaacaaccgcgatgccatgaaatcatccaaacgcaaagaatatagtattacagagctcgcttacgatgattcaaccgccctgcaccgcgcagctaaaaaattaaagaactacaagtattcggacgacgaaaatacggataacatccgccaaacagtcatggctcttgttgacacatacaataattccattgattccgcctcaaacagcagttcaacctccatgaagcgttatgccaagcagctcaaaaagctggcaagcaaatacagcgacgagcttgaggacattggcatcacaataaacaatgatggtactctgaaagcaaatgaggagctcgtcaaaaaagccgacgcagacactcttaattctctgttcggaaatgacaatgacttcacaagcagtctgtatcgtgtctcacgccagatgagcagctcgtcatatgatgattactacacatctctgcggacaggaagcaatataaatctgacggtgtaaatctaacggtgttttttataatgtaattttagcatttcaactgtagaatttcgactttgcaaaagaataatagataataaatatttggctgtcttttttttaattagagcaaaaaaaagacagccatcgttctgctgtcttttaggagaaggtattttactatggggatagtaaaaaatatataatgtattggggggtttttacagttattatagtatcaccttggcctctgaaagtgttaacaaacatgcacaaattttcgattattttttgtgcagttttactaattaaaatacgttgtccggagttcaattcaccatatatcaattgaaaaagaaaaccaccactcttacgagtgatggttttctttttctaatgagacatcggggattcggtctacgctccgcttcggtccgcgctgaacagacgtcccccggacgtctagcgccccgaccaactacgttgtccggagttcgaaccctccgatgtcttgcattaaaaaacgcctctctaagagagacgtttttcaatgagacatcggggattcgaaccccggacaacttgattaaaagtcaagtgctctaccacctgagctaatatcccataataaattaaaatgcccagttccggaatcgaaccagagacacacggattttcagtccgttgctctaccaactgagctaactgggcacaatgcttacgcatcgagttgcgggaataggatttgaacctatgacctccgggttatgagcccggcgagcttccagactgctccatcccgcgatagtatttagttactctataaagagtaatgggcagagatggattcgaaccatcgaagcaagttgcagcagatttacagtctgtcccctttggccactcgggaatctgcccataatacaattcaatattaaattgtataaagccgatgatcggactcgaaccgataacctgctgattacaaatcagctgctctgccaattgagccacatcggcataactaataaaagaattagttaaatgggacctacagggctcgaacctgtgaccctctgcttgtaaggcagatgctctcccagctgagctaagatcccacgcgttactcgtagtgagtgttaaatgaaattcatctgatttaatcgtcatataatcatgaataaaaactcactataaacgacccagacgggactcgaacccgtgacctccgccgtgacagggcggcgctctaaccaactgagccactaggccatataaaggtttgtaccttcaaaacttcatacaaatccgatttgttttctccgttattaaccagattaagccctcgacctattagtaacagtcagctccacatgttgccatgcttccacctctgccctatct

SEQ ID NO: 1488 - DNA, 423 bp, Unknown
  gut microbiota DNA sequence
tcttccaataataaagccattcttttgttaatgcattatcctgaaattctcctatcatgatattctctttgcagtcttttacttctctaaaaaaagaatcaatgtcttgcagctgtaaaagctccttttctgatactgttccagtctgtaataccggatatattttcaataataaatataagacagcgactctcggcagccgtaatatctcatattctctattttttaagggaataatcactatcgcctctctttgttccaaaagcgcaatatgtaaataatttataataacatgattccggctttccttataacattccaatgctcttgccggcaaaaatcccattttcgtcaattctgtttcagatgcaagcacacccttttctatcaatccatttatagtttttttaacttcctcttcgt

SEQ ID NO: 1489 - DNA, 1381 bp, Unknown
  gut microbiota DNA sequence
aaaaatcccattttcgtcaattctgtttcagatgcaagcacacccttttctatcaatccatttatagtttttttaacttcctcttcgtgacttttctgtgtccggaattttaatggaattccaaatacatcatttccttttgtaatactattaaaaaacaccatttcatgctctgtaaatttcattgcatgtcctccatatccttatactcctgaaattcatcataaaaatcatctactctgtcaccatgagattttaatgcttcgattgcctgctgcaccggattgtcatcgttagcctttgaaaaacttttatgatattgttgcatcagccccatatatgccataaaagtagtttcttctttccccttccacaatttatcactctcaatacgcgacataagccgggtcaattcatcgtaggaatcatctattctttcctttattgctttcatgttagtcagcagttcattcatattgcttcctgacattttaaaatcctgcatacattctcctttcccataactaatcaatctatgacgcttctctttttcgccttgcctcttcctccaaagcttctcttcttaatctctcttcctcttcataatattgctgctgatatatcttcatctcctcatcttcacgttttgcttcgtcacaccagtaattatattcatttcttgcaaattccaattttgattttacttctgcaattatttctttaaaatcagcccccagtttttctactgcctcgcgattttcactttcctttgttacaaaagtgtcgctgagttttccctgagcagaatccggattcatctccattgtattgtaatctgttgctaattgagccataacatcacttaaattgtctgttttctttaactctttttccaaattccttactacttttttatatttatctctctgagattctgcataggttttctttccaaaaatatcttctattatatattttaatcgttctaacagacttgccatattgcttctcctcttgttctgataaacttttacaaataaaggtctgagctctgcaaacttgttggcataagcaatcataccgtatttaatctgcagcctgtgagctttccgcttttttgctgcccgggaaaactatcatctgctccagttcctctttgggaaccgcctggtattttttaaggtaatccactgtattgactgtggttttctctgttcccggagtgtcatatacaactgtcttgttctctgtgaatttattgtccggaattatatcatactctatcaaatccagattatctcttacgcagaatgtcatgtatgtttttccatccagctttatcctctcaaatgttccaaatgatactatatctagactgtcc
